United States Patent Application Publication US 2013/0096032 A1 - sequence listing, part 39

SEQ ID NO: 1393 - DNA, 86690 bp, Arabidopsis thaliana
acgaagaattgggaaagacgatgagtctctattctttacgggctgcgaagaagctggcctggaggtgaagcatctcggaaaccgagtttattgtatcaagcttagagaaagcaacctctgaagaataggctgacaaactcatgaatcatccacatgctcgcctctgaaactaaaggttctgtttgtttctctcgctgcttatttggatttgctttttctgtcaaaattaatgtgaaatgagatagtgtcgattcttaactaatgtttcccttaatcaattgaatttgatgggtggacggaaaaaaaaactgtatttcatttgtagtataatatgtggggaaattagtgaagaaaagaacatagaatcaatattggcattttctttcaaaaatggggcaataagaaaagaactattaattagaactgagacgatcacacacataaagaatcgcattcttgctttgccgtgagaaagtttgaaatgaaaataaattgtgatactttgcctgtgtacatacataaagagtcttgggcattgcatatacttactatagcttcagccaattgttgtgacagctaaacattaaatcttttcacacaaaaaaaaaaaaaaaagggaaagacttgtaagccttgaatctgtaacccatgcatcatcttgaccacactccttccgatcgtctcttatgcccagtagaacgaattcaaaaagataaagatggcaaagtgacaacaattagtgggggaatccattacataatcaaaagttcctatttcatttctaacgctgaagacgaaaagcctgttcatctcctctccttgattcttcgcaaccgaaaagaagacaaggtactatcttttactttttgctatgtttgtcagatagcactattaggtgaagcctattacgtttacttctgcagctattgccccaattactaccacaaagaatgtgttgagtctccttccgtgtttcattcctctgatcatccaaaacatcctcttcaacttctctggattcccgacatgtctttagaagaagaacgtgataaacgatgttgttcttgtaaacgtggcgtagacgcactattttactattgctctatttgcgattttgcagtccatatggcatgtgcgggaaatccaacatccccaaccattgacaatccaaaaaggcataagcatacccttcattactttcccaggaaatccggtctgttttgcgatgtttgtgcgttggtggacgattctgattacttatatgtatgtctcctatgtgatttcattgtccataaacgatgtgtctacttaccatatgtcataaaggtgtctcgtcacaatcatcgtctcacttttactcccaatcttccttacgaagaaccaacggtgacggattgtggagtttgtcatgcaaagataaacgaaaattacggagaatactcttgcactaagaagggatgcgtttatgcagtgcattccagatgtgctatgcaaagtgatgtgtgtgacgggaaaaaacttgaaggagagcctgaagaagtatatgaagacactaaaatgtttgaggagaaaggcgatgggattatacagcatcagagtcatccacgtcaccaattgagacttgaaaaaatattccacgatgaaagccatcattgtcaagcgtgcagacgtccttcttatgatcatggtggtaatgtgtatcgatgtatgcaatgtgatgatttcatttttcatgaatcgtgtgcatatcttcctcgtactaaacaatttatgctacatgttcatccattgactctagatcccagttacaatttcatagattggttccaatgtgggaaatgttatcgttactcttgcggtttccggtgcatgtgttcgtgtgccgtgtgacttttttccggtgttggacacactttgtgcttctatatgtgagccgtttgatcatcactctcatccacattccttgttcattactagtggtgaacacgaaagcaaaatctgttccatctgtcaatcatcggagccacaacctttaaattgtttgaaatgcgattttgttttgtgcttttattgtgccactcttcctcataaagcaaggtacaaacatgatgagcatttcctcactttttcttatgaagaagatgcaaatgatgagctttatggttgtgaaatatgcgaggaagatataaatccaaagaatgggttatatgcatgcaacgagtgcggagtcacactccacatcgaatgtttactagggagagatccgaatacgacgcctggatcattttcaaattcggtaggaacgttgtatattcttcccaacacttattcaactcgacctatatgcacaacatgcagaagacgttgtccgtaccaaataaagataaattcatcgggcggtccctatatattctgctcttttgattgctatcaaagattgtgtcgtagcgaagactggtcctaatgcttgggaggcctaaagcaaatcactaaatatgtggtcttctcgtaaaagaatttgtatatgtatttgttttttttacttatatattttgagctgtatcaaggatggtgtcagaatcattcatgtgattattttaaggttttcttgatttagacatcaaatatttctagaaatttcgagcgtgtttcgcaagttcaagacataaactcatgtttttagttgtttatagaacgatgattatatatattcgtaaatttcttgggggataagacacgtaaagaccaacacaacttaattagatgagtcaacaatcatcgtgcataactccaaatttctactttttcacttatttgaccgtcatcgatattttatttcattagtaaaaacacaggaagattactcaaaagtcttgaagtctttgatcgttaaaaatgaacatgtgcaaggagacacacaaaaattccaaatcaattatataattgcaacttgcaaagatcgaagcgatttcttcttatatacgagttattatatgtataaaaatgataagacatagtaaatgacagacgcaaaaacattgaccaaaagttgtaaaaatgatatagaaagacgtcaacaccaacaaaaaaatgatatagagagaaacgttcgtttacacgcgtttttgtctatataaagtatacatttatacatccctggaaatttttcagattttcaaaaatcagattcaaaggaaacagaacacaaagttttgtggggtttgaccaaagagagtcaacgaagaagatgtcttcaatcagtacggaatcgtcttctaatctgtctctgttagagaatggcggaggaggaagtgataagccgacggcggagacgtcgaggcgtgtgcggagaacggtatcggcgtcgtcgttgataaggaagagatcggatctgaaactgatctccagagttcgttgggagtttatgagacgaatcttgacgaatcttcaagaagttcttctcggcaccaaattgttcatcctcttcccggccgttcctctcgccgtcgtcgctcaccgctatgactgtccacgtgtaagttccaacaaatatatctttattttatcggaataataaaccaaacattcgtcttaaaccatatgttatgttaattgttattgcgtggtgtaacaaaaaaacaggcgtgggtctttgcgttgagcttgctgggattgacacctttggccgaacgtatcagttttctcaccgagtaatttattcttctttgttttcttcttttaccatttatttgctttctatctaaaataacgttattagttcatttacaaacatatattttgattttcttcttaaacaggcaaattgctttccataccggtccaacaggtgatcatttagatttcgttgactttatatttgttgccatgtgaatcgaaccgggttattcgcagcacaaaaccgaattcttaaattaaatcaacgcattatttttgtggtttaatctaggtgtcttttatagtgcattgatctttgataacttgacatgcaagctatatacatgaaggaaattggatttttgattctgtgaaagtgtttgcattttctctcacttatgaaaattaatgaaaataattgaatgaatgaatgaagttggaggattaatgaacgccacatgtggaaacgcaacggagatgataatagcgattctagcggttgggcaaaggaagatgagaatagtgaaactctcacttcttggctctattctctccaatcttctcttcgtcttaggcacttctctattccttggtggcatctctaatctccgcaaacaccaatctttcgacccagtacgttattgtctcctctcaatcaacattcaagatatatgtatcatatcttatagattgacaacaacgtacaacaaaaaaatcaaaatgtgtatcgatcatctaatcatgtgtgtaattctgcaagaacagagacagggagatatgaacagcatgttgttgtatctggcgctgttatgtcagacactaccaatgataatgagattcacaatggaggctgaagaatacgatgggtcagatgtagttgtgttgtcaagagcaagcagcttcgtgatgctcattgcttacttggcttttctcatctttcacctcttctcttctcatctctctcctcctcctcctcctcttcctcaggttctctctcactctctcttataccatactcttcacgatatgaatcatcttgtgctgcttcttatctatgtgtgcttcggttaaatgtataaaagagggaggacgtgcatgacgatgacgtgagtgacaaggaagaagaaggagccgtgattggaatgtggagtgcgattttttggcttattataatgacacttctcgttgctttgctctcagactaccttgtctccactatccaggtgtgtgttgactagagctttttggaaaaatatgttatcaaaaatataatattttcttcaaaacgtataaaaaatatgaaatggacaggacgcagcagactcgtggggattatcagtgggattcataggaataatattattaccaattgttggtaatgcagctgagcatgctggtgctgtcatcttcgccttccgtaacaaactcgtatgttttacttcttctttttttccctagttaattacaacaaataaataacatcaccatattaatcctggttttgaacaaaatatgaaaatgtacaggatataactcttggaattgctcttggatctgcaacacaaattgctttgttcgtggtaagcataatattagtattgatttctgtaaaattagggaaaacaaatatttcttataatatattcctcttagtttataagcttggctcaattatcaagtttaggtgtaaacttaaatatatggagaatatctttcttacaacctggtgctaactgagaaaatatttcattatggttcagttttcttacaacaatataattttgacaaactcaaatttgaatgtaggtaccagtgacagtgttagtggcatggacaatgggaatagaaatggaccttaacttcaaccttcttgagaccgcttgttttgccttgtccattcttgttacttccttagtattacaggtgccatttcactcattacattatttattgaatcttgaggttgtgttagttttattaatatatatgttattatatgattaataggatgggacttcgaactatatgaaaggcttggttctcctcttgtgttatgttgtcatagcggcctgcttctttgtctctaactcaccctcaagtaagcttctcttttgattatgatgactgttttctacgatgaataaatacactatgatattcatttgctttgtatttctccaattgcagccgaaaccaatacaactaatcatacaataacgaaaaggtaagttatgtttaagggtatcaattagtgcaccatagtaaacaaaaatgtaacattttaagaaatctatcaaatatattgatgaatgttagttttaactgtcaactggcaatcatgataatcatagaaacctaacttctagaaagttaaatcatttttagattctcggactacattatatattatgatatatggttcttgtttattttttttaattgcaggtaactcgaatattgttttgtctttcttttagtgtattgttgttttctttgattacatatttagtttttgaattattgtgtaagtatatatatttttaagaatttgttttttacatcattttttataaggaatatgtaaattaaacgtaatagataattctaacataatcaaaccttgttcatacatgtcagaactgcatgtctatataggaatacaattaaattaaaactaaaaatataaatgccttctcatggaattttttgattcgtatcagaagatatttggcaggaatttattttcttagtgattaaaaaacaaaaaacaaatgttcgaagtatcggagaaggcccaactgagcccactagtttaaattgtactttgtgattcccttgggccttgtggatcccattaagtactaactgttatttacaagaatgccatcatcggaggccatttataaattttggactcaattttgttgcaaataaaaatctgaaattctcaggcgagattccggaagcaaaacattcctaaatttcgccaagtgatccgccatgggagaagagaagtctctgcttcagttccgtagttttccttcactcaagacctctgatttcgctctcaccgaagaaccttcatggaggctggagaacaacgtgtcgtcgaatcgccggagaggaaacaagagaagcggtggcgtttttaccaattttgcgtccctttccgtagcgattaggagagatcggagagaatctacatttaacggtcgtaatggcggcggaggcggagcgttcgcatcggtttcggtggtgattccgaaggaagaggatgaattcgcgcctacctcggcccagctgttgaaaaaccccattgctttactgtcgatagtaccgaaagacgccgcactattcttcgccggagcgttcgccggagccgccgcaaagtcagtgacggcaccgcttgaccgaataaagctcctaatgcaggtaagggctctctctcctctccttctcaacaacttttaaggttttctggcacgtgtgttttctccattttaaaaagtaaaataaaaataaaactggtgactggtgagcacaacgaatacgctgtcgtttcggctagttgttgcttgtgggacattgttgattttcctcttcttttttcttttcctaagagactcttccatgacatggtctatgataaaattgatcatgtatttatatctcattatttcaagccaagaaccttgaggggaatctatggagtatttgtgattgtgttcttgttacaggcttgtagtaatgtacattgattcttaaatgatgtcttattaattcatagacacatggtgttcgagctgggcaacaaagtgctaagaaggctattggtttcattgaggtatatatactctcaatcgtgtaatttttaagaggattagttagttgttcttattgtaaaagtcttgttgatttggttttgtttgggatgactacaggccattactcttatcggaaaggaagaaggtattaaaggttattggaaaggaaatctacctcaggtacgtcacacaatttcttgcatccttttggaaagaatggtgttgaattttgtagagtttgattgcacataatcttagtctgaatgttccaggtgataaggattgtaccttatagcgcagtccagttgtttgcatatgaaacatacaaggtatataatctttctatatctgattctggtttcgtttcgaaagtttttgaaaccgtgtctaatcagtaatcactttgttctgtacattctgccttttttatgttgtttagaaactcttcagggggaaagacggtcaattgtcagtcctcggaaggctcggtgctggtgcttgtgctggcatgacgtctactctggtaagtaacgttgtttataggcctgagtgagtttgtctaatcgtaaagtaacttaagactcttactacttaatgcagattacataccctttagatgtgctgagattgaggttagctgttgaaccaggttatcgaaccatgtcccaggtatattcatcgcattatacaccaactttctcttccataaattaatcaggttttaaagcagacatgtcatatctaggttgccttgaacatgctgcgggaggaaggagttgcatcattctacaacggtctaggtccttcgcttttaagtatagctccttacattgccatcaacttctgcgtctttgatctgtaagtctactaacagttcaaacattacccctgaatatttttaactagattgtttacatattcgataatacaatatatgcacagggtaaagaaatctctgccagagaagtatcaacaaaagacacaatcatctttgttaacagcagtagtagctgctgctattgctaccggtacttgctatccattggataccattagaaggcagatgcaattgaagggtactccatataaatcggtattagacgctttctcaggtaggaacaaaaacatcattatctgcttttattcttccagtttccggtgactgaccttattaaacccttaaaccgttgtgcaggtatcattgcgcgtgaaggagttgttggcttgtaccgtggctttgtccccaatgcactcaaaagcatgccaaacagcaggtagttatagttttgataaaacaagttcatttttttcatttttcttgtttcagtattaacattttggaatcctctttttgtattgtttcagtattaagcttacaacattcgacatcgtcaagaaactcatagcagcgagtgagaaggagatccaaagaatcgcggatgataaccgcaagaaagcaagtcctaacacaatcgatgaacaaacctgaagacgcaattttggatttccacaaggtcatttttgcccgttatcttatgacctttgtttgtgtgttttgtaatttggaatgtaataagttgtatgttctcctcataattcaaaatgtgcttgaattgaatcctgaagccagagagggtaataaatggctgtttgtgttacgtttggtcgcgctggttttgtataaaccgaatttaaccgggttgctacactcgaaattatatcgttttctggaattgggtcatctatctatttcgcggttgcagagagaagttgtcgacgacggtgtcttttgtatcctcctcctccagaccaacaaactcagaaccctaagccctaactccgtaaaatcattttcgtcgccatgtactgtactttgcgatttcctttgcctcttcacattccccaaactcgaacaatgacgtcctgtcagccgaaacgacgccgtgttgagcacttgcggtgctctgctcagcctagtagtattcgtgaagatgacgaagatgccgatgataggaggtgaccatcgattctctttatttaacttgttcctgtttgattctaattgaattattgtttttctgcaaatgtgatgttgatagagttggagttgaaagacgaatttcgattgtggtggagagatacggaaatggcacttcaaaaaggtggtcagcttaggtttctgttcttatcttattacccgaagaatcatctgtataaacacactacctcttgttccttcttgtgcagatattttctagatgatgatgattcccctttacaaggcattctcgaggagcgtgaaactaagcctgataacaattctcagagctctaattcctccgaaacgaacattctttggcttccagatgttgtcagggattttgttttcccctcaggctttcctggtacttgtacttgtcagcttcaaattccatatgtatctttctgtcatcttcctttgtcaggactctcagaatgttaagcttgcagaggttttgtagatccaattatgattcagtgagttaatctcgtaaaatcacattgtgcagggtctgtttcagatgattacttggactatatgctgtggcagttcccaaccaatattactggctggatttgtaatgtattagtcacgtcaagtcttctcaaggcatgttcgggaatcccctaaattattgctaaggtcttcttatgactggacttcttctagagacaaatgttgagaatgctctgcaattttttttcaaaattcttgtgctacaatgcaggcggttggggttggctctttctcaggaacttctgctgccgctactgctgctgcttctgctgcagccatcaggtttactttcattctaatgcaaactttgtttgtttgctgctgcatattttttttgttcttatagtttttccaaaccatgtgttgtctcttcagatgggtgtccaaggatggaattggagctcttggccgtcttcttattggtagggaaaccatcggaacgttaataaatgttcatggagttatctaatatcctctacaataagaagggtatgttttccaggtggacgttttggtagtctttttgatgatgatcctaagcaatggcgcatgtatgcagattttattggcagtgctggaaggtttgtagtacaggatttaaattcttggtgagccatatttggttaaaactgtgtataagcatcacagtttttttttttttttttttttctctttttttcgtagcttctttgatttggcaacccagctatatccatcccagttcctactgttggcatccacgggaaatcttgccaaggtattcctcatttcagttttattattttcctgccagctgaaatctttatccagaattcgcttccgctaagctttaaatgacagagtgagatacttagatttcaatttgaaataggctgtggctagaggattgagagacccttcattcagggtgattcagaatcatttcgctatctcaggaaatcttggagaggtagcagccaaggtatgctagtcatgtatgtggaatcaaaacccaaatacgagcatgtagtagcttgtttactctattagtggagtctttaatttatgttcaacgtttcaggaagaagtgtgggaagttgctgcgcagctaattggtcttggtttcggcattctgatcattgtattttacttgtttgttgaatcattttatcatatcttttcattagaagtccccattggatttcatctaaatcattttttttgtttcatgttaagcgtttgtatgctctaaattttgatgcaggacacgccgggccttgtaaagtcatttccgtttgtgttacttacatggacgagcattagacttgttcacctctggctacgctaccagtcgcttgcagtcctacaatttaacacggtatgagttttgaaatggatattcttacaatcccaacttgagaaaactcagataagtgataactttgatttgaaatattgacaggtaaatctcaagcgtgctcgtatcatagtagaatctcatgttgtgcactcagttgtaccaggtaagcatatttcttccctttatccagcttattattcaacgttcaagtaagactcataatactatacaggatatgttgactgcaacaagcgagaaaacattttgctgtggcagaggttcatgaaacctcgaatcatctttggtgtatcccttgaagagttgtctggtctggagaaatctgtttctaaggtaatcttctcctttcatcttaactgcatccatatgtactcttgagagaatcttctgtttgtaagtccaagttcttgaaactttgattttttcaggtcaaggcactccttaagatgtacacaaaggagaaatatattcttacgttgaataagttgaacaaggatactgagttttctgtgtcctttaaggtaaaacctatattacacgacttatctgcttctcattctcctccaaaagggctaaatttaaaaccgagcaccatactgcatttactgactccgtcatgattttccttgttcttgcactgtgaagaaagaacctagaatacgttactcgtttatttgtctttcaagtaacctgatagagagttgggtatgctttggttagtgattagttgagagtcttgaaacccattcatgggtaattaattagagcatgtcaagttaggactgtgagagatcatagggatgacatactgtttgcttcttcttagttgaataagcttcttgagaagcatatgaggtaggcagtcatttttcagaaatatcggcttaacctacgggacaaagtttattcaccttgctggagagtactctcagttaccgtggctagagtcgaccttttgttgttttatcagtaaagtgttgcatgatcttaatatttctttgcttttatcattctcgtttgaaactacgttactttacatactttctggctttttttctactccttctccatcaagtatatcgtgaatgtgaggcctaatccattttgttttgccttgcctttaattcatgaatgtaaaacaaataatgcaggtgaatgccacaagcagagacgtgttgagatgcctttggcaagcatattggttagaggagaacatggaagaaagctttaaagacaaggatagtgtgttccactggctgaagcaaagcttgtcggagatggacaacaagtttgatgatttcttgttcaaattggatactgctggatggaatctacgtgaatctaacttgaaggttcccaaccaagttctcatagaccaggaatctatccctttctaacactcgattgattgattcttcagactcatcacgcaatctcttgaacagaagaaaataacactgaggtaaataataccaaaccctgtcaatttgagaatatggagtagtctataggtgatttgtagaaatatcatgttcggtacagctaatatagttaggatatatcaggctttgtatggcaacttgtttaaatttgtattgtgtgacctgatccatataaaattaagaagaaaaagtaaaatatctaataataagttagtgtggatgatgagacaaatggtaaggttttaggccaatgatagtgattatacctcttttgtttgtacttgattcgtcaccattattctgcttgcgtttattttagaatttagaggtggctttcggaattaaaaacaacaagacaacaacattttataattttgatttgtatactaataatagaaccaaactctgcttctctcagctattattatctaagtactgatatatttcaaattgtagcataagttctgtatatgtattagatagagttatcttttgatttattatcatatacggattaaatttgcagtttagagcaatgtatttgcaattttgtgaaaagtgaatttgctttatttttgtcttcattactaaagttgaattagcggtttgatgagtcattatcgctattaatttgtttccgtaataataatgataagcaatcatgtcacgaacatattactaatattgtggtgattcttttgccctcctcatccatattcattgattgtaaaagcacacgtaggtcacatacgtatcatcctaaaccccaaattaaaaaaaaaaactaagcaatttttatacatggcctttggcgatccaagcatgcaaaaatattccataaatggttaacacaaaatcatcgattctgaggggttaactagggtccactttattaccgtatggaaatagagacacgtcaaagctagtatttggacctacgtacgctcatgtattccgccacgtgtcgtggtttcactgacataaaacacatgtcggtcagataattctagctctcacgacgatgaagcaatgtaggctcacttccactcaccgccgcctatagcagtgacacacgtcctgtcaccggcgtgtcactcaataattatcagattttcattttaattaaataatgttatcctatatttgttaggtggatcccaacgggagggctttatggtaattaccatttactcctgagaagcttttatttttgtgtgtggagtagtaggagaagtgttgccgttccttgtcgaacaaaaaagagctttagacagacgctcctccccttttgtaatatttttgatattacgtgtgctctacgcgaatctatcaatatctaaatcctctctttctctctctctctcctccttcttcttcttcttcctgtcgctgccttgtggttgagtgagcaaaaaaactcaaaaccctccatggaaatgggagagagaatcaattcgagttgttgttagggggtttgcgatattttaggcttctgtcggtgatctcgaccaaaaaaaataaacaaaggagctagtagggttctgttttctctatcactcggaaggaagctggtttatgtcaaaactttgttcttcggaaaatgcgaaaatcgttcaaggattcactcaaggctcttgaagctgatatccagttcgccaacactctgtaaatctctctctctctctatttcttctctctgtttttctctgttttgatgtttcgatgtgttggtagaatctgatcgtgttcttagtcgagagtggttgatttgcctcataaatttgtttgatgctgtggttaaatccatatttagttggtacttcggttttccctttgcttgagttgctgatttttgtctcttccgattcgataggtcagattgtttttttacttctactgaagtttccagaggataatcagtttttgatacttgtgaatctgtatctctgttgtctgctgggtcttatgtgtgctgatgtcatattgaatttaagactttgcgtttacgcgagctcataaattccaatttattccttagcaagtctcagacgccaccaccaccttttggtcagatcacacaaaatctatctatagtggtcaattctttttcctttcgtcgtatatagtctctgatgctatcctaagttgacttggtatacttggattaagctgtgaagcaacatgttcatgttgcgtactaatctcaccaatcattgaatcaaaatgattaaaaaaaaatgaactatgtgtgtgtagggcgtcagagtacccagaggagtatgatggtggctacgttcagatgagattatcttacagcccggcggctcatctctttctcttccttcttcagtggactgattgtcatttcgctggcgctttgggcttgcttaggatccttatttataaggtctcttattaattttcctgctgttttattgctactggatcttcaagatcacaatgttcttgtctgcctgatatgtgattctctgttttttatttataggcatatgttgatgggaagaccacaatgtcgctacatgaacgcaaaactagtatcagagaattctatggtaatctgttaatcacttattctctcttaatctaaaggtataagattagaccagacgatatgtttttttctgactagcaatggatgttgttgggcagatgtgttgtttccttcgctattgcaacttcatggagggatcaccgatgtagaagaaaggaaacagaaggagatatgcgacaaaagataccgtaaaaaggacagaacagataaaggaaagatgtcggagatcgatttggagagggaagaagagtgtggaatctgcttggagattcgaaacaaagttgttcttcctacgtgcaatcactccatgtgtataaactgctacagaaactggtatataaagcttttccttcttttcactcactctcaccattcatcagcctttttcttacaagttatagaatctcttgtttggaataggcgtgcacggtcacagtcgtgcccgttctgtcgaggcagcttgaaaagagtgaattctggtgatctatggatatacacttgtagcgccgagattgcagatttaccagcgatttacaaggagaatctgaagaggttgttgatatacattgacaagttgcctctcgttacttctgatccaaatcttgtcccttatgctcctcttcctcggtgaacattacattctctctgtttcttgttatgcacatagcaatttctttcaaacaaatttcatctatttatgtccactttgtatataatatttatgtgtttttagttggtttttcatctttctatagtctcagatttgggtttgtatataacaaccattggttattgacatttagatcaaaaattcgatatcatatttgctgattaagggtacttaatcacattttggttcgtttaaattagtatctgtctatctgactatgaattacagtaaccgattggtgtttcagtcaaaccgacttgttttgatcgttttggggagtaatttggtttcggtatggatcgaattggctgaaccggaaaccagcaatttgagtgaagcacaagaccgcagtacacgtggcttcttctaactggggtaagaaattatttgacccaatcagattgtacctcatctagattttattgccaatggacttgaaacatcaccagataacgcagagtttaatagataagattagtaatcctactcaccgtcagatggatttgtgaatcgatccaacggtcataatcgtctttccaagataggccagctccgaaactcacctccacgcatctataatcgtgtatcaagaaacggatctttcttctctatcttctgaatatcacaaaacccaattagccggagatggccgcaacatccgccgctgctgcagctgcttcttccatcatgggtactcgggtggctcccggtatccatcccggttcaggtcggttcacagccgtgttcggtttcggaaagaagaaggcagctcccaaaaagagtgccaaaaagacggtgactacggaccggcctctttggtacccaggcgccatttctcctgactggcttgatggttccttggttggagattacggttttgatcccttcggtttaggcaaaccggccgagtatcttcaattcgatatcgattcactagaccagaatctggctaagaacttggccggagacgtgatcggaacccgtacggaagctgccgacgccaaatcgacgccgtttcagccgtacagtgaggtgttcggaatccagagattcagggaatgcgaactcatccacggacggtgggcgatgctcgctactctcggcgctctctccgtcgaatggcttaccggcgttacatggcaagacgctggcaaggtaacgccactcccttctccacttggataatcggttataagttagttatttcgaagatgctaataaattagtattcaaatagttgcgtttgcgtttgtttgcgactcagatagaaatgtatgtacaatttagttgatttagcgtttgctttggcgtctgtctctctctctttcttacagtttgcgttagcattggactgtttgagtttctgttcagtcaagaatattcaagtctagtgttcaatgagtgatatttaaatattagttgaaatgttgttattcaatcaggtggagcttgtagatggatcgtcctacttggggcagccattacctttctcgatctcgacattgatatggatcgaggtgttagtgatcggctacatcgagttccagcgcaacgccgagcttgattcggagaagcgtttataccccggaggcaagttctttgacccgctaggtttagcggctgacccggagaagactgctcaacttcagttagctgagatcaagcatgcacgtcttgcgatggtcgccttcttgggattcgcggttcaagcggctgcaacaggtaaaggtccactcaacaattgggctactcacctcagtgatccactccacaccaccatcatcgataccttctcctcatcttaaaatcattatcatgtgagattctatttgtaacttatgtaaaaacagagctatgatgatactgaatcgactttgggcttttgcttgtttggtttatttacatgtttggcccatgacattaaattgggcttctccttatttactatacctactcgtcgtacattttcaaaatgtatttttgtcgcatatacagattggcccaatagcaggagtacaagaccgacccattagttatgttgtgattattttttcttgatttggacaatgaaaaaggagaaccgtacagaaaaacaaataagtccacagacaaaaaaaaaaaaaaaaggatagtcacacaccgcgtgggatttggatgaacatgggagacttgtcttgtgaagtctccttgaaattgattccgtgtctcactgtcactgttccgtaatttgggaggacattgaattattatttttgtcgttgattatgacacataacaagcaggttcaattactagtttaggaaaaaaaaaaaagcaggttcaattacttgctcgtatgcactgaagaaacaaccacaaaaaatgttttcaaactattgaacgtggagattcgatgaattgattgtaattctaatattcttttgaagaaaaatattcattgaggaatgaggttcgtcataatcaattatgaatatagaattggctggttcaacgatcaaaaatggataatccggacaatataacaaaaatgatgacgttaagcaaaacatacagtaattttatataaaaaaatcataactgtatgagtaatctttgtgacgttacaaaatactaattttaatttttttgatagtatgactaatctgtgtgacgtcacgaaaaaattatatattaaggttttacctccccgccacattcatttcagaaacttttagctatagacattccaacaaatttattttatactattgttcattaatcataagtactagttaaatcatgttttggtcttttgaagctaaacgatttgactaattcgaagcaaaaaagtgaatgtgctttatccactactgactgatacgagaagtcgaagaaactctggtgattgaggtcgacgaaacatatcctaccaacttggatccgaattcgcttcttgaagactttgaatatccccactcatcgtcaatctcaggtacattctcctctccgtttagatacctaagcacgattctcatcgacggccgagacgccggtttttggtggcaacagagcaatccgacggcgagagcaagccttgcttctcctccgtcgtaaccagatcctagtctcggatcaatcgcactgagaatctcaccgttcgcgtgaagctccataacccaatcgaccaagaagaaggtaccggaatccgttggttttctcccgcaaacgatctctaacaacaaaacgccaaacgcgaaaacatcagacgcagatgaggggtttccgttgcgggaaagctctggcgccatgtacccgatggttccaacgagtgctgttgtttccgatagcgttccgcgttcgtaaagcctcgcgagtccaaaatctcccaatctagggttcatctttgaatcgatcaagacattgctaggtttcacgtctctatgaatcacaatcttctcccattcttcgtgaagatacaataaaccagacgcgattcctttagcgatctgaaaacgagcgttccacgacaaaacggcgccgcttcttctcggtacagtgtagagcagagagtctaagcttccgttggggatgtaatcgtaaatcaacaagagatcgtttttgtgtttgcaccatccttggaggttcaccagattcttatgccttagtttccccaaactctcgatctctgcgacaaattctcgaacaccttgcctgctacttggaattatcttcttcactgcgatgggatccgaattcggcagttttcctttgaaaacggttccaaatcctccggttccgatgattccagtctttttgaatccatccgtggctacgtagaggtctctgtatctcaatctgcgaggatgatcgatttcccagtcttcaagagtctcttcttgtcccagtctcttcttgtacatgacgaagaagaagagtaacacaagcatgaccagcattactgccgataacgccacgatcataacaatgacttgagaatttaaaccttccttcttcgccttattcggcggcggcggaggaagctccgagaggattagaacatccgcaattggacgttctccgccgcttgagaaactccaacccatcacgtaatgagcacttgactgacctttccccgtcgatgccgtgaatccgacgtacatttcttcttgcacaatctccaacagttttggaacatgttgagagatcaaaggctttgtgggtttaaaccctaatctcgcgggataaacggtgacgtttagcatttgtgttgctccatcatactccaaaagggcttgaataggattgccactctcaagctggaaatcttcttttttgttgtgatcatcattgttgtaatacacgactggttcttggagatccgaagtacgactgttgtaattcagaccgatgtcgtttcctattctgtcggtgttgtcgtctcttgatccttgcaccgtgtcgaattccactgcgaatacgtggttcctaggatccccattgttctctttgttgaaaactcccaagtactgtgcggatccagcattgagacgataaggtgttggagatagtgtgaatgtgaatccaaagcctttattgcttgagcttgaagggattatgacaaagacgaaagacgtgctaaaggaacgaattgtgacgtttgtggaatttctattaagcaacctcaccggtttgtggtagaaagctgtaccggtaacattcgactttcggtcagtgagtctcaatagtccgtcgggtttgatcatcgcggctccttcaatccgaatcttcgattggtttccgttaaaacctcggaaagcaaaatttgttgttgttctctgagctcgaacatggacgctcaaaaacaggaaaagcttgaataagaatgagactatgaacatggatctttgtgtgcccatgggtgagcgaagtaaagaaggagataaagagatactttgaagagttctttgttagataatttcttttatggacatgagatgagagtttgttttttttctttcagattctaatgagtcaaagaagatgaaaattataccaaaaccaaaaaagaagaaggaacatggtactttccgctcaatgttcacattaccgtacattgaaaatatatggcacccaatgtttttgtgaaaattaataaatagaaaaaaaatattagccatttatttcaacaaataatttccattaagacttggaccaacatgttttagtgcttgaactctgtggttaaaaagaggtccaaacgcaaccatcaggctgactttgacaaattctacgttgactttaacatcatgtattttatatttttccttaggaacaagaaagaaaaaaaatagtcatatggacttggacgtttgtgattaaaccttaaaagataaaaagataaaatgtccaatgaatatcgtttaaccgttttaacttttaagtgttttctcaaactctcaagtttttctctaacaagtaacacccacgtataattttctaaattaccatttcagcaatatctagtgagttctaaatttcttcatggacttgatttgtcgattggtaacaaaatttaatacaaaaaagacgcaaatatacatgtcaatttcacaaggaaaatttgcactaatattaaaatatcgatattaataattgagtgatatgtgtgttatagcttttgggtcatgctaaggttgctaacttgtaacaacaatttagaaatagacaacccaacatatttatttttgagttttatgtttttgctcatttttaaagcttttttaaaagctaaacgaatttaattggtgactgatatttttcatcgtagtttaaaactaaagagaatcaatttctaagattaatcggccaagcatcttagcaatttacaaatgtaaaataagattccagttcgtagccgtaaatgttgcataccgtctgttatttaaaattattttaccgctcttagctatacgcttttgttaaactagccgtttgaatgctaaataccaaaaataccataagaagtgaaaaacaaaatttgtactactgttattgcttataagttacaacagaaaaaaactcgaagtaattgactttgtactatctaccactgataacagaactagaagaaacccttgtaacggagaaagatgggactgagctcgaagccctatccgatgaaacatatccttcaaagttggatcctaaatcgcttcttgaagaatccgagtatccccaatcgttatcaatttcaggtacatcatcatctccgttcaaatacctaagcaccgttctcatggacggccgagacgtcggtctttgatggcaacagagcaatcccacaacaagagcaagccgtgcctcaacgccgtcgtaaccaaatccaagtctcggatccaccgcatggagaatctctcctctcgcgtgcaattccataacccaatcggccaagaagaatgtccctgagtcagtcggtcttctcccggagactatctctaataacaaaacgccaaacgcaaaaacatcagacgcagacgaagatttgccgttgcgtgctagctctggtgccatgtacccaattgtgcccacgactacggtcgtgttcgattgcgatccgcgttcgtaaagcctcgcgagtccaaaatctcccaacctaggattcatatcgtcctcaatcaaaacgttgctaggttttatgtctctgtgaatcacaaccttttcccattcttcatggagatacaacaaaccagacgcgattcctttagcaatcttaaaacgtgcgttccacgacaaaacaacaccgctctgtcttggtctactgtagagcagcgagtctaagcttccgttagggatataatcataaattaacaagagatcgtttttttgcttgcaccatccttgaaggttgaccagattcttatgccttaatctccccaaactctcgatctctgcgatgaattctcgaacaccttgcatactattcggagttatcttcttcacggcgatttgatcagacgaaggtgacgataagtttcctcggaaaacggttccaaatcctccagttccgacaatcctattctccttgaatccatccgtagcagcgtagagatctttatatctaagtctatgaggatgattgatttcccagtcttcaagaacctctccttgttgcaatcgtttcttgtacatcacgaaaaagaagagtaacgcaagcaagatcactgttactcccgatagagctacgatcagagcgagtacttgagaattgtaacctctcttcttcgccgtgttcggaggcggacgaggaagttccaagaggtcaagcgtatcttcagttagaagatcaccgccgctagaaaaactccagcccatgacgtagtgagcactcgactgatctctccctgtagctgctgtgaatccaacatacatttcttcttgcacgatttgcgacaactttggaacaggtcgcgagatcaaaggccttacgggtctagacttcaagttagccgggtagacagttaagtttagcgtttgagttggcccatcgtaatccaaaattgctcggattggatcgccactctgtagtgggaaatcctctttccggttaggatcttcgttgtcgtaatacacgaccggttcttggacatcagatgttaaactgttgaaattcagaccgatgtgattgcctgttctatcggcaccgtctttaaaaccttgcactgtgtcgaattccacagcaaaaacgtgattcgtcgaattcccgtcgtttgctttgttgagaagtcccaagtactgtgcggattcggctccggtacgatcaggggttggagatagcgtgaaggtgaagccaaaacctccgttgctagagcttgtagggatgatgacaaatacgaaggaagtgctaaaagaacggattgtggagtttgtggaacttgtattagtctccagcaatctcacaggtttgtggtagaaagatgtaccggtaacgtttgagtttcggtcagtgagcctcaatagtccgtcgagtttgatcgtcgcagctcccgttgtcacaatatttgattggtttccgctaaaacctcggaaaataaactctgtttttggagtctccgttgttgttctttgagctcgagtagggatggtcaaaagcaagaagagcacgagcataaatgagattatggatcttgcagtacccattaatgatcggtacattagaaacatacaaaagaaaaacagagagaaggcgttttggaaaagataacaagaataatttaaggattagagaagttgttataaggagggagactgaagaaagaagaatttataagttttaaactagaaattgcgtatgttcttcccctttgaaaactggttcacattagcgcgagtattgaacaaatatatatatatgaaactccaatgctttgtggtcaatttaatatttggaagaaaaaaagttaaaataattgacaaatatatattgattgtcaaccaagaaagaaatttcaatattttaaagttgtggctaggaccaaaatactatcatttgtcatctgttagttataagatatcaatgatttggttgtttaagatgatttttctaatcgattttttttttttaaaagaataataatatctctgtttctgtttctttgtaatcgatttctaatctagtgttattcaatcgattattattttgttgttttacttgaaacatgtatcattgatgattttcaacaacaaattacattttaattttatttagctagtgactttgaaatacaagtatgcaaactaaatatgtaacaaatttacatatttatggggttaaaatgcaaagccatattaagatatttacaaatttcaaaatataaaaaatgatctaaatttcatgttatcttttatgctggaaactaactttttttattttttttttcttttctcaaaagtcctacgcatatatgtagtctgtctttgacaaattccacatcgttctttgaatatgcagatattttatagtttgtagggacaaaaacaaaaataatttgactttgaacaaggacattgtgtgatttaaactctaaaatataatatataatattggtgattagattgagttccgaacttatacgactgcagtaactttttttcctttatacaataatgattaatctaccaatgattagtagtaatatcatatgtttactttaatcactttttcacatttgccagaagaaacaaccttttatggttacgccatgtgggtctcttgttagttgttactaccgcatataattattatatttaaataagcatttattacgaaatctgatctgataagtgctgcaaattccttgattcgaattgtcacatgacacatactaaatccttatcagtatgactttgtaaatgttgtcctagtttcaatatttctcttttgcgtatttatttacccatgatgatccttaatgatgtagtattggaactatagaagatcacgtcatgtggtcgcgtgagatttgaaatacgtggctcaaccctatccgatttttaaaactaaaccatgtttttacatagttgttgattgtcaatccggtccgatttcaaatggctgggctttaaactaattgttggacacgagacaaagaacccaatgggccgagcccaatttttaaacacagttccaaaacttgaattatagtttagtgagaaaaaaaagagttaatgcgagctttgaatgtgtcaatcgaatcttatctaccactgattaaagaagttgaagaaattctggtgagagacgaagatgtgtgtgagtgtgagctcgaagccctatccgacgaaatgtatccgacgagtttcgatcctaaatctgttcttgaagaatctgaatatccccaattgtcgtgaatctcaggaacatcttcgtctctgttcaggtacctgagcaccattctcatcagcggccgagattccggtttgtggtgacaacagagcaaaccgacggcgagagctagccttgcctctccttcgtcgtaaccagatccgagtctcgggtcgatcgcactgaggatctcaccgctcgcttgtagctccataacccagtcggctataaagaaggtcccagagtccgtcggtttcctcccggagacgatctctaacagcaaaacgccaaacgcgaaaacgtcggaagctgatgaggagtttccgttgcgggctagctccggcgccatatatccaatcgtgccgacgactacggtggtgcacgattgagatccgcgttcgtaaagcctcgcgagtccaaagtctcccaatctaggattcatatcggagtcaatcagaacattgctaggtttcacgtctctgtgaatcacgatctgttcccattcttcgtggagatacaacaaaccagacgcgattcctttagcgatttgaaaacgcgcgttccacgacaaaacggctccgcttcttctcggtttactgtaaagcagcgagtccaagcttccgttgggaatataatcgtagatcaacaagagatcgtttctgtgtttacaccatccttggaggttcaccagattcttatgccttaatctccccaaactctcaatctccgcgacaaattctcgaacaccttgcatgctatttggggttatcttcttcactgcgatttgatcagacgatgatctgatgtttcctctgtaaacaattccgaatcctccggttccgacaaccctattctccttgaatccctcagtagccttgtagaggtctctgtatcgaaatctgtgaggatgatcgatttcccaatcttctagaatctcttcttgctgcattcgttttttgtacatcatgaagaggaacagcaacaccaacatgatcgatataacagtcgataaagccacgataagagcgatgaccttaccattgtaacctctcttcttcgccttattcggaggcggaggaggaagttgggagatgtcgagcatagctgcaagtggatgttctccaccgcttgcgaaactccaacccatgacgtaatgagcactcgattgtccgtgtctcccagtcgctgctgtgaatccgacgaacatttcgtctacgacaatatctgacagttttggaacctctcgtgagatcaaggggattcttggtttatatcccaatctggttgggtaaacagtgaggttaagcgttttggttggtccgtgataatccaagaagacttggattggctcgccgctcaccagttggaattcctctttctgactatcgttgttgttgaagtaagccactggttcttggacatctgaagagagactgttgaaatttagaccgatgtggttgcctattcgatttgttccgtctttgaatccttgtaccgtatcgaactccacagcgaaaacgtgattgctcgaattcccgtcgtttctttcgttgagaagccccatgtactgctcgggatccgcatctgtacggtttggggttggagagagtgtgaatgtgaagccgaaacctccgttgcttgttgagcttgaagggattatgaagatgaaagaagtgctaaaggaacgaaccgtcgtattggtggagttactgtcgagcaatctcaccggtttatggtagaaagcggtaccaacaacgtccgagtttcgatcggtgagcctcaaaagtccgttggatgtgatggttgaatctccttgcatatgaatttctgattggtttcctttgaaaccgtggaaaatgaactctgttgtcgtctctgttgttgctacatgagctctaacaaggaagagcaccaacaagagagagaccatggattttgctctgcccataagtgatcgatagggataagagggataaccaaaaacaaaattgaggtaggaaagtgaaacaaaaacagaaataacggctttgggagatgacaacagaagatgattcttagaaggagaagtgagtttggtttctcttacagattgtcgatgatcgagatgaagaagcaaagaagacagagagagaaaaaaaatgtcaacaacttcctaacttgcaggtttttgataaatagtaaaatgatacattgtaggatgctctataattaagggaaagtatcttttattgttataaagtccaaatggaagtagcatagatagggctgactttgacaaagtccaaattaacttggaatttcctgatactttacacattgggtgtgaaagaaaggagacgagatattaaataagtcatttggactgaggacattgtgcgacttcaactatcaaagatcaaataagatctttggagaggggattaagtgagtcacaatgcttatagtaacatagtaacatgagtgcagtaagttttcgaatttcaacgcgctttattttcatagtttagtttgtttgactgtcttttatataatcccccacatgcaatatgtttgtttgactgtcatttatataatccctcacatgcaatatgttagttaatgatctaagcattgctcgtgagatcaaaacgagttcatcgactcgattagtaagagaaaaagtcgttgtggatttgacttggtagaagtacatgtagcatactagcatttgttcgttgttgatttattttattacagtacaacgccttagcattaaagcatacaagatcacgtcacgtgagatggcgtaactaggggatgccagataaatataatgtctgaatgtcaggtcagcttcatttaattggttatgggcttttttctaaatcattcattcacgaggtgaaataagcccaatgggctgatcccacgtttgaaatagtttatactttctcaaattaaatcggtccgttaaagttaaaccaaatctagataatttttccctctgattttgaatttttctgacggtttggggatattagcgcagaattggagctaggttagtggattgttcattgtccggtgtcggagatgagagatcagtcgaggaatttcgaaatggtaatttcatggggagatgaattgatccatgttttggatgataggaaaggatttgacgtgttggtacaaactctcgagcaactgagagctattccattctcctgcgacgaagattttaaagagatacatgaatctctccaaggttgaatgccttcttaaattgggttgatgtgtgtttgattaagtggtgaatttaattttgttgcgcagatttgcagaagaaactcgatgtttgcaaggagaagacagatgaggcaaattcagagattgcggatgaagaagaaattgagcgtcttcagaaagagcttgatgaagagctagaactagagtgcaagctgaaggaggagcttagatacgtatttcactgaactgagcttaaacatctcgtccgttgattcaatgtcatgactaattttggtttttgtcgacacattcatagctgatgaactcaaagacctgaattctcaggaggcattatttgaagagcacagattagctataaagaggaacaagcgggaccagttgagaaccgagtaagattttgacgaatccgctttttagtcttttttgggcttcatatttccgtctttatgttgtttgaatgttcatatttacttgttagatttaacaagtagtgattttgcttatgctctattttttgttctttgcaggacaaagcttcctatgtatgcttctgtcactcgagttataccaaacattgatgattcattgaagacctcaggctgtatccttttgctttaaacaaatttctatctactttgtgaactttctaaatttaaatctcgttcaaccttgtcctaagggtttttaatccttaatacgacagatatggttggtcgagacaaaaggctaatggacaagttcgaattcgattcaaacaagagtacttctgtctacgagacatgtaatggtatttgggatattataaacaggcaatagacagccttaacaaccaaaccgcctttgtttatgattcgttagatgtaaaaagcttcatggcctctgtactatgaacaatatctgatgttatgagttccttttttgttcttgttgaatacctctctgtaggtatcagtgcttaactttttttttttttttatctactgtaacctttagcctccaaaatcttcagaaacatatctaaatattggatgttgaaaaagaatgcatcttatatttatctatttgtgcagattgttgcaaatccagtcttaacgtgtagaacgaattggagaggagcaaattctgactggtaagcagtttctgatttcccatacatttcagtgcattgaattatcttaggaattctaaggataattcctaaggatttttgattcaaatcttagtgattggaatagcaaacttggggactgttacttagcttctccactgaactattggacctgcttagtgtctccaccgaactgttgaggatcctgcacgcttctggtacttggttacttccataagcattgcatacatacatgacaaagttctggtagttctgttcaccaaagacatataaatgaaaagttttctttctcctttgatcttgaaagttattagcttaatttataggactaacctcttgaagtggtaggttattcacaaccacccatggtacaaatctatgtgctggataaagttcagaagtttcttcagcatacctctgttcaagctgcacattgtcacatagatgtcattttttcttgcttattatatgtttagctttcctgttgtggctgtataagttaactaatgttctctcctctgagcaggatttacctggtttccgtatccgttaatgtaacaatcaaccgctgctctgctcaatccaaccatttctaaacaatcagcccatttttcaagtttgttctccaagactagctgttccgtacagtagatgtatccaaaatgcttcatctgcaagtgacataggcagagcacatataattcacattaacagtcaaagcctctatatggtaatcttactgcataaatccaagaagattttggtagcttttaccgtttaagagacttaccacatcagggtatgcgtttattgcacaggcatgaattgcgttgagcgcacactcagcttctccgtgctgaaaacaaagcaacagtcaaatgctatgtcctaattctatgatgtacaatgcaagtgagacatagcaagaagagtccaagacctggcagagaatggttccatctggtctgatagcggcgttgccccatggaacgagctggagatcaatggatgagattaagccggtttcgaagatcttaggcaagcggttgacgatgaattctgcacagaaggggcatagagcttcgtagtataaacttagtgtaactttctggcttgaagacagagataagaggcagaagaagattgtgcaacttgtgatgcaaagcctctgatatgatgccattggtggaaacaagaagaagaggaagattgcagagaattgtttttgactcttgctttattcttgtgtctcattaaacaaggaaagtaagacataaaactgtttcttattactttcagtgattcgttgatgctttattattgtttaaaggcatcttgggcgttttggcgttgaaacaattgttgcggcgttgtttgatttaactgaaaacggcacgtagttagttttcggaatatcaaaacgacatgatgtttaatcgctgggttgggtcagtcacacttcgtcttccacatctaatccacctgagcttactgagtcggaacaacatcagccaataaagccctgaaccctaattttcttttggctttggctggagaacgactgtatgtgtgttcaacaatgtcgtcgatgaacttcaatccatttcaaaactggttcgagaaaccaccgaacccagtcccgtccatcaacttcgtctcgctcgctgattccttctttcccaagtcgcagtctccgaatttcgcttcgattggacttccaaaattctcaaagaagtccccaaaacccgaaacagcaggaaccgacgaaccaggaccgtacaagcaaatagcagagcagttcttatgggagtgtgagaacataccggattacaggcacactccagaagtggataagcttctcaacgaagatccagttttcgagaagaaggagaatccgagcacagaagagattgaagctgagcagaaatggtgggagagttttcgagcgagtcctgtggttcagtttatgactcgcgccgaggagattgccgacgatatgaacaagatggagctcgaggataacgacacgccttatcggaaagaagacaaggattactggagagccattcctcatgtcccgggctttgacgggaggcccatgcctaggaaggcgatcaaatcaaaggaagagagtgatgataagttttgggatttcatgaaacagtttctcttcggcctctggggtttccgtcaacgtccttacccgcctggtcgacccattgatgtggctcaggctattggttacaaacggctcgagaagcgctattatgactgtaagtgccttcgtttgcttaaccatagtgtgatatcttggtgaaatgattttgactctcccatgtcatgatgtttctgaatcgttaagggagcatattcaagtgtttctggatcgttaagacattaccgggttgcttcatattgatgttgtttctgtgtttgtgggatttgatccatattctgtgtttatgagttagtaggtggctatcatgattcagtgagaggctctggattccaagctcttgttgttcttaatgttgttaaattgtatagtcatagtttcttgtctatgcgcgagtttatatggttccacattttatcttgtttatgttctgcatgaaggtccaagcttgtgcctgttgttgaattgcaggaatatgatgaaagtggtatgcttttttgtgggttcctttgtgttggatcataaccttttgtttgttctcctatgatttaaaattgtagtcataatgaagactggtggttggtggtataaagaccgacttggccgttctagaggcccttgtgagattataacccttaagacggcttatggagctggaataattgacagagatactttcatttggggcgaggacatggatgaatgggcgcctattcacatggtttacggtttggaacctgcaattgcaacttgggaaggtctgtctatgggataatttgaaatctcggatgaatctgatcattgaagaattacaattttgcctcctatatatatgacttcattgttggttttattggctcgtttctttcttgttcagtgaggcttggtgcagcggcaacggctttcctacacaaactccagaagggaattccaccgtgggttccattaaagggacgagagccaaaaacatacaagcagcttcaaaaagaagctattgagagtaagaaacgcgacatggcagtgcttgaagcaaatggtggcgtttggcctggagtcagaactcccagccacgctctgtttctctgggccagtgggtctgagttaacaactgtactggaatctgatcacatgccgacaagttcatcccaaacaactacggtattaaactaaaggccctttatacaccattgactgtttagccgcaattggatttgattcttctctcgaaacatgtgcttttgattgtagactagagttggccaaagtaataccagggttaaggccatgggaagtgataagtatcgagcaagctatggatcagatcagctatggtggagagtggtaccgtgagccgcttggtacctacaccactggtcctccttatatcagagagtggaataggagtgtcatggtaagtttcctctcctttcttctgatttcacaaacaacaaacttttaaacactcactgtatctttgtgataaattgattcatcttttctcttccgtttcttgctttctgtttgcagaggctattccggattttctacaacctgagtgttcgagtaggccagaagctggagaggacagtcccgggttttgacactataatggacaaagttcagaaagattatgacaaaaggattgctcggaggatgaagcggagagaggaggagctgagagaagaggacctgaagcattattccggccgtaccgatgaagatgaggaggaggaagaggaggaggacgacgatagcaactccaaaaaagattgaagcaaagtcttcaccaggtggatgacaacaagcaaaacatcctgttgtttatgaattcttcgccagcaatgtcggtgtgtggttgatctggttatcgcatttaggtacacaccacatggttttgggcgtctcctgtaacatggtttgtttgttttctacctgttttaaaccaacgttcgacattgagagtttatcagaaaaagaggaactgtttcattaaatattctatgggcttacatgggcttatgaatttatctcgacagacattaaatattctataaatgggcctcagtttgtaaggcctaactatagcttttgcgtaacaacatacccgacccggtttgtagtgtaccgaaatgttaagtggcgatactcgattggtgcccttcgctacaaaattgggatttgtttttgtccattttcggtttcggttccctgagagtcccggaagctcagtggtcggagtgtcggcgttcaatttctcgatgactaataaccctcaaattgtggttagtttttctctccgtctctctcaatttcatcgtccttgtccaattttaagcacttgtggtgtcgatttccatatctgttctctgctagggttttagctggagtctgagctattttgaaacttgttgtttatggattccaaattggttgcgttatcttagaggatactatcttattagaatgcgtatttctctagattagatgcatggtgctataacattcgggattatttgacatttccttgcttttgatcagagcattactactgtgataagtgttcttgttagggtcatacaagtatccaatcttgattgttcccgtgcgagggacttcttcgtcattatacaaataagattctcaatctttacttaatgcttagtggtttgaagaaccatgatgaaaagataaatcactaagggagaatctgtacatgaaaagcttaatggtgttttcatacgtcatgaacttcttatggatactcattttcgtacatttgtcagctctttgtagaacagacaggtctttgtttggttagaaatgattttctactgttcaacatggaatcaaagtaagagcatctcttttgctttgatgtgacagtgatcttgttcttgtttgctgttcagttatatcccagtgaccagcttgtccttctcggtggaaagtgacatacgcttcatgcttcttttacatgttcttcataaacaggttcgttatgcttactctttcaagttggatcataaatattctatgtttaattagataggtctgagttttcactattttcttagttacgcattgtttggccgtaggtttatagctagttagaatatactaaaacaaaaacttcattgattaagcttacgaagttattacaaaaaccatcttgaacacaaagcttactactacaatcttattagtccataatgttcaatctaaagcttttacagaatcttcgggttcttctgttttaaccccaacattggtcatctgaaagtgaacttatagaggtccaagtctagttcagaagcatctggtcgaaatgccaaactcctgcaaagacagaacaaatgtaaataagcttttagaaataccattcaagtctgagaacactatctcaatatagggttttgattcgtaccgtggcctttgccgatcatccttagctgggtgatgtagtctgagatcttcttgattgcttcaatctagaaatagtccataatatattctgagtcagaacatgtacagattatacaagtcactagttgtaatccgaacaaaggcaaaagaacttttacctgctctcccagaaattcactctcaacgaaatcagctaactggggatcattgttctctgaggccacctgttttgttggccaaaagtacgtgttagttagtattaggaaaatgactataagtttaatctttgatgatcaaatggataagttagggaacttactttgtgaacgtttagaagcttctcattagtgagtttctctagagacagagccaactccattgctgaaaacaaagattagtaaactaataaatatctgtatctttaaaaaaaaagaaaagttgttattttaggattaagatagtgtatttgcttaaagttttaccatataaagcatctcctttttcagcatgttcgaattctgagataggtgagacgatagggtggagtttcactcttcctcctctttggttctgtatagagacaacaaaccaacaatatgaatattaactaagtgaatcacaagtctttatcaacttttctaaaacagaaaagaaggtaaaaatagaaaacctggtactccataaacttctcagcatgccctctctcttcctcacttgattccttgaaaaatctggtgattataaaaactcatgtttagtatggacatatatatctcattttgaagtatacgatcaagattattataaataagattaagattagagttagaaggtaataattacttggctagtcccttcatagcaacgttgtctctgtcaaagtatgcgtacattgaatggtacacataggagacgttgtattccacactgtaaatagaaagcaacctcctccgttagatctaatctttaaacattttcgtttctttaattagacagaaaagaaaagagaagcttacttgatttgctcattaatgactgcctcgctagcgtcggcaaacctctggcgagcgagagaggcatgagatgtgattggaatggccagatcggctttcttcacctcttcgaaaggctggaacacgactccggtcatcggcatgttgtttgtgtccaccgtagccgctgcaacgaccactgctctgccgccgccaactttcctggagaagccgagagaaaccgacggagaagcagagccgtgagggagtagtggcttaggagacagagcgggattagcggcggtgaaagacgagagtgcgtttgaggccatcgttggaaaatgtagaagaggatagtgttgagccgcctgagatttgttgtaagagatggtgatgatgataagaaagaggaaggaggaagggtttatataagagggaaaaggcgtgtggtcaccgttggattgagatccacgtggagggtggatatgaaagccagatgtaggggcgtgtggcggcctcgtgctacatccaatgggatagtgtgaacgtgaggatattcgatccacgttaacatctctccaaataaagtttgtctgtttctctgctttctcttttatcctcagaatctttttaccatttccggttcctactctcgcgttgccactttcttatttcctactcgctctctcctatttttcgaaatgtattttttagagttgtagatgataacaaatacaattgtttactataaaaaaaaaaaaagaaaagatgatagcgtttccaacataagttagacgtgtaaaatcctgtgacacatattgacataggaaatcggatagagataaaagtatttccatattgtttttataaaaaatcatcaagctactagaacataagattgagaatggtccaaaccctttaagactttccgtattatgtggcctaatattcataatttacaacaaagaaggaaaaattcgtggctctctaggatatttgatggagacggaaaactgatatacaattatacataggatagagtcgcgagtagctcaactccacgtaatttccagctaaagcgcgtgagaggttccaaatggttccttgtctttatcggagacaattacacgtcggagtaagtacattgtgggcctcattagtaatgtcacggcccaagttaaaaaatcatatcaaatggtttttctaaaaagttgtaatgttggcaaggacaaaaattaagcattaaataaagtgtagttaggcttggttttattttattggcttgatttgaatcgattcgtattactctggaatgcacaaagacaagggtaggctataaaagtgttaaagagcttaataatattttcgactgtaattacaaatttagctgaggttcgtctaatagacaagtaaaatcatgggaggaatggcaaaaaaaaaggattgattgtagtctttaattttactctgttttgtgccatgtggttcttcagttcccaagttgtgttgcacctatttaatctgattttcattgaaggcccaatagatagatagtcagtcccaaggaggagtgataggcaagtacttttttttgtaatttgtacagtataatgctgcctgcttgcttcaataaatatattggtgtttatgtatttgccacatgtcataagttaattggctgcaggaatagtgcacaaataacgaatccaacggtgcgagagtggtgggttcccaaaattctttcccggaagaaaaagaaagaaagtcgtccttcgttttctcaaaatcttctctatcctttctcgagagaatatggatcagatcttcaacaaggttggatcctactggttaggccaaaaggctaacaagcagtttgactccgtcggcaacgatctcaacgtacgtctttttttgacccatcctatagaatctgattcatctgttttcctaatcgattttgatctattgacgtggttccgatataatcaaccacctttatcgtaattttggtatcatgcagttgtacgaatgttttgagttcattgttaggtaaatcacgtcacataaggaagaacatctaattaccaaaaccatgatatcttaagaaatgattcaaatatatgatcctataatgtcttctcttcttgctcatgtggttagattattttgtttgaaactgtgatcttttctaacatataaaacaatgtttttgtttatgccagtcggtgtcaacgagcattgaaggaggaacaaaatggttggtcaacaaaatcaaaggtttgcttttttttattcttcttctgactgcatctttcaattttttgtttttttgaaattccccatttgtcatcatgttgacagggaaaatgcagaagccgttgcctgagttactaaaagaatatgatttgccgattggaatcttcccgggagatgctacaaactacgagttcgatgaagagacaaagaaactaaccgttttgatcccatcgatatgcgaagttggatacaaggattcatcagtgttgaagttcacaacaacagtaacaggacatcttgagaaaggaaagctaacagatgtggaaggaatcaagacaaaagtaatgatatgggtaaaagtgacaagcatatctacagatgcatcaaaggtctatttcactgcaggaatgaagaagagcagaagcagagatgcttatgaggttcaaagaaatggtctccgagtcgataaattctaacacctgtctgtgttctgtctggttccaaagtttcaagcttttccatttacgttttggttttgatttaaagcctcctactgtgagtatacatcaacttatttataaatctgatcataacttcaatatggccggagcaattctactttgttcttttttttttccaattgtaaagaactactattcgtgtgctcaatgatttggtcttacaattttttacttgggttaatttatgttctctcatatattcaaaatgaatttgacactcacaccaaaaaaagtagaagcatgagatgataatcattttgatgtacatttaaagaggtaactaaaggtgtttaaaaaagtttttgtacataagttaaaagaattgattatgataagcctaaaatatggaacattattactctacttttggcttaacagcatttataatagtcagatttgagaataaatcacactcgcaattgaagcgtgtttgatctcacatgcccaaaagaatccatccatttttctttgcaaaaaactgaattaaaaagaagaaaaaaggagaagtgtgaaattttttaaaagaaagaaacaaaaggatttattaaaaaaaaaaaaaaagagatgaagacagctcgagggatgcaatagagccaagaggaggagaaagatgggatctggtaaacaaaacacgtcaaagtcaaattacaaatttatattttataaaacagataacaacaacaaattaaacttttattaatctctctctgcctctactcactggatcatcatagctccaaacttgtaccagtcgcatcaaagcaagttttggtgaagaagaagagacgaggtcttcctcttactgtggtggtgacattttctctaaaaagaaagtctccgatatgtcgcagagatggagtagaaagaagagtagacttccattagcgggtctcctctttattctcgttgtcacctttatgattctcttcaacgagcgtagcattcagcagatccatcaccacgccgcgagtcacactcaaaatctccgagaaccttccacgttcgatttcgtcaagcctaatgttcctcggattaactacttgggagctcatggtactgttctgatttgattttttttttccgattttgaagtgattcgtgctactttctctgctgaaagcatcacgaacttactaattggaggattctgttttgaaaaaaatgcagaggttttggatagattcagcaaatgcaactcgacgaaagagtacagtgggaagaaaatcggatgggttgacccgtttgaagaccacccgggtcaagtaacaaaggaggagcagaaatgtgatgtcttttctgggaaatgggtctttgataattcatcatcataccctttacacaaggaatctcagtgtccttacatgtccgaccagttggcttgtcagaagcatggtaggaaggatttggagtatcagcattggagatggcaacctcatgcctgcaacttgaagaggtaaaaaaacttatgctgcttgtttcatttttccaagtttttctgtaagagttatgtgtgttgtggataactgatttgatcaaatggagaacatatggatgaatagtttgttatgactttgggagctactattgtttgcaaagaacggtagaaactgatgatttaggtgtttactgtggttatcattttatctggtagatggaatgcgatagaaatgtgggagaagctgagaggaaagagattgatgtttgttggagactcgttaaacagaggccaatggatttcaatggtttgtctcttacagtctgtcattccacgtgacaagcagtctatgtctcctaacgctcacctcaccattttcagggctgaggtaataaatacactctgagtttaacaacttttatgccttgagtttgactctttgttgtggttttggtgcaattggttactttggtgtgtatgtacccgcaggactacaatgccacagtggagtttctctgggcaccgttgctcgtggagtcgaattctgatgaccctgttaatcacagattgagcgagcggattatccgacccgattctgttcttaaacatgcatcaaagtggcaacatgctgatattctaatcttcaacacctacttatggtggagacaagactctgtcaagctccggtaattatatatagacatcattttattcatcttcaaaaccaaaaattaacaattggtactcattgcatattcgaactaaagatggagcagtgaagaaaaagggtcatgcgaggaggtgaagagcgccgagggaatggagatggcaatggatagttggggtgattgggttgctaacaatgtcgatccaaacaaaaagcgagttttcttcgttacaatgtctcctacacatcaatggtaacaaaaatacttatcccctgttctccatcaatatgattgattctactctctttattattttcgcattaaaaccgagctgttgtaactggtcaggagccgagaatggaacccgggaagcgaaggaaactgctacggggagaagaaaccaatagaggaagagagttattggggaagtgggtcggacattccgacaatgaggatggtgaagagagttttggagagattgggaccaaaggtctcagttataaacatcactcagttgtctgagtatcgaaaagatggtcatccatcggtgtaccggaaattctgggaacctctaaatgaagaccggttgaaaaacccggcatcgtattctgactgtactcattggtgtgtacctggagttcctgatgtctggaatcaattgcttttccattttttgtgaaaatgaaatgaatataaccttaccttgatggccgaatatcacccataaattatataacggggtgattttagctagctataaggatccaaatttgttacatcccttgcctatagtcaggcgtcatgagcttaacttagcaaaatgtaaagattttttattttgtacgaaattgatgtagcaaaatgggctttaatagatacaatcagcagagggctagatttataaacaaaaacttaagagaaatggtgttgtgaaaaaaaaaaaaaaaagagaagaggtggtgtatgatttatcttcagcatgaaggtgatttacaagcaccgattataaataggactctttgccgaagttcatggatgacctgaaaattgagcaaaccaagaaggcttaatacaatagaacaatctttttgaaccgaatacttatagaaagaggaagtcgacgagaacgaacggatttggaagaatagagcttagcccatgtttggatatgggcactgcgggttttaaggtgagaagagtaggcagcttctgcgtttatgaagtagactgagttctctgttgtctcagcaacccacatttcgtttgtcgcatcctttgctcttttaattagattgcaaaatccgacctgccaaaaattaagcccacaaagcatatatttttcaaacaataatttctcggtgcatattctctcagtgtaaaactagacaaatattagaatttgtacataccacggatccaaccaaattatggctgatgtgggaaacagagctatcatccatgaatggggtgctgaagcttatagcaagaagactgtttgagatttcccctgaatgttgtgtggatccatctgtcacaaacacccactgcttcttttgtagaacatctgtgtatgcatctccaacatatacaacgtacgcagcgatatcaaattcactgaaggacataattagagatgatagagtatagattagcaaagtgcggtaaatagtgttttataaaaagcttggactactgagattaaccttgacagaggaatttcaccaagatttgacaaagagattggtttacgagggttgaaaaaaggcctgaaaacatcatcagggaaattgaacaaattaatgagatagattccagtgtctactaaagaaaaccacttactgaaaattttcagaatcttttggagacaaaggctgccatcttgagcttgaccctctggcatgtaagtaaagtgtttctgaatctgagttcattggtactagccctttcattatgtatattttcccctccgtcagctcggttctctgtcacagtagtagacaatgataactgttttaagaatctacaagaaaaaagttgaacaagctaatcgatgatgctcttaatgcaacagtacagtgatggtaacgattttttgatatgcatttcagtccattcgaggtccacagcaactctgacgagcttatatttggaactccccgttccatataagctcatatggataaggttcgtgtaaacttataagccattagaaaaatgccttcttttaaattgtgcatgaaacattcagatttaggcatttgaatgtacctgtctctccgtgggatcccagattgttacaatgccttcttttggattgtgctctccttcattacttaagctcgtcaggccaacaagcctaatcctcatgaatggggtgacgttcctttcacctaaaccagcgtcttccagagcttttgccactgatttttccatctgcatttgcttggctgcctgaggttcagattgaagcagttaattactgtaatcaatatatcaagaaaagggaattactattctacctcaaattttgctttatatgtagtgaaagatgtcaactgctctaggctcatttcagccataagaagttcaggttcagcagccgtctctaacagcttaaagaccttggctccttcttcgctgtcagtatcgttttggctgtgaacaccattaattcctctctggtactcacacataataccctcaacaagagctgagcgcctacggaaaatagaaaaagaaagaaagaaaagtacgaatgagaataaaccatgaggaactgcaatctttggctcttctgttggcaaaaccatccatattcagaaggccagaagcttttctaataaatacaaagattctttgtctgtcccaaaaactacttagaaccctaatattggtgtatgtaacaaatgtctctagctttgatgagttaatctgacacttcttagaaagtgatgtgctaaattgatcacataaatgttactaaaaattgctactctacagttataaggaaacttgcctctgattatgcagctgtataattctactttctattctctctgatcgaactattgacttcttttcacctaacctgtatacatcaagaaaatataatgctttgcgagaagtataaggaagaccaaagtgcattaacaggcacacatttatattgacctttccttgtataggatggggtatattcgtgtgatgccagctagcgttttaggcactggacccccattgcacttgatacagttgaaagccagagggacaccaatttctttaccttgaggaagagattaagaacgatcaatagaaagataataatatgaaagcaataagaactcagatgatgtagtgaggtccacagcataaagctacttacagaagcctagtcggtccgcccagtgagctctgtatgtcccattaatattcaacaacaaacagattgtacttgaaatcactgcctgaaagtttggttgaacgaaactctaagaacaaaccaacctgagaagatatcagaaaatcttataaaatgcaaagtctaggaaacctcaagtggtgatgttggggtagcccagccagaaagtcctgccccgaggatcttcagataagagataagaacgtaagcatgctgcaagtcagtgatctaaccaaaatctgtgttgcaaaacaaagtatatcttgcatgaatataacttactcgaagcttctgccccacaaacaatttgccagcattcagctgcttggttagcacgacatccagagcagcattcatcgagtacctgtgatttaaaaaaaaatcctatggaaatgagacaagaaaacaggtaacagaacagcagtagcaatttcataccacccatcagtgagttcgactttcacattgctgcaattatcagaacaatgtgcttcctgagaaccattatcggtccttggattaatagctgatatgcagaggaccatcattgaagaagctggagcatcaccactcagaatcctcttgattgcagagcaatgaccatgattgacctctctctcatatctattaagaagattaaccatgttagactttgcatgagtttaagtaacgagttgtgttgtgagactgggaaacctgtattttagttcctcaagaacattggtgattgttagaaagtttcctctgcatttggctgggtagtatatgtcgtagcatgcaagtttccagactatccacctgtagtgattagtaacccacctagtgcatatgtagtgatagataagttaatagatatagacatcaaactgtctatctaatagagtgacaatcacatgcaagcttcaaacgaacagtcacacactttttctgatataataaacatataacacggttaacatttcaagggacagagaaagtactttctggatgcatgttgtaaggaagcacccgactcagccaacatttgaagaaaagtttcagctccaaccttgtttgaagaagactcatcacagaatacatatttatctgcattacttgatttgattcttctgacatggtctggcacataatccatctaaaaccacctcgtaaatgtgtttgagtgaatgaagaaaaaatttatgtaacgcaggaacaggtgaaagggacaaaaagattttaccctggtcgtagctgtcggatgcattccaaaaaactccttgatatatactcttggagacttttctggatatcttgtagaaagtacctttttggaagtaagtgtatcacacgatacaacagacaaacctgataatagacaggacaccaaaattataaatctgagaaccaaccaattagattaacaaaaaattaaaattaaaattaatcgtatatattaccacttgaagcttgctgagcatttttctttaaaggagttttaaaggatgaaatccttggccttttgaaaggagaaacggagactgtctttcccagccttttcttttgggtactgtcttgtttattgtttgcataagctgtatctctgcgatttgttatatcaacaagtggctgatcagcaggccttccaagttgcctagctcttggaatgaaaccgtttcccttggaattattcactgccatatctgatgctaaaggcctgttatttgatagtccatgtgtagcaggtttactgatattcagagcacaattggtctcatcaacagccgtatcaaatttcttgatcaaattaccccctgaagctaggttctccaagttaactgatctaaattgctttgaagatgaatgaagaggagatacaaaactatttgacgtatgtttgttgcttgtcttttcttcatgagcaatataacctgtgttgacacttccattgtttatagcaatatcacttagcctttcatctttctgtggtgtaaaaaattgatcacctccagctacatcatcaaagaaagaccctaactcagggtcaccaagaaggtttctggcacgtttcaacgcctcagctgacactgacaatgattttccaccagcagtctgaaactttgttggaggcacctttaacgatggatttaagatttcagatctcttcccagatacataattctcatattgtcctggagttcctgaatgatgcttaaccactgtagcatcaaactcctcatgagtttttaaaccggaccacccatgttgctggagggaagaagacgactggttcacatggttaaatccattcaaatcatcttcttctagtcctaacaatgccttggctcttgctaaaccggcagaagatacattaacctttttgttggaagctgtctgaaaaagactgttgggaacaccaaacccactctccctgggaagaacgttgtctacacaatcaaaaagaatcttattaacaaataaactatgaaaaaatgtcacttctaatatttattctctaaacgaagtaagatgtgtgttgattagttcttcactattcatcgttttatctgataacaaccaaactcaagaaacctggaagttgaacggagtagcagcacaaacaacaagttcatatgtaaatgcgcacacagctggatataagacttaaaaaaagaggagataagaacacacctgagtcaattatcatatcacttcctagaatagacaaaggtttggcaattgaagactctttcaaagggacagttttccccaaggccgtcctgaacattggcatagtttcagctgtatccacttgtctcgtttggggaattgagcaatttgtgttctgcaaatctaaaagtgtagccaagaacatggaacattcaaaagattttcaggaacacatattcaccaacattaagtaacaattcaagcgaattcagaaacaaatgactagtcaagggaattcaatactgtcacataaaatacctgaataagcaacattctctgctaaaatggatttggctttagcaatcgaagactctttaagaactacagacttccccagcccagtcctgaacattgggatttccccaggcatcgattcttcccgttctataagcttcgagcatccttgaagcatcaaataataattcaatctcctttgagtcacatgacaaacacgattcgacaaagaaaaggaagatacgaagaatcaccttggagcaagagatcggccatggaaggtagaggagctgtcgattcgagcgccttggttggcgtagaatccgagacggactgaagaatccggccagcgacttcccaccggaaaccatcgccgctggaatcggaaaataaatgccacgtcgacatttattcagttctagggtttccaagttttccgattcgtcgttatatgattcagccggagaactaaacctcgcgattcagaattgcctaccacgccaagagggaggagtcgggagtgcggaatttttatttttattgttttattttctttccccaaaccaaaatcatcaccaaaaatccaaaaagttaaaagttctgacaaaggcgggaaagttgaaaaagatttgggccgaaattatgagacgcgtggttttattttaactttgggcttggtttttacggacatagcgttccaagacaagtgtgatattgccacggccttttattgcggtaactaacggcacgaatgctaacccgaaatcgttccaaacaataattgcttacgtggacattttaaaacatctgttcaatgtgattggtgactgacttcaatgaaaattacattgcaacaatggtcaagtatcacagaaaattacattgcaacaatctccaccttcaaatctctaaacacgccagattctgagaactataatttacacgggggaagccgctgaggaggcagagggtgctacagaggggatcgcgggaacaccgatgaatgagaggaatccggaggcggcatgatcttgttcgtcgaggaagagatcatcgggagctctaaaggcgccatggacacagattgttgctattccgatcatgagagcggatatcaatacagatccgacgcttgtgaagaagatcactgcgatcgtggagaggattaggccaccgagagtttcgtattcggagaaagatcggccgaagaggataagaggacgatctgatggacggaagaggtagaggaagagccaggaagcggcgagacataggaggaggatgagagagaatgggtgggcgagaagagagaaaccaaggatcagagcgacaatgcaaacgtaattcaccctgaaataagaggaatttttccggaatcgcgtcccggcctcggagagagagtcaggctttgtgaaagcggatcgatcgaggagctctgaccacggacggctacgagatagaccaccacagaccgtctcggtcacaccgttgacaaatgcacggacgactggaggttgcgattccaccacagcggttacaatcggaggctgattggtggtgtctgttgcggtggtggaaattggaagaacagggggatttgttgacaccattcgattttgttcttttgggattttgagattggaaaattttaggagacgaatgatttagaggttgctgaagttgcggtagtgttatgtatatataggatcacaattacgcgtctttcaactttgattatacaccttgcttcatctgatagctaatctatattcatttgctaaaataaaaataaaaataacctcctgatattataactcaggttatttttttgcttaacgtagtttatacaataattcttgattacttaggcaaagtgcatttgaccattaatgttccagtcacaggaagtttccctaatagaaaatatttttaacacaatgttgatctgtcatatggagtagtagacttgacaatgtcaaatccttttttctttgataacattcatcttcgaattctaaacataattatatctaacgagtagacaaagactaaataaccattgtttaccctgatagtaagttgtagcatcatatatagcataaatgttatttcttaatgcaactccatcaaaccttagatatgtttacaatacgaagtagttcaaagttacttgatcgatgagagtagatcatacatttcaagacaatcacactaatcacctaccacggaattaaagagtcgccccgttccaaccaaagaaggatccctgcaagaagaaccacacgagaaaagaaatgtataattgatatatcaggtggttataggcataaacactccagatgatggatgaccctctaagccagttagacaacggatttagagaagttgaacgaatctcctaaataactcaacagtgtgggtgtaaagattgaattcgagtagtggaacggtttatgcatttgatttaattgtttataatgcctagtttatgagtaaaagttataggtccgtcttatgatgatgaacttacacacataagatgtatttgttccctattcatgacctagtagtgctggtgtaaagcgtgtaaacattgtgcatattcttgactttgatggtcctagagagacaacgaacaatgaaaatgagacatggacgcatatcgggcatatgaaatcattaacacatttgcatatgttatgtcactacatcaaaaaagttatcagagagagggaattgcttgccttggtgtcataaaacttgaggaagaatcgagacttgggcaccgatagcttagtctcaagaatggcggaaacagcagcgcttagcttcttgttcacatccgcattaaggccaccgatagaaactaattcaccataagctgcaggatcctcggtcccgccaaatgacataggcactgagcctttcaagacaatcatcacatactgcaaattaccacaatgaacaatgcaatcagataatgatctaagaaacaacattacaggacaaaaatatttaaacatcactaacataaacaagcaatcgtcaaagcagaccaatattgtttttgaaaacaaacttcagcaatgagaaattcaagggccaggaatggcctagaaatcgtggtaaaataaaaaagaagaaccccaacgaagattgtacaaataagtcaagagaagactccggaaatgtgaaccactagaatagaacggagcaacgagataaaattgcttagggtttctatatcatgcatgtgaagaaaacaacactcgaatcgctgttattcaataaggagaagaaaatgattaagagataaagacgcacacaaggcaaatctcaggagaaaacgaagaatcgaaacaaaattcgaacagaacgaaacgaactagaggttaaatcgagagagaaaaagggattacgttctcaggcttgccgatgattttcgcgacggtggaggaagcttccgagagaatggaagatgtatcgacgccgtcaaggttaacgttggtggagaggttgaggcacggcattttcttcttcttcttcgtctctatcactcgacgccaattttttttagtcaagcggataaagagagtaagaccacccaggaattttccccttttatccttaaaccttttttattcgcttaggcccaagcccatcgtttttacgtttgcattctcgtttcgaagattctttcaaacgctctgatgaagtgattttggattattttgtttagaaatgggccttaatctagttataaaagcccgctcaaatttgagtgcccaggaacgtttataaaatagatctctcgacctagacccgaacgcacctaattggttagatgtttttttgtacttttttatagcaaatcgatatttccattttgcttctacttcatagagggaaactctttccccaaaatcaaaactcctaaaggcttatctctgtctctcatgacttggccaccaaaaaaacaacagcttcaaagtttccccatttacaaagccaccgcagatagaaagcaacgcctaccgatcgaggaagaaggcacgtttttccacccttcaccttccttaaaacactcaacctgcaaacacacacatgatcaaagattaaaccgtgtctgcttatgtaaattgttttaatttcatttcaagttcagaactgatcctacagtgtctaatatgtcatcctcttcccctttgtatcctccgatcacatatattgagtctttaaccactgccactgctgaatatcctcttaaatccttcattggttctcccgtcatccatgtccctgtccttggctcatatatctcaacactcgataccattgtctcaccatcaaacccaccaatcgcatatctgcaatagtgcatatgaatacaaccttaaaactcttacccaaaatttgtctgttagttactctcaaagaagaagaaaaatggggagaagaaacttacagtttttcattcagaacaacaagagaatggcagcctcttctcgacttcatcgatgcaatattcatccaggagtgctctctaggatcaaacctttcagctgtgctgttaaaagtaagtttccaataaattgttcttgttagcttcacatgtgtcaagattaggggaaaaaatagaacacaaggcttaaatgttcttacttcaggtactctttaccatcataaccaccgacagcataaattgaacttttatgctccacggacgcaactgcaaatctctgagatcaaagagcagtgacaactcagagaataaagccgaggagaaggtcatggtatcatcttgctaaggcttataaccagtaggtgagtggaagcataaactacatttctattgttaacctgacactccttacttgaaattataacttagcgaaatagagtagttttaacaatggattctctttgggaatttatgtttttagctgtgagcttctgtcaaaaatttcccagtggggatctaattgacaacttttcagatttttggctttcaccatatgtcatgcgaatagagaagaacgtttacctcctgccccattgaccttgttctgatccatctccctatatctggatcaagcatctcaacatctgaaaaagataccatcccattcccacctccgattgcaaatatttttccatccaaagtggctccacctaaacttccttttcgctcgtttaagggggggcacaagctccactggccatcagtctggttaaaggattcagcttcacagaaaaaagaagaggcaaaacagaaatcaaagatcaggcttaaataattatggttagagagaaaaagaagtgtgaagtggtagacattaacttaaaatatgcacagccgaagtgaagtgcactaaattaatacacctcacttcacaatttgctaaaaatactagagccatttggtttagtaatataatgaaagtcacagtagtatgcttttgccacccatattccgttttctagttcttttagttgtctgttaagaatatctggaaggtttataggtttatatatgtattgtatacaggctctaatgcactaaatagttaactcattttaagaacaagagaaaaagagaggccgtacctgagttggtccagccacggccaccgtcatcacctccaaagacgtaaattttaccatccaactttgccactgatgcatttgaacggatacagctcattgaactatgagcctttacaacattcctggatggaaaatatgactgcactgatgacaaccatgtttcagagtctttatcaaatccccctaaaagaagaattgcctcagttggatctaagctggtatcatctggtgaatggatctccaaatcactgccaccagctttggtgattaaaggacctgatatggactccagcatgttgcaacgctctgtcaattgataaatttccttgtgtgctttgtcctgaaataccaaatatcgaaaagtaaaagtgttatggtttctccaccactatattttgagcttattggttccaaaaacaagggaaaatgataccgagatgaacccctagctgaaaatgatagaggatcattatcactgatataatgaatatctgtgtgggtgtggtcatattacacatgcaaacagaattccagcaggaagaatgaaaatcaaaatagcaataaacaaaatcttaccagcttctcttccaagtaacatatcttggttgaattttccagcccgcatgccctgagttccttcacctcatgcatcaactgcaaaatatttagccaatatgatcccattgattttgatacacccaagagacatgataatcttccgagaaggaattacaagtctcaattaactatagatcatagtctttggaagagaagcaagctgacatggaacagtttcttcttaactattcctgcaatattatagctaatacacagagttctacacagttaataattgacagctcagatgggtataagtagaaggggggaacagacgtgaggttgcctaaaacttcgatattttggctgagaaaattgggggttctgtttgtcgttcgttctgagaagaaataaaggggaaagtgttgactctaacagatttacacatagacttgtataggaagtaacagttaaagtattagaaatggagacctagtttgaataaataccaaccatgtgtagataccaacgtacctggcttattgtatgtggaagaggagaggatacaagacaactgccatctattttcccctctgaacatgtttcctcttcaagtgtatctctgtcttccaagttcttgcaggtgggaatgttggcttgttcaacagtttcagttagactgttgtctccatgctcatcatgactaaagacgagatccttcagtttctcaagaacatgatccttatctatttgtttggggttctgtacgtctggatggttctcagagaaaccaggatgagaagcagcagcagaggagtcagattctccgccagaactgagtgacacttccaagctacccactggttcattctcagaaggcttaacctcatcactgttctctttcttttcacttgatgaaatcaagcgaaagatctgtcttgtgtttggtgtattcatgggtggtttaggtttcacagcaaaagatgttagcagacatgtcaacttccttgtttggaaatgatcaagctcaaaccaaaaatggtgagaactgtagtaattatctgcaattgcaggtttgaatttttcctcggaaagtggttcacactgtaacctaacactgattggaacctgcgaaaccgtaaaagaccactgcttatttcatgaaatttatactgcttatggaaaaggttggcaagggataatgcctcctgaaaaccatatgtaatccaatgaactcatagaaacacatattcatgaaagtgatcaaatgtcactctggtacctgtgcaggatatgaggttctctcagaaccatcagaggtccagccataagggtcaaaattgagctgaccacaaccagcagcctcaaaaatgccatgaagtgtacgatcagaatagttgaaaagaaacaatggcaaaccaatatcaatcttctgcacgtatggatagtggttagagggtaaacctgtcaaaaccatcagcggattcaagaagcatatacatacaaacattgcgaaatagagtttagaaacaaaaaaatgcaacagcatacgacaatgagcaagcaaagaatcaaagtagacagcaaacaaacagctacattcagcagaagcaaaaacaagcatgggaaaagaataagctattcaagaagactcaccaaacaactgtttcgacatacattctttgatggtattcttagtgcagccaaagacaacaccacctagttgacttttcgtcaggtttctgaaggaaaactttcccctcctttgagccatcctgacattgattgggtaaaaggaaagaatatcaaaggatttacagtgtaacaacaaatccagtccttccaatgattgaaacgggtcttattgctcaagcatgtaatcaagacagacacagtctccagatttttcgtacggttttactaactagacaacagaaggatgaaaaccttcaaacacatggtgtgcattattaagacactcaagaggtagcttatgaggcagccattgatgtgaaattacaaaatcacgaagaaattcacatgatgaaatacgaaacacaaatgtatacaattttcagtcagctaacgaacaaggccatataacttaacacacaaaaacccaaccaggagcgaaatcaacaaacagataattctgaaacaaaagcgcagagcagagtttccaaatcagtaaacaacgaaattccaaccttacatctcaactcctcgtgaaatcgaaacacgataagaaccatgcgatgacaaaaccctaggaaaataagcaaaaggcaacgactgaaacctaaatgctcacttaaactggaatcggagcttgatcaacagagaagttgagtgagagcggtgaaaaatcgaagaagacgaggtctcagagagaaagagagagagagggagaagaagcttaggccatcatgactgatggcaatgcaaaagacgatgacaaagccggaggagcgacggaaactgagcgacggaatttttagagccttttaagctgcaaattttaaatataccttcttcttcttcttttttttcaatttcttctgctttctaatatacaactttctcctttttactttttctacggtaaattttgaaagaaattagacattagtcaaactgtttacaagtatttccttctgcggaaaaatagacatcgatgcaaaatatttttaaaaaatatatatctattaatttatcatttttaagaaaaaattatcctttgcatataaaatgcgcgtaacaatgaatttcctcgatgaatttgaagaaaaacaataattggtcatattaaaagaaaaagaagaagtaaatataatattatctataaaaaatcatgtgttgtcaaatcatgcaatgaaaacatgaatacaataacacaattcaatataccttttagcatataggcatggtcataaactaattaataagaatattgtttcttttgttgataaaatattgtttgtctccgaagaaatatatgtagggagatattaagttattatgattgtttctaatgaagtgagacattaagacttattactaatagtagctaacttaaatggaaaaatgtaaaccgtgaaaactataatacttctatcaaacaaatgaaaaaggagacacatcttcctcttttatacttttaccctttttagattttattagatgtggacatgcaatgttgcataagccaaacagtaaaagttgtactaaacattatataaatgctcaactaaacaaagagaaacagacattataataatcgctagttttgtacttaagtgtggttgcgtgatagaaatatttgttttatagccatggtacgtattacctaagtacgtaggatcgtaaatgggttgagagaatgaatgttcttgatcccattttcttatgacagtattttgatttgggtgatttgcagatataacattttttcactaaataattaactaactaacaccataaatttgtaaatgtaataaataaccttcaaggggtgtgaaaagacatcactgtcctggtgttacgtttgtcagcgaggaaggaaaatgtggtgacgtggctttattattagtgttgaggtgagaaaagaaatcaggtggtatgagagaagttcctttttctctttcttttttctttaccccttcccaattgtaattcatattatctaatctttaaaaaattaattcaagttcatgatatatcaattaaaaagttgtatagttttctacatatatcatgacttaaattttttaaaacagacacaaaataatttagatgtgaatagtgttgtcaatgaataacataacgttctgtatagatacacaatatttttttatggaaagatattaaaccctaagggataatatatagggaacccaagggtttaaatctaaaccaataattaaatcacttaacatccttaatcaaaacaaataattcattttaaaacgtatataaaacaaggtatacgtaaatagtatatttacaaatagaatagtatctctcaacttgcaacaacaaaactcaatttcataaccaagacaccaagcgcaacaacgaaagtcgattccctgaatccaaattgtgttcctctctctgtaattcgaaacccccaaatcaaatctcacccaaaagtaattaagagactctgatttgaaaacaaaaacaagtaacgatgtaggtgtgaggactttactggggagaaagagagggggagggaaaaagaaagagagagaaagagagagggggagagagagaaagagagaagggagagagaacggaagagagaggtacacataaagagagatgagagaaatagatagaggggtaaacttggaattaatatacaaaatatagaggatatcatttttttctttttttaatgttagtttcttaattataaactttttgttggttagttttgccaattccccttttgattttatgaaaatagggttttctcaataattaagttggtatcatgagtaaaaaatcatttcaagcataaacaatcttaaactcttaaattgtttacgactaaagctttttttgttttcgtaaacacatcagatttatcacaagatgcaaccaaaagatttgccaaatcctcaaaaaaaaaaatcgatcaaagcgtttgcgttttttcttttcttttattttttttaatgaaaaataatgaagaaaacaatttcatgcaataattacgttggaagcctttttgggctcgaaattcgaatgctttatctatgatgggattgcaagaattttttattaaaaaaaaaaagttatggcgtttcggttaaactcagaaactctaatcgagttagaaaactcacgatcgagttttggagctttggttaggattgaactacaccagttattgcaaactccgaaaagaaatcaaggtccgcataaccacgaaccaaacaagaccggaattaaatccccaaaagattaaatgttccaatttggaccggtccacagaaacacaaaaccaggaccggaccaagcaaataacaaaagataaaattggtcaacgaaaagtcagctataatctctgctctccacaacaaattaacaatgaagctagaggtgtgtgggagaatgggttggcacacacgggtcacagtttcacagacacgcggctcctcgatggttgtcttccgccgacagccgccgcgtgtatgtccttcccatacggaatctgccacgttgcgtttgtataatctgcctgactagggctttagcagtgtataagagacgagacgagacgcgattcaccggagagtcaaagaggcaaggaggagaaagccaatggcacatgccacgtttacgtcggaagggcagaatatggagtcgtttcgactcttgagtggccacaaaatcccagccgttggactcggcacgtggcgatctgggtctcaagccgcccacgccgttgtcactgcaatcgtcgaggtgattcgtctttacaagaatcagtatttctttttcctgattccttcaaaccatagttttggttcattttttggctcaattttgttttcagctttcattaacacagagctttacttgttattgaccagtaattactctcccattgaatttgcagggtggctataggcacatagatacagcttgggagtatggtgatcagagagaggtttctttctctatctctctttgttacttactactactactacttgttttgtctgaaagttttgagtttagaggtaaacaagtcttactcttttttaaggtcggtcaaggaataaagagggcgatgcacgctggccttgaaaggagggacctctttgtgacctcgaagctttggtacacattaattttaagaaaaatgattaatttatcatcgccactgatgaatgttttggttggtacatgtttaaacaaaaggtgcactgagttatctcctgagagagtgcgtcctgctctgcaaaacacccttaaagagcttcaattagagtaccttgatctctacttggtaagttgtgaatcaagttttagtctttcttgttactcttcttcctctctttacaattcaattttctgcagattcactggcctatccggctaagagaaggagccagtaagccaccaaaggcaggggacgttcttgactttgacatggaaggagtttggagagaaatggagaatctttccaaggacagtctcgtcaggaatatcggtgtctgtaactttacagtcactaagctcaataagctgctaggatttgctgaactgatccctgccgtttgccaggtataggttcttcatttcacatgtgaaagttcattgaaaaacttttgtagtgagtttgttagcttggccctcagatggaaatgcatcctggttggagaaacgataggatactcgaattctgcaagaagaatgagatccatgttactgtgagtactaatatgattcttgatccattgtatctggaaaaatattcactgtttcaattggaactttgaaggcctattctccattgggatctcaagaaggcgggagagatctgatacacgatcagacggtggataggatagcgaagaagctgaataagacaccgggacagattctagtgaaatggggtttgcagagaggaacaagtgtcatccctaagtcattgaatccagagaggatcaaagagaacatcaaagtgtttgattgggtgatccctgaacaagacttccaagctctcaacagcatcactgaccaggtaaacttaccaaactaccaaccagaatctctagatgatcttttacaacgagagtaaattgcttgctatgatgaaatcgcggttactgctttaatgggacagtcattttattttagttaggaatcaccgttatttctgttagtgagaaacagagcacttgttagtcttctctgcttcctgagttcttgttatagtagtaactagtgaggaacaggacagagtaaggaaacagagcacttctttatcttctgagtttgttagagaaaactaacaatattttcagcttattcatttgatccaaatgttcacactttgggtcttatttggccctgatgcagaaacgagtgatagacggtgaggatcttttcgtcaacaagaccgaaggtccattccgtagtgtggctgatctatgggaccatgaagactaaaccgaacccgagaatcaaacataactatgtaaggaatgtgtttgttgtaacttgtaagatatcaaatgtacattttctgaaaataaaagaaagcagtctcccgtataacctaaaaactgtatacaaatgctctatgccattaaacctcctcgacgacagaggagagttgttgttgtacggccaaaaccgatgcagaaagcttgagatccctggaaacgagcagatctccgatctctccaagctcctcgatctcactccataccgataatccttgaagcacttcgaaacttttttcgtgtctgattccaaccatgatcagatcgtaattgttaccttcctctctcagtaggttcaccagatcactcgcttcctttatccatacctaagaccaaaatgaacggttaaatctaatccggatttgaaaaccggagaaacggagtcaagacttgtgtgtttacctctcgtaaagcgacattgtgtttgttcatggtgtcttgacggaatttttcgatggttctgaaatcgagtcttttctctacgacgtcgtttaggtgtgagacgttttcaccgtcgacaagtttaagaacggttaggtttacgtaaggttggtttgtcattctaaccgcaaaggccagtgtctcacggtcgtctgctccaccgaggaatattgaacagatgttgattctcattgagccgttcttcatcgccgttcccatgttcttgaaatctggaagccgtccttggtccattagaaccgcaacggagctaggtgaggcattccggacgttgcgacagagccttcgttctgctgcagtcccgtcggccatcccgaaaatgatgagatcggtttctttttcgaaggccaaggcacatacatcctcgtgcatcgtcttgctcggtgcaactgctgtgaaacattcaacggaaacgttttcttgcaaatcgtggccgcttcggaatttctcgaaggctttggagatctgatctctgcggctggaagacgttgatgactcgtcgttgtgacctggatggtgttgaatgaggagagggacgttattttgctcaagctcttcgagattaacggaaacgatggagtgcgaagaggcgctcgagggacaagtagagagctccaagacggtgaggatgggaggaacggtttcacggtggtagaaacaagtgaggatcttgagaggtttgtttggttcgtagtgttgaacggtttgtcgccggtaagtgatgtgtttcctctgcacccacccgtagagatttttgacaatggccgtgaaaatggtcgagtgaaccatggcagagatcaccattatcccaaatgcctcgtggcttatattctgcatcccttaaaacaagtagttaaaagtcaaaacactaattggcgatgaatgatatttcatttgtactaaatcaatgtgtaccttgtagttcaagagctgtttgaagatttggacatcgtagatcccttgtatgcagacgatgaagccgacaatcactgcgtgtgatataggaacttggaagtaaagcgatggaaggacgatggaggcaaactttgcagcactaatggtaaagataaggaactccaaagatatgatgtcgcgtagattgaatgaaaagaaatccactttgttaccaatcccgatgacgtaacacggcataagaaccgcataacagaagctaccgatcttgtcagtgagaccagtaccgaaaggaggcgtcttaggagtgacaagaccgagagccacggatccgactacgtaaggaaaccctacagtttcagacaggaaagtggcggtgcacaacatgacgcaaatggtgcatagatgggaagccttgagtttctttccttcaggggttctcttcactatccagttgaatattggtcggcacacaactactataccaaccagcagtagtacctttgtgaaggtaggcagataagtggtcttggagtaattttgatgcaagaaactgtcaaaggtaatcaaaaggaggaaaaaaccccagccgaagcagttagccaccattatggaggagagggctaaccttccgggctccgagttcagcatcttgagattcgacaaaaccgaatacgccacttgaaaatacactacggattggtttgttagtaaattgtggagctgctcgggattatttttcgccacggttccacggatgttgctcgtgattactgtacatgctatggcgcccaccacgtaaggaaacagaaaaagagataatccattgatgattgctagcttgcctcctcgctttataactcccatgtccacttgagccgtgcttatgtatgagatgaacatgaaggatattgcctcaaatgattctattatgaaatagcttcttgtgttgaataatttttttactaaatcaatgttttgtcccaaagccgagggtcctaagaatatcccagcctgtttcatatataccaacaaaatatcacacttctatagtttaaacctttttttctttgcgggaaatatagagagatccaaaatttattaaaaaaaacgtagaaaatggtatgataaagtgattacataccagaatttgagtgacgaagtcgacatttgcgagagggcggagaagagcttggaagacggaagagagagaagagacgagagaaatgagaagaagaagaagaggagttgaatatttcaatggatcatctcctctaagtaatccgccagagcttgatcccaaccatgcctcgcatacaaattcatgtgtgccattacttgtaacactattgttcatcttgtttctctttgggaatattttttcttcttaaaactagtattcacgttcttctttataaccatttttgtttgtgtttttgaattcagcataacgctaactaattgagcaaacagatcaagcttgttgagctggggaagaagatacatgtatcttttttaagatattaaacagtttttgttgttttttcaaggattttgtgttgactttattataaccgtcagagaaaaataggaaattatatatgtcatatctcactttggcagatgtattttttggtattttacacattttttttttattatagttttatttttttgttgatcctgatcttttttaaattaatacttataaggagtattactaggttgattattaattaatctttttttgttagggatctaacttcatggatttagtagctaggttggttattataacatcaacatgcaaaatatatattacaaacacacatgtttgtgcaatcaatctcaggctataatgatgatcatctgaccatgctcaagatttttgtaccacacagaaaacatatatagaaaaccttaaaagtaggatgacctctaaagagaaataaagaacaagaggataaacaacatgtacaattaaacccctaaatatagctagagagagcagaaacaaaaaaaagaagagaataattaatactttcttcttttcttcaactcacaacacaatctctctctttccctctatggcttgactctttaggggaaatacctagcaggagggaatggaaaatataaccaaaacttttcagtacggaggagttgattggctttgcgagccatgggtaggtgcaggctctttggggattggccggggagagaatccgctcaagtttgctcttcctcttcttctccttcagatttctgtcttttccatattttccgtatcttttcagtttcttcttcggccttttggaaaatttgcattcctcactcagatgctggtatacgtttccatatctaagcatctataattggaagctttctagtggaaaaatatggactagtcgtctcaaaaacatgtatagccatgcccataatggtgtaaatgtgacttaatatttaatagtgaatttgtttgcaggctgggatctgcttaggaccgtccgttataggacgtaacaaacagtacatggctacattcttctacgcgagaagcgtgtacataatcgaatccttcgaggccatatgttttctcttcatttgctacatcacaacatgtcaagtagacactaggatgataaagagagtaggcaagttagcattcataaacggcatcttacttttcctcatacctttcgtatggggccaattcgcggccatcttgatctccaagaggctcaaaagcgggcctgcggggatccctcccgtggagttccaccatgtagcgatcgtccagtccacaatgttttttcaggtggtttacggagtcttgtcgagcctaaagatgttgaacactgagccagggaggttagcacttgcatccatgatggtgcatgactgcctctcttggtgttttttcatgcttaacatcgccattaaacttaatgttgacttacccaataaaaatcgcgctgctttcttgtccgtcttacaggtacccaagttgataaataatttcttaattaatctacaaattttgctttggaacatcttccaattttcttactataaaaacataattgactgtgtaaattcctacaaaaatagacaaactaactaagatcctaataaaatgcatgaatccaataatatttacgtatagtataaacttgctttgatctatatatacgcttttttattaatgatataaagacggaaatgaatgcagatgataatgatattggtgatagcatatgtgttccgaccactaatgctgtggatgaagaatcgaacaccagaaggacactctctcaaggcctcctatctctctgttatatgcgtcttgctcttcatctcctgcctctgggcagaatttgtgggtttaccttacttctttggtgcggtcgtcttaggtctagccaccccaaaacgtccgcctctaggcacgggactgtcagacaaaatcggttgttttgtttggtctgtcctgatgccttgctacgtcattgggattggcctcaatatcgatctctcactgttttcctggagagatgttatccggtttgagctactttttggggtggtcaggtttgccaaaatgatagccattgccttgccttccctttactataaagtgcctctttggcacgccattcttgtcgggtttatcgtcaatatacaaggactttacgacgttcaaatatacaaacagaatttcaattacacggtaacaataattcatttaggatatactttggaacatatataattttaggtcaataacaatcaataatggtcaatgggtgcagaaaatatcaagcaaatcttttggagcaatggtgatgtcagcaacggtaaactcgacaattttcatagtgatagtgaagaaactgtaccaaaccatgagcaaacgcaacccttacaagagacgtacggtgcaacactgccgagtggaggctcccctaaggatcctcacttgtttccggaaccgtgaggcggtccgcccggtgcttgacctcgtcgaactctctcgtccagccatcgggtctcctctctcagtcttcgcggtgaatctagaagagcttaataaccatagtcttcccctccttatccatcacacgcaagagattagtcccttcctcgtgcctagccgaagggaccagatcgttaaggccttccacaacttcgagaagactaatcaggagaccgtgttgatagagtgcttcacggcagtggcaccgcgaaagacgatgcacgaggacgtgtgtgcgattgcctttgaccaggaaacagatattgtgatcctaactcttgatgccgggatcgagttatgggagaggctcctgtgtcgtaatctcctgcacaactgtccctgctctgttgcgcttttcatagacagaggaaggctcccagatttcaggttcgttccactgaaaaagcttaccatcaatattggtgctatcttcttaggaggaccagatgaccgtgaaatgcttgcgtatgcaacacgcttagccagccatccaagcgtcgagctccaagtcttccggctcgtggaccagaacggcgtctctccgctcagagacatggtcgagaggaatcacgacatgagagtcatcaacgtcttccgcaaagaaaattccgagaaaaacatcatcttcagagaggtaatgagaactattttgccttggcttggaagctatcttatttccccttagacgaaaccttctctatgcaacagaggtttctattcggtttagaaagtttcttgtgtagacgaaacagaggtttttctttatctaacctatcataatgtgttcccctgtttctaacattcttaaaggtaagaatagaggaagcagtgaatctactggatctactaaggaaggaaggggacgacttcgatctgatgatggtcgggataagacacgaagaaaatcttttgatgttggaaggattgtcagaatggagcgatatgaaggagttaggagaggttggagatgtgttgatctccaaagatctcgagctctctgtttcggttctcgccgtacagcaatgagattggtgaccgtttatctcgttttcgttccccgagtttatggatttgtacagccttttgtagaatattgaatacaaatttttttctaaaaaagttctaccattcaagaagatatcttgtttacttatatctttcaaatcattccagagcatgtgatcaccaatgaaatttcaacagagattaacagattgttcaatcatttggtttagttaagtacttaccatctttacttttttttttgtagctgttcaggttaatgcatttgctgcacaaaaagaacttatgaatcttgaacaactgtgaggttgaaatttggatttgcggaaaagaagaccaagtccattagtttgtctactctttttactttttaatagcttcaaaaaacaaacagaacacaaaattatttcacacacaaataaagttgatgttgagtaatatcgacacctcaacaggttcaaattttactaaacagttagaaacaacaacagtaacaattatcctactatgaaaccctttgggatagacccaatggtgacaatggtgcggctccataacactcgttattgctcttatttgatctccaggaaatagttgatattgctcggctcacgtttccttctcttgggtaaggccggtggtttaggtaaagcaccaccaccgcacagtcatcagcttttgaggctggaaactttgttctccaagtccgagcggctcgctgaaccaacatctcagctgcaactgaccggtccttgcaggaacctacaactttcaccacttcttcgtttgacaaaacatcccaaatctgttcatccaaagaacacgcagaaaccatttagtagggaatccatttgtcagaagactgaaagctgtacaagttgtttaccccatcagtagctagaaccacaaactcgtcttctctgctgacttttctgcagaagacgtcaggaatgcagacaagtccatagtctttgaggcagaaatcaccaaaagcccttgacattgcgagccccgggcaatcatcatcaggcatccacactctatacacatcgggttcctcttccatagcaaacacccttcccttgcatgacactattctctctgcttcgcctgtttacagaaatcaaagcgaaaagttcttcaggagatttatttgtacgtcccaactcaacatttggtacttttcaaagagttattacttattaggccctaagttaaaagaaaaggataagatgctaacgttggacacagggtttcagatcaaccgtgagttggacagctttgaaactgttcttgcttcgggtgccaagaacggctcgtgaatgtcccaagttggcgatcaccaaacagtcagcctgcaaaatgtttgacaaaacatctttcaattttttttgatcaactgtcttaaaaaactcataaagctttagagactgctgatttacctgtttaaagacagttacagcagttgtaccgctgcaaaaactatcataaggagagtcgagaccaagttcactgtctatttgcttgaagaatgtcactagaatgtcctcgaattcacggaagagttcctcctgactctgtgaactattattctctatgttttcatcgccggcagatttggaagatctaatttttgaatggaccctcgaaggtaaattttcacatacgtgacgagaaatcttgtgacccatgggaccgtgaccgtcaaatacaccgcaaaagatcgtatcttcttccccaccaaagttctgcagcaaaggttatgatgcagatatgattggtcattgccttaagagaggcagtagcaagatgtaaaaacccatgtaataaagattaagaaaacaaagcagtaatggctacaaatgctagcgcctgaaaccgaaccaagcgaacaagaaaaatatgaaatgacccaacaggaaacaaaaaagagttaaaactcttacctcccagactgtcatggcgtcttgatttattccttttttcccttgtttgattgacatggaaacgtgtttggatgatccacgcgtccttacaacagctccatcatttgtgtccctaacctcagcctctccgtctccacattcattaccatcatcagcgccatgctccacaattatccctgtgcccttgctacaacagacccccatttagactgcaagagactggtacgcaacaagaaacaaaaacaaacaggaaatatctggaaacacgacgtgtggctaagtcctttggaagaagtaattgaagagaggagagcagggcagagatgaaacaaccagataaaaactttccatgggatcaccttgtaaggcctttatcggggaacgaagtcaaaggaagaggaaatgaggataaagaagggaaactagaacagacaagcatgaaagaaaccttttaagaagaatgattgacaacagattacaataacaccaaatgccatttttctcttgttgaagcttaaattgaaaaattataatggaaaagtcaaaaggtttttttcagatgaacaaaaaactgaagagagagagagagagagaaagatcagggatggagaaaagatatgtttattattttctctctgtctaacaatagattgaaatcttgatggggatcatccataattggatactaaagatacccgataaaaaacgatctggctttatcgattttcctcctttaactctttattacaatccacagcacaaaaaaccagcttctccttcaacaaatcatagcctcgctttcgataaccaaaactaacgaaacaggaaaaaaccatagtaccaaaactaaaataaaccactggctgtttctttgttaagttctcatatcaagtagacaaaacagattggccgatctgcccgatcatattaaaggaaaggagaaataattctagcataaaatgcacctgagaaacagttattaatgaagattaaatgacaagagacaaacatacctgactcaaggcatttgcattgctccatttataggaagatcactttgaaacattcttccagagtacaatatctaagatgaggcaaaattccagaaaacaaacttgtgtccttaccccatatatatagacaaggaaaggagaaatcattacatatacatttggatgcagagaacaccagaagcaagaaaattttaagaagaggtgacagacagttgcgagcgtaaaagaaactcaaatttccatttaaagctaaacttcttttttcttacagtaaaagggaatttcagcacagacaacgtatttttaatagaaacctacaatatcccgctttatatattctagaagaagaaagtacatttttcaccaaatgcatagaagaaggagacttttatgcagcatcctaaccattaccaccattgatggacaagcacccctctttgtctgagcgaattgaagagctctaagcattggttataagtcttgttgtacttttggctcctttgaccaggacaacatctctgccacctgttgtaatggcattcaaggaacaactcatctattagacaaatcgctcctgtcttgattagcctcgggatcagatcgaattcggttccttcaacatccatcttcatcacaacaaagtccctctctctcacactcttcttcaaccagtcagcgaaatcaaacccttgaatcaaattcacctctccagctaagtcactcgagtcagactttttaaccggctggattctgcccatccccctgccctttgctttggcttccacttcctttcccggatcgtgattgatctcaaacgataacgtctcgttcctcacccacgctgcgtatggcaacaggttcaccttcttctttatcttatactcttcgtgaaaggctttgtcagcctcaatggcgaaaacatcaaaagttttgttctgcttagggtactctttcttgaaccaactcccaatactggatccataacttctagcaccaacatcaacgtaaacgtatctactcttgaaacgtatatcaaccatagaaggcacatatttaatattcttgatgttcctcttaagtgtaatccatggcttaagaggctcctcttgaatcagtggctctgcatcccgaatcaaatctcttttgtaacccggaatccagcactttccaccagaatcaccaccaccacggtggtgatgaccaccaccatcaatctctgagtatttctgaataacaaattctctgatatgaggcatcgaaggatcaaaaccatcgatatcacgcatcttcaccaatctgcaagaattaaacaaatcaaggaatgaattgaaactgtacgtatctgtagccccaacatgaaccaccgcaaacccttcgggtttcagtgttcgagtaatctcatcggcgaattccaactgcttcaacgacttcccaaggcggtcaccaccggagaatacaaaatcgaaagcgttatcctcaaagggaatagcatgtccctcgcctctaaccaccaacggcctagaagctttcttagagatcccgacggagttcttcaccccaatctctctgagcgagtgaacctcttgtccaatcgccgtctctacacaaagcgtcttcgattcaggcgatagataaccgtcggcgatcagatcctggaagatggaggagtaaaactgaacggatttgatccaatccctggtggtgtagagatcatccccaggggaagtagatctgatggcgtcgatagcagaagagccggaggcagcaccggagatgacaaagttgagattctcagggagagagaagaagcagaagtcgccgcgattgcatgattcaccggtgatggtgacaacataagcaaatctcacaacgatgataagaacaccaaagagaagcacgcgaaccattatattccgtaagaagctgggtttccccatggaagtctccatttgtatgtatctcactgctaaaactactttacaagacggagagaataaagaacgaaagaatagctcttggtttgtttgttaaattggaagcaaatatccctaaatctgaggaggagatggagcagagactaacgagaagagaaacgagcagaggtgtgattagctccgattagggttgggaattgacaagaagaattgcagatccgacaagtagttggaggataagggcaaaagaagcgcatagttcgcggaggtgttcgaaaatcaaagggagataatttttccggcgaattatacggcggaggaggaaagagacacagacatggaatttggagcgagagaaaaagaagaagaaagagagattgagaggaatcggaaaagagacggctgaagataaaaaagcagagcgtttttctctaaacgcggttgctacagaggaaagaaggtttgcattttaggacatgtttttatggtttattttcggaattgccacgctgacttatagagtaattaatctcataaatgaaatcattatcaataatcagtggggtggtatcgtaattttaggagtttcgtgtcccttttactcgtattgttcgatcctttcctttcattaattatctgaattctttaacctatctttctttttttctggagagaaatttaaagttaaagtttattggtggatccaatgcagcttaaagctatagataatcaatagatgtcgaaattagaggaaatagtaaatgttattggtcatcactgataaactgatcaacaagatttacgacatattatatgattcacttattattagtgtatgaatggtttgcatacgtgatacattgctgttactgaataaaaataagtattagttttattatgtgacgacttgaccaaacatggttgaccatacatatagggtcacactctgtttcattactcatctgttgcacttaacattattttattttaagcctttaatcattatggatgagaagtgatgatgatatgtaagatttaaacatattaagaggcatttagttgggaagtttaattattacgaaagaaaatgatcatgttttaataatggggggttccattatgtaattaaaaaatggaaaacaaggggcaggtgattaaggaagtaatcatttggtttatctttcatgagcaaacaaaatctgaatcactcatttgacggtgatactttttggacttgattgacatgtgtatgttttcggtagtttgatactacatagctggatttcttttgtaatggaatatgaggatggaagtgtcgggcgcattagccgtttttcaacgagagagggttgttgctgtcacaccgagtcgctgactcgctatttttgtacagacggtgagagcctggactggaccagtaatgggccctactgagtcacggcctttctttttactttttttaccgcaaaacgcgactaaggtgacgtggaaaggccggccctatccaggcaagttgatgaggcattaaattacataaaactcatatgattacagaaaaaaaagaaaggaggaaaaagtcaaaaaggcacagagaaggcatccccttgtgactctgttacgtccgttaatttcggctccccaaccaaaaaaaaaaaaaaaagaaacaaaaactacatatacaacggtaccatgtcacccaccatgtgactagacttataatgtaaggttgtgtggggttgttagaacacgcgccgtcaacaacaacacaaaagagaccaaaattgttccagctaatccacactgggcccaaaacagggcctgtctgctggctcccataggaactcctctttcccatttcagaatgtttcttctcacttttaatttaaggcgccatctcttccagctgttgcttccagtacttgggatctaactccgcctgttcccacatcatttacatttccatatgtcagactccttcgctctaagattttcatttgtaatcataaaaagctacaccaaccttttgcggctatttagtgtagtaagtagtaatctacatatacttgtatatatattcacctgaagggtattgtctttccagaggaacgcacaaccacgagcttccaagtggtggattagagaaagaggaagcagtgatcttagggacgcatgtagtttcgctttccttaatcctccacaccccagcaatgctgctgctactccgctcggtcttaaaccactcgagttcacaaccgctatgttctgtaaacaccctatgttggctagggagagaagtcccacttcagtcacagctgtgtctgacacgtttatctgcaacatggggatcgcaatcagataacagattcaaccagtatattgtagttttttcagctgtcagtgaaggattcaacggtttattacctgtttgagattctgagagaagtgagccagagcgagcaaccccgcatcattgatggatgggcacttcttcaagtcaaccttggcgagtcgcttgcaccgaacagcaatggctgcaagtccttgggacgtgatgttaggacatcccctgctctcgaatgtttgtaacaacgagcatttggacaatgaaaccagggacttgtctgttatgtcttggcagtatgaaatgtttattgtttccagatgaatgcagccttgggcaattgtggagatgcctacgtctgttattcccactgacctggagtagataaagactagattgagaacggagaattttattattgacccgactgaaaaataaatttctacgcgagatacctatagagatcaagttcacggagatttgaacagcccatcccgatgtacgagagccctttgtctgttatgttaagacaaattcccagctttaacgaggaaagactcagacaactagatatggatttcagtcctgcatcatacgaggaaagactaacaagataaggtataatccaaaaaccacggttctaagaattgatctgaagaaaataaagaaccttcatcatcaatctcgttgtcagttaagtcaagctcttcaagtagccgacacttttgtccgatcaaccaaaaggcttctctggaaacaagagaacaagactccatcttcaaagagactagtaaaggacacgaattggcgatttgggtgattgaaactctacttagtttccggcaacatgtgatgtcaagttttctgaggtctttcagtttcattactagagaagaaagaccttcatcagttacgctcacgcatttgcttaggctaacctctttcagggaattgcacaatgtgcctatcgccttcaaaccatcaggcgtaacagaacaaccatccaacctgatcgactgtaatgctgaaaccttctttaagctactcgcaaaatccaatgatatcacctaaatcagtaaataaacctcatataagaaggcatcatagaacttggtgggtctgtgtactgctatcgatccatgacacaaatggtctattcggtggtatgtgcaattactggttttgctactactaaagagttttagtgccaaactaagttgactcagccatttagcaaatacttacatacaggccataaccagagaacaaagcaaggaaagcatgtgttctgatgataatgagaaaacggagaacttacagaagaacagtgtgatagatcaagtcgctgaagatatcctgccccgcttaaaagtgaggttaaacctctatgagttaaattctggcagctggatgcatcaagcttctgcagaacacaggttttggtaagtaaaatctcaaatgtctatggataagatgatgatgaaaacaatcaactatatagtcttccagcattagactttcaatgataaatagctttctgagtctaagaaaacatgaaacctgtttatacatcttctctcataaaagttaaatgtttccagaataaatgcagcgagcaagaagaagcgtaacatcttctccaagccatattctgagaataccaagttttctgttctaaaatatcaactaaaaagtttgtctgtcaagtcgattccaaaactattatgtgatctcatgtataagaatcaaacaaatttcttggaatagaggttaccttcaatgacttgcaatcatgtctgagtgatttaagactgtcatcatctactccaaagcacccttctagaagaagttcttcaaggtgttgaagtttcagaatgtcatgtaaacactttcctgtgatctgtagaatacggaacaaaagaataggtttgaatttccagctcctctgaagatataatccaaacatatggcacttaaagtgtcgaattcagatagataatgatccacagatgttgaaagaccaaaagttcaaccaaaacttgttgttaacttgaaaaatcaaccaacaggtctcaggaagaacaaatttagaaataattccaattcgacaaacttaccatattaatcgaaatttggctctgcggattaagaaaatgtgaagagagaagttaattaccggcaagtaggagaggtctaaggtgcgaatgtccttgcatttgacggcaagcaagccaacccctaaatctccgacgccaacacaccatttcaagctaaccgtattgagcttcttacatccaactgctatacatccgattcccatgtccgtcagcatcttgcatctgcccagcttcagcctctccagactcctcgcctccgccaccaccgcagcatcggcgtctctcatctccgtcgcattggacaggtcaatctcgactaaattgacacatttgagggccaatcgcagtagtcccgcggcggagaaggagccagagcgcgagaggtcgagggagcgaagcgtaggtccggagagacagccaacgacgctaagcgcgtagtcagtgacacgcgggcagaaggtaagatcgagatcggtggtgttccggtaacgagtcaagatgcgagggagatagtcggagcggagaggttttaaggatccgcggtgcttggactcgagctggtagaaagatttgcaagtaagagagaaggatttgagatcggaagggttgggagagatgaggtcaaggatgataaagacgagctcttccgagagaagatcgaaaggctttaagacacgaatctgtttaaccttcttcatctgctgctgctgctggtgggttgaagaaattttgaaatcaggaaggatccgagagaagtatagtctctctttgaggattttggaaaaaacccacagttattaacaacaaacagtttgttttctgtgggagagagagagtcttgaaggagaaggatattgtcaaattacttaattgcccttgctcttccatctcttattgaagaaaaataggggtagaagtgtaactttggtaaaaggtaaataaaataaagaaagagaaccgtacggggaaggacgggaggggcaaaaaggtaaaaggaagagagaagtcgcaatcaacaagttaggccattggtagtagaagtatatggtggagtaagcatgcgaggaaggacagattcgagtgcggacagtacgatagattgaaagaacctctcttatctttcttacctccctctcattaaatatcctttttatcttttcctccattctactttaattattatattcttaacctttaataatcggctaaattattttacttattttccaacaccatctaatctttacaaatactcttttgacgtcttcacaaaacatatacttgatatcatgtaaataaaaaaaaaaaaaaaattagacaagccgaccaagaaaatattcgggagatatatgttctttttcatcaaatgtgtaatcttattcttgtctcccaactttttttaaaaaaaactagtgattctccattgccaatgatatattccatatctaaaacttttctttttcacgttttattagttttctgtgtgtattatgtcacaaccacataattgtaaaaaaccagtaagtgccttttcttttgtcccgacctaatttttgattatattttttagcttaattatacatatgaaaaagaaaagaaaagaaaaggagttaaaagtcagataaaataattattgtatggacaagttgacaaaccaacaaaaatattattgaatggacaacgagagtgcgcagcaaagacaaaacagtaaatgtagactgggaaatattatttcaaactccaaggtgtgtgaccgtacttataataacctaaaactattctaggtaacgatccaattctttataagttttattataaggggcatgatatatatcagtacgcacaatttcatatttaataatctttctgtcacgcatacatgtgtcttatagcgttataatacgtgttatcatcaaataagaaaacaaggctgtgaatttctagaatatttctggccgtttctccaaaacaaaccatttttcaacacatactacaaataccaaattctggaaactaacgtggacaggaaagagaaaaaggaaagaaagaagaagatggtttagtctaaaacaaaattgatattgaaacagacgtgtaagaggaaacctgagttatcatggggttctacaacagcaatagaaatcagctaaaaaggaggactcatgagatgtgttatttcttttagctgtaaatccaaatttgaatcaagttacgtcatgattaaatattagtcttaaagttagagaaaagttatatgccaaacacctaaaacatttgctaataatctttttttggtcaacagatttagtgaatttccaagttcaaacaaggagttttatagaaacttcaatgccaaaatcctttcaaaattgaatccgactcatctccagcgcaactacaattgaactcctataaaaaaaaagagtttaaacaaagcttttttcaccaattagaaaacagagagcgtatataattaggataacgagtatagccggcgacggtgggatttggacgactccaaactacggctatttttttgaaatgaccaaactaccctttgcgaaacagaacgtcgtcatagtaagagacgtgtcaactctaccaggcacaaaaaagtacagaattcacgagacgttatgactcttgaccgtgttaggccggatatcgtacggaatattcctaggatcgtttacacgtataccgtaccacttccactaatcgtactttgatgacaattcaactcttagacttgactttttattatcacttcttttcttttttcaacttggaaacgattgttcaaggagactcagacatacactacgtggctaaatattccaacgacgactagtagcattccagttcacacttcaaatttcaaaaagtttgaacaaatcagagaagtcataacaaaaacttagcgtttcttgacttttaaaaatactttgctctccaacatcgtttttcatctactatcagtatttatcatacttgttgatttgtgcatatgcactgatgaaggttgaatttaaaatgtatcttgatgtaaattacaagtcctataacacttacttttacttatgtaaagtatttgtttatgtgaaaagatcaaacatgcaaatatgctgaaacatcaactggattgattccctttaaaagagggtaaaattgggtgtacatataaaggggaaaaaaacagagtgacttacaatgtgtcaaaaatacagcaataaaaacattacttgtgagaatacatacaatgtgagaattcttctatacagagtgtgatctatatgtttgttacctgcagatttgattcaacgactcactcgctccagctatctgaatcgtgctcgtcgtcacttcccgccattgcctatttatatgtatgtcacaaaaccactttatcgatccccaagattattatatctttttctttgtgcaacagattattatatcaagtgtccaaatttaaccaagaaggagagagggagagacctggcgaagagtgttggctttctctagaattgcagccaccttcaagttggttttgggaacagctacttgaaagtttggtctccctgaggcatctgctggtctcaggttgaacgactgctaaagtttttttcaagttaaatgttctataatagaaaactgaataaagtgaaaaggaaaagatgaaatggtgatttgaccttgctccgtatgatctctagtagtgaatcattctcgtccactcgagctccaacgtgtgtcctgttcccttcagatactttcctcaactgtaatcaaacacaaattgagtctcatgattaacgcgtgagagagagaagagaaaaataagccattgaagtactaaccatgcttctgtcaatgccaataacaagcgtatcctcgtctcttttaagctttccagctttctgattctgattatatgagttattgtctcgcaaggtttgtcgaaatttggtttgtccaggtttttctagtgggtgatcaacctgaggctcttcctcttctaactttgcagggtggggattgttatgctctcttaagttctgactaaaccattcaagtgccattgcttcagtcctccagtcagcttctaagccttgggccgattctgccaaagaaaatgaatcctccggagttctatttaaacacttgtgtttactttccatataggtgtcgcttgtcccattgactcctgaaggagactgttcctcggttgctttagattcttctgtataaatatgaaaattatggttttcaccatctgtaaccgacacttctgatggatattgtgcctcgttcgcttgaactgatccattctgtgtgttttcatccctctggatgttgaaactgttgtttccactgcctgcaagtgatggcatttcggttgattcaaccagcttccccatccaccattgtgtcggaggaagaggcggaagcggaggtgttatctccggatttgcctgaggtgtttcatggagggacgtggagaggggtagtatggactcaggggatacgttcaagaaatcttcttcatcagtcagacccttggaaagaacagactcagagatatgatcatttaatgatgtgaaaatttcctggtatggtgcatgaagagcttctatttcagttatgcttgaaggaaaaacatctaaaggtgaactttgaacaccaacagatccattttgtgtaggaggagactcgtctgatgatgttcttgaatttgctgaccctgtttctgatggactttcttgcctttggttctgtatctgtaagcaatactcagatgaaagacattcttctgtacctaaaagactctcctgtggatcactaatagtttccaattctttctggggcacggtctcaatggccttattattcaggccagtctggttatcgtgatcgacatcacctgcaaaacaagtaccatcaggaattggtacctcagggtcactactatcatctgaaacaatagacatggtttgtggatcctcctgtccagaatatgatgatatctcagccagatcagggttggccaatccgtcttccagacaagatgaggctgagaggctcccgtatcctgtgtgaagatctcttggagtatctgacatcagagttccattttctgaactgatttcagaagttgaaatgtgttttgactgtgcaggattcatggaagatccgtcttgggagttcgtttcatcttcttttggggcagcataatcctgtgcatcagcagacagagataaatcttcaaagttgtcaaatgtgctaatgtaatgatttggaagaagaaaatcggactccaatgccactgatgtttcatttaaactctttttggtatctggaatgaaatgaccagcttcagaagaaatgtcctcggattccagagcctctatctcttgattggttatggaagagaactggtcttccactaaagcacttacagatatctcagatgcagtctccacactgaaaacatgttgagaatgaacatcattggtcccaccctcatatgcgtcctgtggcacttgtgtaacctttaaaagatgagtttcaggggaaatattaagcatgggatcccttctgacttcaaagacctcacaagcttcagcatttgctttattggactgaagctccaagtgacttccagaatcttcgggaagatttgcaggactctcgtagcaagacaaactgaaaggtgtttgtaagatctccagagtccccatgcctgcggaatctatgtccggtgtcatctgggaaaatgactcgtctaaatctacagcagcctcttcagctttatgtggtttactttcaggagaagctctctggatatcagtacacaaaagactagattctccttcctccggtgagtggcgcaaaacattagaaaactgagtcagaacctctgtttgattcacttctgcattagtacagatctgcggctgaccaaatcctggaaatccatggtcacatccagccttgtcatcactccctgcttcctttacctctgactccgtggaagcaggtgaatctgcgtcattgttcgtcttgcaacacaaattcacagaagagctactttctaaacaaaccactggtgacttctcattaaccgtaatctcgtgaggaacaaaaggaatttcaagtatttcatgaccagcaatggattctatctccatctcattgtattttctagtgcctccactgttggaataaactaaggaaggtattggtaagtcttcttgttcactgcatactgtaacttcagtttccattgccggagatgactgatccatagtcccatgaactctttcacagtatggtgaagaattcttgaggaatttctccatgtaacttgccccagagcttgagttaatcggaggtccattcagctgtcttctcttcagtttcacatggaattcaggatttctgtgtccgttctcaacatgctccaaaaagaatagctgatgcaacctgtactatccaaaaagtagctcatgtcaccaaatcaagtgccgatcacatatatgaactttagacataggaatgacagaaacagaagtagatatagagcaagagtgctcacttggcatgtgatgtccgtgaatcctcaggcgtctctttaatagttgtgtgagatcctttcttctgtatttgaaatagatttgatcatatgtaacacataatacccaaatgtgcatttttcagatgcttatttttacagacagtggcagagtgggcatagtaaaaccagaattaggaaatgtgtaacatgattgaatacctttgattgacgtagtcgcttatctttcccgagtttggatgttgctactactgctgatgtagtatgtgtcttcaataaagatggatcagagtaacgcttcaagcatgatccagacccagcaacatcaaacctgaataacagcagaaacatgattaaaaactgcaaatggatatttccttatggtgaaaattctcatgatatactgaaatgtacttgtcgagaaggaaaagctgcggcggaccatggcattcctcgtacgaatccattatacaacgaggcaagttccgtggggaaatcaagtcttcttttgtttgcagatcagaatgccattccaagcctgaggacctaactaacaattcagtgcttgggatcaccaatagcagcttatatctcttatactaaacattagagtaagatagatgactggcctggctcataaaagaatgtagaatgatcggtttgagagagaatgggtatctcaactgaagggaagtctgcttcgaggtgttggagacgcatcgccaaaccatgacctcgtgctgcagttgtcattagttgctcatgcaggcaatggaatacctcagcagcaaaccttattagtatgaaaagagacaaaagaacataaatgccaagggattgattccatagcgacatagaggtttcattagaattagataaccaaaagaagaaaaatcatctcatcagcacacaagaaacttgaactacaccgaataagatttttaagcaaaaaacaaagagaccaccctagattcaggttttctctagattcagagtatatagcatcgaaattcaattccacggaaccttcagtgtcccattctctacagtaaaattcctcaaacggtagggtatattggaccgaaattgaattaaaaaaaaaaaaaaaaaaaacatactcagagaggtcgccaagctggcgcaaaacgccgacgagaccagccatggaagcagcttcgagcaaagcttcaggatcctccttatcggcggattggtagagctccttatccgctaagccgtactcgttccgtatctggtatctcgtcaatgccattgtgctccaatcgattaaagtagaaacccttaattcttaaaaacaaaaaaagagcatcagaagaagaaactgtgcagaacgaaccgccaaaacgcgtcaggagaaagatgaaatcttttacctttatagatttttaattaattttaacgacgcgagagtggtggaatttatataacggtccgtgacattcatccaacggttataatcatcgcctcaccgtgtggttgccgcatgtgatcagaacctcaggtaaaataatttattcaaccggtgaacatgaaagtagttaaaaccgttgattatccatgcttaaagatggacaaactttgcttagaatcataaggtattataattattgcaaatcaattatattgtactacaagtatattgtctacaagtggttgtggttgaaatcagttagtgtattcaacctgcttttgatcgttacatccaccttcacctaagttttttattttaattataattctttttttatattattgactaccaatagtgatcaaatagtgggaattatatatatatttctcgtcgatttattagcatagaatacattcttctattcaattcttcgtatgtctttaaatttatttgataatgcagttcaaatcaaaagcactaatatcacgcaaggcttccaaggaaagattaaatgattactccatttatttttgggccaaaaaatactccagtaaatgttaaatatataaacgcatacagtatatattctttatatgataaagtatggtttggtagattgttattaccatcctgatgttatgtaatgagcttaattcgtcgtgcatgatgtgtcgttaaaaagtcaaacatcaaatgacgaccttaaatggttgggcctgatggacttatttgagtctaatagaagacagtaaactgttatgagcccattccatgacccatattaaagtgctggataaatatgctaaaatccacagcaaggaataaatgaaacgcagcgtatcaagttgagcaaaggtcgtttttgagtacgatggaaacaggtcaccaaacgttatcactatgcctaggcttgtgtttggtacctgccccttctacattggtcgatcaaagaagaattactgaccttataattttgtatatatcttaataatatataaaacccacaattttgaaatacagctcagaaatggctggataattagtgatttcgaggttcaaaattctatggcgagggatggtttatataagaattactattacaagcttagtttgttttagctataatcatactctcatgtattagacgcgtttctttcatttatatgttgtaataaatgagacgcattttgtgtggacgacaaatcatatacgagcaactattttgatatatatccccgtttcctatacatgcattagtttctgaagagattattggtacaagatagagaaaggaggaagaggtgagtcgaccc

SEQ ID NO: 1394 - DNA, 96565 bp, Arabidopsis thaliana
caggactctcgtagcaagacaaactgaaaggtgtttgtaagatctccagagtccccatgcctgcggaatctatgtccggtgtcatctgggaaaatgactcgtctaaatctacagcagcctcttcagctttatgtggtttactttcaggagaagctctctggatatcagtacacaaaagactagattctccttcctccggtgagtggcgcaaaacattagaaaactgagtcagaacctctgtttgattcacttctgcattagtacagatctgcggctgaccaaatcctggaaatccatggtcacatccagccttgtcatcactccctgcttcctttacctctgactccgtggaagcaggtgaatctgcgtcattgttcgtcttgcaacacaaattcacagaagagctactttctaaacaaaccactggtgacttctcattaaccgtaatctcgtgaggaacaaaaggaatttcaagtatttcatgaccagcaatggattctatctccatctcattgtattttctagtgcctccactgttggaataaactaaggaaggtattggtaagtcttcttgttcactgcatactgtaacttcagtttccattgccggagatgactgatccatagtcccatgaactctttcacagtatggtgaagaattcttgaggaatttctccatgtaacttgccccagagcttgagttaatcggaggtccattcagctgtcttctcttcagtttcacatggaattcaggatttctgtgtccgttctcaacatgctccaaaaagaatagctgatgcaacctgtactatccaaaaagtagctcatgtcaccaaatcaagtgccgatcacatatatgaactttagacataggaatgacagaaacagaagtagatatagagcaagagtgctcacttggcatgtgatgtccgtgaatcctcaggcgtctctttaatagttgtgtgagatcctttcttctgtatttgaaatagatttgatcatatgtaacacataatacccaaatgtgcatttttcagatgcttatttttacagacagtggcagagtgggcatagtaaaaccagaattaggaaatgtgtaacatgattgaatacctttgattgacgtagtcgcttatctttcccgagtttggatgttgctactactgctgatgtagtatgtgtcttcaataaagatggatcagagtaacgcttcaagcatgatccagacccagcaacatcaaacctgaataacagcagaaacatgattaaaaactgcaaatggatatttccttatggtgaaaattctcatgatatactgaaatgtacttgtcgagaaggaaaagctgcggcggaccatggcattcctcgtacgaatccattatacaacgaggcaagttccgtggggaaatcaagtcttcttttgtttgcagatcagaatgccattccaagcctgaggacctaactaacaattcagtgcttgggatcaccaatagcagcttatatctcttatactaaacattagagtaagatagatgactggcctggctcataaaagaatgtagaatgatcggtttgagagagaatgggtatctcaactgaagggaagtctgcttcgaggtgttggagacgcatcgccaaaccatgacctcgtgctgcagttgtcattagttgctcatgcaggcaatggaatacctcagcagcaaaccttattagtatgaaaagagacaaaagaacataaatgccaagggattgattccatagcgacatagaggtttcattagaattagataaccaaaagaagaaaaatcatctcatcagcacacaagaaacttgaactacaccgaataagatttttaagcaaaaaacaaagagaccaccctagattcaggttttctctagattcagagtatatagcatcgaaattcaattccacggaaccttcagtgtcccattctctacagtaaaattcctcaaacggtagggtatattggaccgaaattgaattaaaaaaaaaaaaaaaaaaaacatactcagagaggtcgccaagctggcgcaaaacgccgacgagaccagccatggaagcagcttcgagcaaagcttcaggatcctccttatcggcggattggtagagctccttatccgctaagccgtactcgttccgtatctggtatctcgtcaatgccattgtgctccaatcgattaaagtagaaacccttaattcttaaaaacaaaaaaagagcatcagaagaagaaactgtgcagaacgaaccgccaaaacgcgtcaggagaaagatgaaatcttttacctttatagatttttaattaattttaacgacgcgagagtggtggaatttatataacggtccgtgacattcatccaacggttataatcatcgcctcaccgtgtggttgccgcatgtgatcagaacctcaggtaaaataatttattcaaccggtgaacatgaaagtagttaaaaccgttgattatccatgcttaaagatggacaaactttgcttagaatcataaggtattataattattgcaaatcaattatattgtactacaagtatattgtctacaagtggttgtggttgaaatcagttagtgtattcaacctgcttttgatcgttacatccaccttcacctaagttttttattttaattataattctttttttatattattgactaccaatagtgatcaaatagtgggaattatatatatatttctcgtcgatttattagcatagaatacattcttctattcaattcttcgtatgtctttaaatttatttgataatgcagttcaaatcaaaagcactaatatcacgcaaggcttccaaggaaagattaaatgattactccatttatttttgggccaaaaaatactccagtaaatgttaaatatataaacgcatacagtatatattctttatatgataaagtatggtttggtagattgttattaccatcctgatgttatgtaatgagcttaattcgtcgtgcatgatgtgtcgttaaaaagtcaaacatcaaatgacgaccttaaatggttgggcctgatggacttatttgagtctaatagaagacagtaaactgttatgagcccattccatgacccatattaaagtgctggataaatatgctaaaatccacagcaaggaataaatgaaacgcagcgtatcaagttgagcaaaggtcgtttttgagtacgatggaaacaggtcaccaaacgttatcactatgcctaggcttgtgtttggtacctgccccttctacattggtcgatcaaagaagaattactgaccttataattttgtatatatcttaataatatataaaacccacaattttgaaatacagctcagaaatggctggataattagtgatttcgaggttcaaaattctatggcgagggatggtttatataagaattactattacaagcttagtttgttttagctataatcatactctcatgtattagacgcgtttctttcatttatatgttgtaataaatgagacgcattttgtgtggacgacaaatcatatacgagcaactattttgatatatatccccgtttcctatacatgcattagtttctgaagagattattggtacaagatagagaaaggaggaagaggtgagtcgaccccaaaggaaggctgagacccaatcaaaaactgacacattccacaaggtgcacttaaccaggacgtcgcaattaaattccaatttttatgtatgtgtcttgtttgtatcattttatttgacacttgatcaaactttgatatacatgcagtgtacttatggcccagcacacgtttctcttcattgttttaatcccaaactaaattgcatctcatttggtttttctaataaaccagagatcatgtagttgagtccagcggctattgatccaagtgtattgattacaaacttgtgcaccgtagagaattcattacactgagaaccttagatgtaacaagaaactcaatccaaagtttaaacaagaaattcaatcgtgtatagtagttttttgctatgaatgtgaatatcatataaaatgaaaagtttggttttacatgtttgcgcttgtgactgtatttatgtttatttatacgtataatgatggtgttaaaaaaaaaagaaaaaacaaattaacctatactaacttttatactaaaccagaactcgtggcttggcttcaacaaagcaatgaacgaaactgatggggcatggaaacgtgaaaagacaagtacatatttgaggtcaaaatcagaacagtgcaaattaattattttaggttttaaagagaatgtccaaatcccgacagtgtgcacgaggggtttagttggatccaacttggcctctttattgctcatttaatgttacgtggactacacatttcctccatttagaccatttgtaattttatactactatcaatcattagttcattacacattggattatctatcattctgttaactaaaaacttcattcgtgattaaaaaatactacaagcttaactcatcttgtaaagtttagtataacccctgaaaatgtgactcttcagttttcacaatcaaaacacacaaggcagagaagaaacaagacacaactatattatttggaaaaatctttctttttttttgctttaaaggttatatcatcactataacactactatagtactaatatatttttataatatgaaaaatcttttttttctaacaccaaaagattatatcactaaaccgactaaaacgttggtcgttcaatttctattggctggctcactcacagaacaattggacgaatttagtgggaagattgagacatgttctgatttttcgctagagacaaaactattaataacagatgtgtatgcgtctggttcaggttctaactatgacctatcttaagcattcttgcagttactagcttgctcggatcatcattaatagaacgagaacgacataagagctttccaaattctaagcaacttttaattcgttagacgggattagttcatcaataattttattttgttttcagcgaacaaacttagcggctatgataaaatgttttattcaaactgaaaaacaacaaagatagaacctagattaaatacctacaaaccaaataattgctcgaaaaacgacctaagattattgcgatattcagtttatcaccgacaatagaaaaaggggaaaaaaaagagttatttgttattataaagaaagctgattgaaaaaggaccaagtcttaaaatgaccctttgtaccgagtacttgattatgttgtctataaaagggactgaaaccacaagacgtaagcacacaacacaaatataagacttttcacttgaaaacctatcctgttctaagtctgaagagagaaatatacaaatggaagcacacaacgtagagatatcaacaagacttaccccagaaatgaaaaaccagggaaccatagagttactctacaaagcgttgcagcaaggcgacacttctacggtgaccaaagtggtggccagtgacgtggaatggtggttccatggaccgcacgattgtcaacacatgatgaggctgctaacaggggaacctccgaggcaggtttcgttcaggtttgagccaagcagtgtacaagtagtggtgcctggtcatgactgcgtgattgcagaagggtgggagggttcacgcgtgtactgggttcacgtgtggaaattgaaagacggagtggtcactgagctaagagagtatttcaacacatggctcactgttacagactacagtcttggagcagtaggatgggacatggggcgttgtacggtttgggagagcgtaccaagggacctggctcgtggttcgttgcctagcttgttgttagctatttaactaatgactaaagagtaaattaattaagtaacacacagtttgtctctgggggtttctatacttttatgatgaatttagcctatatgttctaaacagtgttatgtgaaccccaagttgtgtatattattggttcttataaaaattgtctactcattttcaggttcatcactcatcgtgctttaataaatatcagagtaaaataacttaagtaactttgatcctatatatatccctattggattataatgaactttgatttctattttacgacaatgacaaagcacttaatgctttctttcttttttgaaaagaaagagaatgatgacaacttgcttgagtcactgcaattctagaacgagaaagcacacgggagcattgatgttaatgagtggagttttacagagaggagaagtttagagagagttaggaatgcgaaattattgttactagtcaaaacacttaagccaatagattcagagatctggaggatgaagacagtattccgagtaatatattcaggaaaacctagagaactgaaaacgagatggattgtaaaattgtgagtcgtctaggcggggatgcgtgtataagacgcaggggcttgtaacgactgtagacaaacccttatagaggcttctttatgggcctttgttgggcctaataagtaaagggttaactactaatctttcatcaaagtatgttgggtttctctaccaagcccgattcaggctcttccacggctaaataactaaaagtcaaataaaatgatgtgaaactttaaaacgtgaacccaaaaaatatgatttcaaatgtagtagattcggttttctcctgtggtttgattaatcgaccatcccagcttatgttaaaataattaaatttctgttattcaattatatattttttaataaatagtcttaaatctcgtgttattgctgttataaatatgtattaaaatataaattattattataaatattatacactgtgttattttaaataatatgaatattttgtcacttagtcatatgcttcaatttttttctacaactccgttttttttttgttttgctaaattttgtaaatattttataaaatggaaacaatttaggttacaaacataatttgaaacccaaaaatatgaatccatggcaaaaaagaaacaactccgttcttagattcgtttttagcgatatctctgaattcactcacaagataaaatgtgagccttatttgtcgtttttatgttgatataggaggaaacctaataggctcttagggatgtaccccttaataataatgtagataatgtagatgtgtagatatttgataaatagaggagaacagctcagattaaaacaaaacaaaaaaaaactaatagatatatagttagcacttaacactaattaagcgtgacaatagaataattacataaagtctgatctgcatcacaacagtaagttcgcatatcttgtgtaagtggcgtatttcgagtaatatatgtctgccacctactttctcatcgattttaaattagcatcatctaatcaaatatttagtccatacttggcgatcggaaaatgaaaacaaagagacgtttatatgtatatattttgccaatcaaaatcaatgttttcaaacaataaccaataataattaaatatatgtatattcgtattaacatgttaaaaacacaataatatttttttggccaatagaccacacatggtttggaagttggaaccatttctcttcgctagtcgctactgcagccacatcaatgcctacgctcatccacgagacgcgacgatacaggttgactggtttgtggcttagtattattctgttgagaacaaacaaatcataattttgaaaggcgatgaggtagcaatatatgggctatatatcttttaacaaaaacaattgaaaatactatatagagaccttaaaataattgaaccgacagttaaagagagttatgtgctcgttggtgagatgtccattaaatctgtctgaatgacaaccaatatttacatactttgtcttctatatttcaacaagaaaagtgaaatattatcaaaaaaaattatgtccataatgtaatactaaagtaattttattctctttggaacagcaatagatgatgatggatatgatccgttgttccagaagcatcgctatttatatttggcattgcaaattacaagtatgttacagatttatctcgcaataccttattgttttcgtaaataaacgatgggatgcaacataatatttcttaataagtaacaacaaatttggctaaaatcattgattatatcacaaggaaaacaatattgctcagaaaattccaccacttgattatttttccttcgaatattatatcaagaaaccatgctaaatatttaagaggttgacgtgatttgtaaatctataatttggtgtttggttcatgaaaatgaaaacaaactatacatagtttttggcttatgcccccaaagttcttaatgcacaagactaatccatttttaagttcttttcataatattcttaattggttgattaaattatcccaacagaatagtcaagtttaacttgttagaataggaatgtgatgtcaattttttttctttagatgtcaaatttactttaccaataaaaataatggaatggatgtatgtaacttgaaagtgttgttgtcttttgcatagaaaacactttttggcacgacttccgttatggaattattctaatttttatcacatattgtattctccccactcacatctcaatcactcttctcttttacagtggaaaatgccacgtgtcgttcccatgattcgaacagaatattccactacaatttgcagtagtaccacacatattttgaatacaaattgccactggttatacaaaaaatcaagaaagtttttaagatttggagaaaatttccataggcaaattagatatcgatcaaccaatatatatacacggccacgtatcgctataatatgcaggtccatgcaagcaacacaataaaacttttgaaaatggagtcattgtagaattgtgtgctcataggctgttaaagatttctcatgatctcttgaaggggacttgtatttctgtcactacatcccatctgtgttgtctttttctttttacatttttcttccttttttttctccagaaaaggaaaaagtgtataagaaaatgtaaagtgtgaattaatcctcatagtcatagataattagttgatctggacattaaaatgagaaacaatgaattttccttaattctatcaaatccataataaataatttgattagattaatcttagcctaccagctttgacaatattatgtaacaaaattgataattatccgaaccttgcattgtataataattgattattccaatagctccttatctatatataactgaagaaaagagctattggaaatttatgaaaaatatatatatatatatatatatatatatataactgaagaaaaacatacaaaaatatatatgataataatatgtggtgcggaattttggtcgtcataattttgtttatatttcttcacaaattatagactgattttacatttttgttccggcttagttgaacatattagattttgctttatataggttgaacatataagataaaggcacctacatctacatgatatagttcatatattgattatatatgactattaaaagatattgagtattgaaacaatttgtgaacggttaacgtgtattgtacaacaaaaagacttgatattaatcagaataataggaagaacagtaacattgttttgggtagaaagagtagtcaaaacaacttttgaaaacgaaaatttgaaacagttatatttatatattaagggaaaaagaaagttgacctgacttgggcaagtcatgaatggtgaacctagaccttcaattcaaattcatatttaaagagagaaaacattgaaaattaagggtaaaaactaaaaactagggaaaaaaaaaaactactgtttgaagacaagaaaagcatctcaatgattttcacgagataggacctagaacttagaagtggactttgattgagactttaaatagggtgggcaattatgagtcccacattgtcgtttctcattcaccaacaatcaccattttttcctacaacaatagtattagaagtttagaaccgatatatttctattaaaacaataattttaccgacccaaccaaaatttcttgacatgatatacaccacttttattgccaaaaaataaaataaagagaatattaataataacgggtaagtcttgttcgttaggttctaaattaagttaataaagcttttgcatgaatatttcttgcatcactagcaaccgatgatgcagaagaatgctacataacaactcacaacacacacatatatagagtaacattaatatgtgatatgatcatcatcacacgcattgcctgttcttgtacatgaagcaccactatgatcttacgccaaacctaactagtgtccatgcctccatgagtccatggtgtgaagtaagtaacgttctccgatggattgatgggttacatcataaaattttaggattttaccaaacaaaaattattttaatgatagtattgaatccagggttcaaaaactagatatctaataaatctcgaaagtgtgaccttgtaaatatctccgcagttgaacaaaaaaggtaaatatctcctcgtattttgatttgaggatcataataacgtactgaagataatttatctctctctcactattttaaaaatatttgacatatacgcaaagctacccaaacaaaaattaatatggtcccaacgtaatgttatacagttagaatcgaattaaatgtatgcaacaaacaatggtagctgagggtatataacctaataaaatagttttcaatgaacaatcttttgacaaaaatgtctgtgtattacatataaagaaaaatctcttactgttatatatgcaagatggggaatatagcaaagttggttcaaatacattcctcttgttactgaaaaattcgctttcaccgtatatatagttagttataacttaacatttataatttatatatgtacaaacgaaaaattgatattaaaaaatggaccgaaagaatgatggaatggagggaaattgttcaaaaatataatggagtatttattatcaaattataccaaattagaaaaaataaacgctaagtttgcaaaagaaagaaaaaaagtgattagttggataaaattagataaaggaaaagggaatggatttgatgtaatgataattacgacagcatgattctctcaagtcctaccttaatgtcgaaaaagaaaagtcattgagctgtcggatggtactctttaatgatttcaccagaaatatttctctatatgtagagaaatattaaaaactctacctaattataattccaatttttacctcacttttttttcattgaacaatcggctacaattagtttcttatgttcacacggctacaattagttcaaaacaagtaattatcaaaagaaactgcatatattaaattgagatatacattaaaaaaacatatatatacggaggagattcgtattatctatagcatatgcaacctaaattgtacatcggtgtggtcttgtggtcctcaagaacattattataaaaatgtgtgtgcatatacgcaaacacacacacacacattcactttctttagaggtttttgggtagcatgttcatgggtcagcatgctgtctccattatctttttgatgtatatttaggtttcattgtgggaattcaaagaaatgttgttacctggtaattagaatcacaacaaaagtaaatatggtgaattatcaatttggaatcacgttttcaaatatcaaacctacaagatttttcttataaaaataacatctgcaagatttgcattctaactagagagagaactagtgtcatgtaggtatatatatatataacaaaatatagtgacataaacaacactcgcacttttttttcgtcaaggtatacatattacataaaaacaaaaacgtattttttttttatccagacaaatcatacccccaaggtaactaaaatattgttgggtaattaaaatagatatttccgtttgctataaatgagaaagcacttacaacatacatacattctctctttctctctctctctctctctcatcccggcccagttatgtggtcggagagaatgatgaaggtgtgtgatgagcaagatggagaagcagggcacgtgcattactagctcatatatacactctcaccacaaatgcgtgtatatatgcggaattttgtgatatagatgtgtgtgtgtgttgagtgtgatgatatggatgagttagttcttcatgtgcccatcttcaccatcatgaccactccaccttggtgacgatgacgacgagggttcaagtgttacgcacgtgggaatatacttatatcgataaacacacacgtgcgtgtttgtgtgtacgagctagcctagatcgcgtattttgaggaagtagataccctctgcaaaagtacctatttacgtacgtacgcaaaggaagattagtcttgcgaaatagtatcaggttagtctaattaacaaagctatatgtgattatatatatgatcacgcatcttgatcagcgtcgcttatatattatatataatttaatgttcataaaccatatgtgtcataatgaacatagtttcggttagcgagtattagacaggagatccaactatacaataatacaagtctttttcttttaaatgaaaatttacttatggtgctaattctattgtcattaaccgatgtttcatttgagtaactgtcaatctgtcatatcatttcaagcaaagggtaaatactaaaacccttttggttgccccttttttagttattaatgaggttaatagagataatcaaacgatatgataaatgtataagattaccgagtaaagatgagtaatttaatcgattagtggagcatgcgttcatttttttaagattatacttgctcttgctggttaccaccttgttcgctcttttacgggcttaaataacatacacatattatacgtatacactatcaagcgtgcgagatagaccaagttacatgttaatcttaattgttgaatcacacatttcaggttcgtaaggtcataccgctccttatcaaatggtattcagttttatctctctgatctccctcttcttttaattgtctaataaattaaaatttgaattagaacacattaattggcaattacaaactattattctattcaagtgttttttttcaaacagttttacaattataaatatgttatcggaacgtatgcatatataataaggatatttcagtcgaactaattattcttttatgttaaatagttgattataaatattcagataacttctctgaaatgtataatttgtatttaatctgaaaaatacagtgtgtaaattaccgttttcgatacatatattgtttagctcaatgtcaaaatgacattcatgtcgtgattatttactttccaacaaaaagaagagcttagcttattagttatcattatattttagattttttttttgtagatgacgatagctccttttagatcactattagtaatcgcaattaattcaatttggagagaacaacacagcaagaggcatgaagaaactccaattccaccagagcgttgcttcaaagttcgaagtctcaacaaacatgtttggaaacacatctcctctatacataagcaatgagacaacagatatgttagatgtatgcaagttttgtttgcttcaagataaacacaaaagcagaatagttttgattggaaagttgtttatctgaaaacgattaatcgagcgatgctcttatgttgtcagtgggcttagaatatatctccctaggccatatactgggcttcactaatggcaacaatattaaatagtcagttgcctcaatatcaacgagtgttaggcgggcccttaaatgatttgaacatttgatagattttaacaaatgttatttgggagaccacaattggagtttttttttcttttcaaatttgatttcaattctgtagcaacatggaaattaattagtatgaaatcttcgatggttgaaaaaaatactaatttgtaaattatatggaaaagaatccaaaaaaatatgatttgacccatacgtcggtgtttgttgagtaaaaatcttcttttttttccgtgtttaaggtaacaaaacgcgtcgtcacagatttggaccgtattaaaaacaattgacaaccgtgtatcctcccttaatttatcaataatgcaacattttgatatattcgtctacttcatcaataagaaaagtgtaacacgggaaataattaaatagtctaaattctcttctgttttttttggtttgttcttagaggaaatctttatcttggaatctttaatctatctagaattaaaagtttatgctcgtaggattgtctacttttaaaagtcaacatattcgatacagatattttgtatatttatataaagtcgaagaccctgaaacttatcttcacggcataataagaccaagaagaaaaagaaaacattaatttcaaccaaagcaaaacagagagaaaaaaatagagagagtgaatcaatttcggtggagaaagagaagaatggagcagccgtacgtgtacgcatacccgcaaggtagtggcccctcgggagctccgactccacaagccggaggagtggtagtggatccaaagtactgcgctccttaccctatagatatggcgatcgtacggaagatgatgtcgttaacggacggcaatttcgtgataacggacgtcaacggaaacctgctgttcaaggtgaaggaaccggtgtttggtctccacgacaagagggtcttgctggatggttctggtactccggtcgtcactttgagagaaaaggtcaacaatttatagtattagttaaaaaaacagagccgcaagcacacacacaacatgtatacaagtatagatgggattttattaataaagtagtaatagtttgtttggtgtcgcgtgatgattgcagatggtgagcatgcatgacaggtggcaagtgtttagaggagggagtacggatcagcgtgatctgctgtacacggtgaaaagatcgtcgatgcttcagctaaagaccaaactcgatgtgtttttgggacacaacaaagatgagaagagatgtgatttcagagtcaaagggagttggctcgagcgttcttgtgttgtttacgccggcgaatctgacgccattgttgcccaagtatactatctctaactctctttccttcattaagggcccatccatctcatttatcaatgcatctcacatgtctctacacagtacacattaattagcaatgttttaatctggttttggtctactgctttagaatccggttttgatggacaggtttaggtagtttttgatttcggtttagatcaaaagatacatttatcttagcccatatattgtatgtttgatgaaattgggaagatttgagaaataaaacggtttactaatagaaaaggaaaatggtatggtgaatgatggacagatgcacaggaagcacacggtgcagagcgtattcttgggaaaagacaacttctcggtgactgtttatccaaacgtcgattatgccttcatcgcctctctcgtcgtcattctcgatgacgtcaaccgcgaagaccgcgccgcctgagagaagaagatatcaccttctcttcttcttaattatccatccatcaataatgtgctattcatcaaccgttaaaactttgtgtgatcatctcagttgtaaaataatcaaatcattgtgcctgtccttgttgtttaatgactacatttataactgttttttcattaatatctcctgccaactgtacgtgcatatcgttacaaaaatttattttagtgacagacatttcacgtactaattttttagtataaaaaacacttatgagaaataaatctacaatctttaatacatacaaaaaacgcaaaaaaaaagaagaaagaaaaatcaaacacaagccaatcgcaaaatatttattgaaacggagcgtcgtcacttgcagacttgctaattgctcgcaagaggtttgaccgaagaaaaataatcaacgtggcagtaattgctcaaggagtgggaccgggtgttactgagaagacatggccaagtgtgaacatatttttgaacggacgcacgaatttgtcggaaagctgattttttaaaaaatatatctctcctcctctgtgtatgtaatgtatatatatggcgggataaaatttaattagactcgccttgtggaataaaggcattttcgacgagaatttctgtagagatgaggccttcttgtgcttcttcctcctcctcctctgcttctccttcgttgaggctatcgtcagtgacagtggcggtggacaaagccacgagcgagcttctccgcactcctgattggaccatcatcatcgccatctgcgattctctcaattctaatcgctggtaaataaatgatcttgctttcttatcatgatgatatccctatgttgttctcacaataaataccctgacgttgaaattttgtgcaggcaatgcaaagatgccatcaaagccgtgaagagaagattgcagcacaagagttctagagttcaattactcactttaacggtacactctttttttcttttcctaaccaacctgtcttctctcggttataactacatgcagctgctgactccgaatactatcttcgtttccttatagttgttggaggcaatgctgaagaactgcggtgactttgtgcattctcatatcgctgagaaacatcttcttgaagatatggttaagcttgtcaggaaaaaggttctttttcttttatcctgagctctcttgttaacttctccaaggcaccctcttttttagtttgtggatataataataataatcttgatatgtgtgagtgttgaaaatgtgtgtgaaagggtgattttgaagtaaggaacaaactcttgattttgttggatacatggaatgaagcattcagtggagttgcttgcaaacaccctcactacaactgggcataccaagagcttaaagtatatatataacccactttcttttctttctttagattattattagcctctagctcattccttttgaatccacagcggtgtggtgtgaaatttccacaacgttcgaaagaagcacccctgatgcttgaaccaccacctccagtgacacagtcttcttcctcttcttctatgaatttaatgtccattggctcatttagaaggcttgacgaaactatggctacagaaattgagagcttaaggtaagcttttttctttctttctttcgcaaacaaccaatcatttctaaccttaattatttttagttacttgcattgttgattgattgtttcagcttatcaagccttgaatccatgagaaatgtgatggatcttgtgaatgacatggttcaagccgttaatccttctgataaatcagtatgtgtggaattaatcactctgtttcaacaatacttaaatctctctaataatatctctggtttggtaaaatatatcatttttcatatgcaggccttaaaagatgagctaatagttgatctagtagagcagtgcagatctaatcagaagaaactaatccagatgctcactacaactgcgtctgtcttctccacctttctctactacatcttcttcttcttcagctttacttgttcttcttaccaataagacatctgttctgccttcttcttgcctgcagggacgaggatgttctggcacgtggtctcgagctgaatgactctttgcaggtagtgctcgctagacacgacgctattgcctctggcgtctctcttcctttgttgttgcaggccccagagccaagagagacaagctcttccctcaagacttgtggtgctgctgctcttgagtctgctgactctgagtcttcttcatcatcatcgagcagtgaaagtgaaacagatgaagtggaggatgttaaagatgactttatacagctagccaaaaggttaaccattcactcactaactcaaacacactagtaccttgccagtcacaaactagtttatagacgacattctcgaatttgcaggcatgctctattaaatgccctacacagcgatgaagaagaagaaacattgcttctaggcaacgacaatgaaaaaacagcagaagcagaagccaagacacagtgcaaagatctagctttgttcgacacaacaacaacaacaaccaccaagtcagagcaggatattattgaacttctcagcctaactctgtcaacaactgctctgccctccccacaaacgcaaccgcagacgcagcacccatcgttttttgctgatgataatattcttatgaacagctacgttgtcccctgggcacagtcccaagaagaaccacaagtcccaaaaatgactcagtttgctccatcaggacctcagtttcagccatggcctctgcagcagcaacaaccgtattcatacggttatcctcagccacaatggagcggtggccaagtaaacagtaatgacacaacattctggagccaaggaggcaatgagaatatggtctttgagagaaacttgcaagtctcaaactcatttcctgctagagccacgggcacatccggtgctgctactgcggctacagtggacaggcagccgtagaggccatatgttcctccatacaaattgtttgaagatcttaacgttttccggaacacagatgggggcgttaggagtagcaaataactatgttgtaattaggatataatacttccaaaagacattcaaattctattagaaattgacaaagataactaataagactttcaaagtgaggcaaaaatctttggaaacataatatatttgataaggaataaatagttgaagttgacacagaatgactactatttacaaagcatttacatgcgtaaattctatttggcaaagcctcctcaattagttttgcttggatcttctcatcggaggctagttaatcaattctataaataacacctaattttaccccaactccatattcactttgcatttgattaacttactagttgtcatgatctatcttggtaattgtgtgttgtggtgggtgtataaggagacgaaggagccagcagcccctgcggctaacaacatctggtaagggtgaaaggcgaggcaactgactgggccaatctgttggcccatgaaggaagtgtggtactttatgatcccaagttgctctcctttaaggctgaacacttttattagctgttttgctgacccgctcgctatgattggagcatgtctatgaacacccaatgctgtcagtgatcctctatgcgcgtctatagtcaggtatgtctcctttggtcttctcagatccagaaactgaatgtcacctgcttgtgatgcgctcacaatctgagacaacaaacatgtcaagtgagtaactaaatgccttttgtactgactggcgagaatcagagatttgggtgtgtaacctttgctggatcgagtccaggctgaaagctgagtccaactactttttctactcgctgatgaggccgagtggcgcacacaagactatacattggagaagtgagatttcttctactcttgaactaataatctttgttactatgtttaaaatccaaaggtgagagaattaaacaagctctctaaggtaacttacaagtcaggtgtgcgaacgtcgtagagtcttacagatccatccgcaaaaccagcagcaagttgactcccatgcacttgagaagccgactgcaaataaacacacacatacaaataaagagactcatcaagcaagatccgactagtccttgagatcctgtcttcatttagacgaaaagaagatctagatagtatctatttgtaacacagatatccaagtttgcatatgctggcttacaagggctgtgacgctgcacccggattcaaagggcatagatttgacgagctgttctttatccaggtcccaaaccatgattgataacgattccccagaaacatactgtagacaccaataatgcgtcaaatacaaagtagataagtttcacaactccaaatataaaatgatagcatgttgttaatggagtggccatataccaggtaacctgactgttgttgccagtccacgacagcgttcaggccacttgcaccaggcttctgaccttggattgacgaaaaccctgtgacaagtttttgtctaccctttgttgcgtagtctttccatatacggactgatccatcgcctacatgagatttcagaaccacaagtaagagcttttaacagccatactcaatcaataactaacttgcaaaagacgctctggaaagagttggaacattacaagaggcaacaagtagcagagagtcatcaagttcattgacaaggcagagatttgaaattcctttgtcaggaaaatcgttattgtcaaagccattaagaagagttgcttcctcgtaattccacaccctgacaggaaagacagctaaacttagagtccaagtgtccaacagaggcaattaagtcaaaaagcagtttttagatgaggtatttgagtgaatggaggatttcaagataaagcattttataaatgatggcactaaatagatagcactgattcaacatgtgtcgtcatctagaaatggttttacaacttcgtgcacctaaatacctggtgtaaaaaattagcttgtatttggccttacagggctaccgccaaccggattacatattgttggtttgaagtctataattttagttaaggtaagaaatttttgcatacctaatccgttcattctcatcggcagcaactacaataggagaaaaagggtgaaggagggccgtctttgttcccgtttcaaactttgtatcccaattagcaatcggaatattgctgagcccgcttattgctgatcgatgacaaaagaaggttgtgatacagttcaagtaactagtatagatatagaacaagacaaaagatacacagataaaaataacttacatgaatgctggcattttgcaatatgctccagcgaaaacttttttttttcttctctttgggctgctatctcttcattagcatctgctccgccaagaagaggtttggaaaagtgaccacagctccagttgtagatagttgattgtggaagcaaactccgttcagacccgcttacacctaaaatcggatcagccaatccagagtcgggagaacccagcagatgaggtcggagctctagcgaacaaactctcctcagtccagttaaatagcttgtttgcggagggcttaccggaggagtcctaaatgttaacggtaggtggcctgtcaacataaatttcatggttaagttacttagaagtttataatggacaaaaacttcaagattcacatcaaatgatgatttaaaaacactgcataaccaacttacctgtatgcatgtcaaaccaagaggatgagcgaactaggccagccagaggagtgtgagatgctgatgctgcttcacctggtcggccattggacttggagggtttcgcaacaatttgttcaatcccaataacagaaagcacacgccgcccaaggcttgcaatacgtggagatggatctttagctaaggtaaacatagctagaacactctgcgaatagatagcattatccagcggtcttggctgatggacaactccattgctgacaccatcatggatgattccaacatcagaatgcaaggaggagtcatcagctaatggagatccttgcattagcccggaaaaaggttcttggaggctgcttgagatccttccttcacgagccactggttggctatcagggctagctctagtcagagaacccatgtctgaagaagcaactattgaagtcccagagtcatgaaacttggccattgaagggagagaagttcgcagagaattttggggcttccagtatgaatctgcaactgactttagatgttgtttgtgtccaaaagcaaaccgtgcgagagctgtgagacaataacaacatgttgagactattcagaatatacaatccaagcattagtttcaagctttctaagcggaagagatattagttaaaaaggttattaattttagttaatatagacactagagatcatataatacgactaaacatgtagtttatttttcctttgaacttgatgacacatgatgcaaataatgctacaattaagcatgatgatcaaacgtcaacatgttttgcatacctacagcaacctctgttcggacaagcgggctcccatctgaaactacatctaagagactttttatgataatatcttcaactatattttcatcatcatcaaattcttcatcacaaacacctttaccagagtcaaacccaacatcaagtaaggtacccaaggcaaaaacagcagcagccctgacctgcaagagattggtgtggccagcaattagactgctatttcaaagcaaaaacaaatactgaaatcttataagttagctaagcttctggcgaagcaccacctctggttgggcctcggaaagcagaggtatcaacttctcagaagcatttgcctccctacccattatctgggcctccaaatagtcctcccacaactttccaagacaaagacaaagccattgtagaaacaatggttctggcggtggatcacatagttgggttgcttcgaggtgccccagacaaacagcaattaaattagcttcaagacatgattcttggcctcgtttgtagccatcgacaataacagccaaaataaacgcagccatagcacgttgttctgggaatgcatcagaactatctaaaaatcgaatgaaatatatgtggccccggtccttcacaagatcaacttgacaggactatataaaaaaaaaaaaaaaatctctcaaacgttagcaaaattcaaagaatgaaaacgagtagcacaatagaacaacgacaaagataaggaacatgtcccaatgtccacagattaggagcaagatgcccatagaaatgttagtcccaatttttatggcatttagaatttatcttaggaataattatatgaacaacatttatcttggtctttctcatcatgaagaaaacagagtcacgttaataatgcatccccaaaaggaagtagcagaggtataacaagaaacgaacaagcagagacatacgaaactgcatgtaccttatcaagtgctaggatctttgtccatatgaaaacaagaatctgccgtagctcaatagttgttgtttgcagcagcttcactacgcaaggatatattccaacagataaggcctataaaaatattcacatcaagtaaggacatcacacaagataacatgggagaggaaatgtctaagaacaagggaaaaacaggacttcaaggcattagaggtaccaaatcgacagcccaaggacccatatcaagaaatcttccaagaagcaccagagcacgataccgatggcactggctaagtaagacctgatacgaatcagattccaagtaagctaagatggtaggatatatatagatattagatggaagaggaagaatgaagccagtgattgctccctagatcatcaataagaaagaagcagtgtcgatgaatgacaaatagatatgaatagtttctcatggaccataagataggggccttcttttaaaacacaggaggggtaaatttagggttcaggtggcacctgaagaacaataggtaactgctctggtggcttcttatgctcagatccatgatccagccagacctcaaaagctgtcagttgctcagtgaaaaatgaacttggctagataaaggagagtaacaagcattatcaacaagacagacatcataccaaatcatacaattacaaggaaatataataatggacaaaacaaacctgaaactccgtatttgggtccagaaaaaattgaggaagctgagaaaggcagatttcagcagccatgtcccatgcatccctggaaaacagctattagcggaggtaaagagctcagacacacaattcatcaaaatgcaaactagggataacgtccaataccacatatgatgctgatgcgtaggaggtagcataggatgtgatattggggtacaatttccggaccgcattatcctctcagctagtaagaaatttcggaaaaggctagcaaccaacaagtcctgtctgaataatctctggaaaagttctgtggggtaaaactaacttcatgaggaatggagaaaacaaacaagaagtcaaacttgagagtttggtcttgatactattttttgtcaacaattttgcattgattcattagggggaaagtttgggaagtaccgcgtggaagcacattccaggcaatggtgtctgtgactgcagtgaagatccagttcaactctcctaacaatgttttacggtcattttggcgaccgggaattctatcaataagtgattcatctataaattctttcagaagagaacgtctgcagaacctgcaaagaaaagcctctgtgaaagctgaaagctaaacaaaactgcacagatccggatgaacataaatgaaaggcagataacctgaagaatagaaatgataggaaacatacaaaagaactgaaggcgtgcatttcaataagtaacatgggaggagaaggctatcaataggataataagatgacccaattagtctaagtagaactagttctcattctcaaccagtcacatccaacgttaaaattcaaaataattacgacaaaccatatgtaatcctaagtgtcctatgcaaactagtatggcagctgacaataaccatatatcctaattaagtcaactttctgggaattactgcatcaatcaaccttcaaaaaaaaaaacatatgcagtaaaacttgatccaactaaatttttttgatggaaaaagaccatgtttcagacagaagaagggtgacaccaagtacttgaaacaagacagagattagaagagaaatttaccatttcaatgcgatattaataggtgttgtgaggcaagaagtaaaaacgtcagctggaaattcaacactctgaggaagtgtctcatgtacatcacaagcagccagtagaatacagtccttcgggggtccagaagattccccctcgtgaagctatagtaaggagtgaaacaatttgatcatcatacgaaacaccaattgtaaaactcagcaggtatccacacaataagagtaatttgttacctcggcgaaggcattgaggatcaccctagcagcagagcagtcaaaaacgtaaatggtgggtgttttcaaccaggaatcaagctcgctgactggcaagggaatgtactgcgtaaaattctgcacacacaagatgaataggtggctgataacagacttctaagaacatggacaatgtagagagaaaggaaagaaaactgaccttattgtaaacccagatttcaccattaggtgtaggtttagggacaccatgcccgttatagtgaaacaaaactctctcagtctttgcatatttccggcaagacaagcagagcttcctgacatcgtcctttgtaggatccaattcgactttatatcgagcctgaaaataaaacatagaatacaaatgaagaggaagccaaacattcaacaaaggaaggagctggaaatgaagtaatcacccgagccagccatctctcgtactgaatgctcaagttttggccaatagcctcaagagctcttcttgggggaaacatagaaaaaggatctgcgagatcaaaacaaaagaagggaaaaatgattgcgggaaacattgaaataaaaaaagaagaagatgagagttaagtgaaagttgggacctatccagcattcgagtcttgcgcagggagaaatcttaataacatcagggggatcaacagtaatgtgcaaacacataactagagcaacacatcctgttttcatctgccattgaaaaagagtgagcaagaagagtacacaatctagtggcaacaaaatagattgggaggagaaactaactcgctctttaaggcgccatcttgggggttggacgatgtcggatgcgtcgtcgtgtctaaggtcacagagcacaagagtctgaggcaagtatgccatgcttgtggcggcggagaggttctcatagctgctacttgcgactctgggagaggcgatgatggacacacgggaatcatcgtgagcggaggaggcgcagttgtcgtcgtcgtcgtagaggtgattggtgacaacagtaacggaagattgagagagcctggagaccatcaagtcccctaatgccatccaaattgaacaatgagaaagcgaattcaatcagcaaagccactgttgtgcactgcagggagaatgagcggatgacgaagagataatccggtaaggacggagaagagcgaagcggaagccctaggaacaccggaggagatgaagagttagatggtggtgcacaaagagagaaatgtggagaaatgccaaattttgggattttgtcgtcagcagcaaaaaaaaaaaaaaaagaagaagaagaagaagatgaagaaacggaaagtcgtcaatgtgtgttgcgttttgtctcctcttctctcttttctcttttttttttttttttttaattaatgatagtaatatataccacctgggaaatcaacaaaatttgtttctttttcaatatacataaatttaaggaaaataatgttgcacatctatatttttatttcacctaaattacagcaaaattattcaacgatttcttttcattttattttgagattttggatttttatgtatttttaaaattaataaagagaaattcttcaaatttagggtttacttattttttcaataattctttatatatttgataaaattgaaagatgattagaaatgcctaaaagtaagattgagacgtcctgttcggagcttggactcgttgagtagagacatgggagctgagtttggtatgattgacttgacgccatggaagatcattcgcgattctcccccgaatattaacacatctcctgattctaatatcactccttgagcttcttctacgtctctcttctctccgtacaagaactctgcagaatcacctatggagaaggacactatcggcaaccctcttgctatactctcttcgctttcgtcacggtcctgccatagttatacgccaatacaaaacaacgcattattagtgtcaagagaacccttcaaagaggtttaaagtcaaactgcacaacacctgatggagaccaagtcttccagtttctgagtagaaattgactatgcaaatgtctggtgacatcactggaagtatcctctccgcatcttctgttcctgattctctatctatgagagcatgtgcctctcggatcgccttttctaccaagacattaaatgtgacagggatctctggtgctttactatcaatgtcagtgtttttcctgtatttagtctgaggatcccagtttcgcccaaggcacatcatttgcagatgaagctttgaaccaacactataccccggttggtaaaatcctgtgggcttaacaccaagttctcggcatgttttcacaatgtcaacctataagcatgtacaactctttactttactagagaaatatgtggattatgtgatcattttcacagttttttacctgtatatcaggcgtaaggaagtctttaagaagcaccattccaggccttataactttgtgtttattactaacttcaacagtttctctgtttgtttcatccgccaaaatccaatcttttatacttgtatcatttctttcgaggactgaagaacatatgtcgaaaggcggaggatcctttatcctctgaggactttgatccctactcttgaatccagaattcctgtgattcctaaccttgcggattttcaaattttgagattgtgaacttttactagaagaagaagggttggtagaatcaaaatgaaccatacttgttggagagccaataccagcgccaacctcaaaagttgtcccattggattcttcatgtaaaaaccgtgaagcccgtctcctcctcctattcttacatcccaaattcctctgcaaagacaaagcatccttaccgcttgtccagttttgaagctgtgaactttgacatggagtagaaggattggtagaaccaagataaaacttcttcgtcttagagccaccagtaagtggtggaaattgctcttcataatcattaagtgagtcaagcgatgcagtctgcttaacagaattaacataacgtgtcctttagataccgccacgattatgctttgatcataggaaaatcactgggagccaatggagagttcataatctctaaacaacagtacttgatatggtatgccactggaaattgaatataaactatgaaagcatgagagcatttttttccaatcaaattcatgcgatcagcggcatagtaaaaatggttcaaaatcagcgaaactaggttgaaagataatagtctagagaatgcgaaaacgatcactcacatgcgtctttgggatcggagagtgaggagaagaactcattatcgtcctactcgccgacggagagcacagccgaaggacgatctggtggcgggaagtaagatgaaacgagcgatggatagagttcaacatagtcgaagaagcctcgatttatcggcgacgacaagagacgcatcgtcttctacgccgtcggcgcagagccttctttctaattatatattgatcttcccgagaacacatcagtaatttcaaattacactattttaattacatgggcccatgggcctcgtaacatagatagcaagggtcttccacattaatttgtgggagcgaaatgagttttctacgcgcacgacaggcgggtgatgaacacgctcgaatggtagccgccgacaccttccttaacttattaactcaacatactttagtgtcaaatcttagtttatgtcagtattcaaacgtattgttacatctaacaggaaaaaggtaaattaaaatcttgactctaaaacctaccaggtaatatagaagaaagaaagatgtgtagattttatcttttaaaaatggaccaaatgattctgctatttcgagtgtgaggaggttgtagaaaaccaatcatattcgacaaaaaatcaattaagaagaaaccaaccaccaaaccccattcattaatttcctttgcttggaagacagctaaattaacaccaaagaaggcttgttcaaactcacagttacatttttacacggaaccatccatatacaaaaagacacacttgccaaaagctatacttaaattatcaaagttttagtcatgcactttaaaccaaagtgaatgcgacagttactataataatcttctgatcaatttacgtaactcttgtaactgttcattgctcttatttaacaaaaaggtaaacgtattatatgattcggagttgcattaccgacacaaactgattaaatattataataataagacgatggaacacaaaataaactaatatatgaaaaacattttataaaatttcaacgttttattttccaaattttgcagcggaattagcagaggaaacatctgcggattccgaagcaggaagtggattgtgatctctgaattgggtagtcagcagaagagtcgaaggatgaaaatcttcgcatgacattcctttctgtttgaaacttgaacagatcgtactcattttcgtcgatcaacactctctccgacagagatggtggtgatgaagccgacagtttcttagccttaccattgtgatcgcccgatagccagaagagccttgtcgggattagtgcgaggattttcttggtggactttttggaacggcggcggatttggtcgccggagaaagagaaatgagacggcggaggagtgagaggtggcagagtaggtagctcagaggaggggtgtttgggtgtgcctggatgagattcccattcgaaagggacggcaccggcggctccgtcgtagtagtagattctaaaggaaggacaagcagctgataccgacgaaaaacgttgtttggtcgacggtagcttaccggagaaggtggcggtgtcttgctttttcagtgagagtgaagctgcccgctcagatcccgcgtttggcattattgtcttgggagagtgagagagagagagggaaggaaagagagggagagatgtgtgcatgagacatatggagtcaatctatcatgtatatatgggtgcctggtgtctttggtacggtttttacttttgggcttatttgtttggctttggtgtctatagaaactatatattaaaagcaaaatgtaataattaatgatagtgaaataatagtttcaatagtgcggttaattagctctcatagttagaacttataaagatacatctcgaagtgtgttggtccaatcctacaaaggcaataaccactcgatggatatataaagtcatcacaacttattagacccttgaacactaagtaatgctaccgggtacaaaagaaaacactcacatatgaataatgaggagatctaaatacgtcatactcaaggcaagatatttgtatcacatgtatatagcaattaacgattcatccatgagaatatttacattacaagccaacatatacataacttcaacacaaacatgtcattgatgagtagattttattaagaaaggtgtggttattgtagaagcatttatttggagagtagataggaccattgatgaaaacaatatgaattgaataattggtttttatctgattaaattggaaaacagtgtatgactaaacgagccacgacccatgcattcctacatgtgctccacatacctccgagcattgctttccttagtatatacacactgatagaccccatggtcggtccattcttttgcattaatatctttcatgtgatattcatatactcgctcccctcatcagaatttacatctcttcgttaaaggttaaacaagaagacataattacattttcttccgtccattaaagaaaaatgagagattttttttttaaaaaattgaaggtctttaaagtattgagaaccgtgacctatttataaggtttaaaaccaacaaccaaatttctcatttgttgggttgtgaaagataatttggcgaatatcatacaaatgcgattaattacggtttaaacatctccattaaggtattgacagtatcaaaataaggagaagaaaatggaacaaacaattttgtccagaggtgtataaacttggagtatcatattcttatagcagatgaaataaaatactagttagtttatttgtttggaaaacaaaataggtaatgtgaatatagattttaaaagtaattttgatactacagccctttaattagattgaaaataataataataataaagaaaggaccaatcatatgtttgacaaaaaaaagggccaatcatataattctgttaccatggatctaaatgagaggagactcttgctttttcacaaaaaaaaagaaaaagagagagagagcagcaaccccagcagcatcgaagatcgtcgatcgtcgatcggttgctctctttcattaatcagatctaattgatacccaagcttcttcatcggaggccgtgtaagctagcttcttcttcttcatcttttcgtacacttatttgattgttgtttatgtatcgattctatggaataagagcttttagcacatattaatttgtccccagtctcgtcgtatatgcagacctatttagcgcttatggtttgatttagatctgtttaatttagcgtttcaacctaaaattgttgacaactcaaaatcggaatcccccaaaaagtgtctgttgacttatgaatatggccatctccaaatcggtttttgatccatcatcattaaatttggtaatatatagatctcacgaggaaacatgggcggtagatttggagtcctcctagtcctcttcctcttgagctggtcttgtcatgctacaaacccgattcttctcgaaccattcggtaagaacatttttgaaggcatctagagtctctcttgcacctgtttctaattcaaatttgttaaaatctgttcactggattatttgaatacgttacgttttcagaaagcattcaatctgatatagacatcctgatgtatgtttttttttttaattgggtttaagaagtttgctccatataatatttgtgttgatctcctatgtatgattgtttcgtttgcagaatcagctcatgatgacaaccaagtctgtgaactatgtgacaagtatgtcacgctagtcattgattaccttcaagactacgacaaccagaatgaactcgttgaggcccttcatatcagctgctctcagattcctcctctcaaaaaacaggtcttcattgagtccttggttgtttttgctttctctattccttttctcagacgtggttatatgttaactatgcccaactcatgtgtttgttgcagtgtctttcaatggtagatcattacacccaacttttcttcacacaagtctctactatcaaatcagaccaaatctgcaaacggcttaacctctgtcaagctgtgacaccggcctttgcctctcaagtccatcaaggaaactgcgaggcttgccgcgagactgtctctgaggttgtcaccaaactcaaggatcctgagactaaggtttgctcaaccttcattccttctattatcacatacctattctgtgtcgcaaaccttaggcttagcactaagaattatatcagttagagatatttattattgctgctgaagattgacttttgccttgtgaatgttgcagctgaagataattcggttacttctcaaggaatgcaagtcgcttaacaattaccaggacaaggtagctaactaataaagaatgcccgcaaagctctctctatttaagctgagttttgtgatacttttatggatcatcatcagataataacaatgtgtttgtttatgatggtgaatagtgcaagaagatggtattcgagtacgggcctctgatgcttacggatttgcagaagtttctggagaagaaagacgtgtgcactatcctccacgtctgtccaggtccagccacccaccgtgactacgttcctgcggtggagtcattggcagattcgtaaattcggccaccttggttttgtcgtcattcacactaataccatgccatgatcgtgatgctaatttaatttggtaacccggtggtcatgtaaatactgattgatatattaaaaacataactacacgattgatgattcttgtgtgatttgaaaagaacgctgtctaaaggcccattgtccatcgatgggcctttttgctaatttctacattgcccatgttgtgtagtctgattttcgctaaaacgttacgttgatgcgtgtactcaatcactcgcccaccattttcttctgtgaaacagttggcaaaagttaggggccgccaagctggtttaaactgacccacaagcgaataaatgtcagacacgtgtaaaggacaaagagagcaagtgtcaccgtatctataaaagctaacattagaggatattcttgcttacgtgtgacatcgtcactggtacatatcatctaaaggaatctttgatcaacactactctggaaaacaaattgtatactatttataaatctgttgactgtatgtatattcagaattatgtgattgattgactaaaagcgactgatttttaaccttttataatacaaacagaacagtgtacatatccaatgtagtgaaacaaatccttttattgggaaataaaattaattttgtaaatgaaaatttcgttaaaacaaaccttaatgcttatcgtatatttatttagcttgaaaactaaagaaaagatgtaaaaaaaaaagaactaagtttggttagtgtgtgtaatgacgatgaaagatgatgagaagtgataacttattttaagggctaagaacaacaacaaagttgattattagaagaaagaaataattaaaaagcaaattgcaaacagcgaaaagagagatgatgacaaaaaatggttagtaacggccaaaaggtaaacaggttggctgctctttgtttccattaaaattagtaaaaattccgagaatggcattttcgcaattcatagatatcatcaacttgtgtgtttgttggccgattataatataaaggaagggaaactcttcttctctttcttctcattttctctcaattcctcgcagctgaagctatttggcatatacttgtcttcgcttttcgtagctctttcgcgcataataataactgaggtaattgttcgattctggttcgcagcggattttgtcgatgctattgaggaatctagatttctgtgatggatagatataagacatatcttatgtctctgttccgattcgatctgtttgtttcgttcctagttcgatctacttagatttcgtcccatgtttatagctctcaatcgctttgaatcttgtctttagtgttcgattttctggtgtttaattaggagcaaactagataggccttctttgttgatcctgtcattaatggtttgctctctatgtttcaggttgttgtttaatcaagaagagtgtgcaaaaattggaaggccagggaatgcagaaacatgtatttgaaagctgaactcaattgctctacaccaccctctcagatcctttgtccctttgggcccttgttctccctcatcccttatgtggacacccattttctaaacccctgcttccacaccttccagccttcctctcacaatgctagaaaaaacgccacttggaagcatgatctttgcgaagacggttgatccgacactaacagcctcctcctgagttcctcctctaccctttatgttgtctgcgttttagtatattctagggtggtctttttatttagtggtattagtagtgctctaagctaaccagttagtcaatggagaagaaaggatctgtgttgatgctccgttatgaggttgggaagtttctcggtcaaggtacctttgctaaggtataccatgctaggcatttgaaaactggtgatagtgtagcgattaaggtcatcgacaaagaaagaatcctcaaagttggcatgaccgagcagattaagcgagagatctctgccatgagactcttgaggcatcccaacatcgttgagctccatgaagtcatggccaccaaatctaaaatctacttcgtcatggaacatgttaagggtggtgagctcttcaacaaagtgtcaactgggaagctgagagaagacgttgcgagaaagtactttcagcagcttgtacgcgctgttgacttctgtcacagccgtggagtatgccacagggacctgaagccggagaatctcttgttggatgagcatgggaatcttaagatctctgattttggtctcagcgctctttctgactctagaaggcaagacgggttgctgcatactacatgcgggacccctgcatatgttgcaccggaggtgataagcaggaacgggtatgatgggtttaaagcggatgtgtggtcctgtggagtgatattgttcgtcttgctcgctggatatcttcctttccgtgattccaatctgatggagctgtataagaagataggcaaagctgaagtcaagttccccaactggcttgctccgggggcaaagagattgctcaagaggatcttggatcctaaccccaacacaagggtatcaactgagaaaataatgaagagctcttggttccgtaaaggcctacaagaggaggtgaaagaatcagttgaggaagagacagaagtggacgcagaggcagagggaaacgcaagtgcagagaaggaaaagaagcggtgtatcaacctgaacgcgtttgagatcatatctctgtccacggggtttgatctctcgggactgttcgagaagggagaggagaaggaggagatgaggtttacatcaaacagagaggcatctgagataacagagaagctggtggagattgggaaggaccttaagatgaaagtgaggaagaaggaacacgaatggagggtgaaaatgtcggctgaggctacagtggtggaagcggaagtgtttgagattgcgccgagctatcacatggtggtgctaaagaagagcggtggagatactgctgagtataagagagtcatgaaggagagtataagaccggctttgatcgactttgtattagcttggcactgaaacatattctatcctttttatgtgtcttcttcttttagaatgtttttcttgttttgttttgccaatgtgtttagtttatgtattttctcttgagtctcatcttaagacgtgtttcgtatttttctaggtgtcagtgtaacaataataatatgtgaggaccaattatatagtttgagacaaaataagtagatttctttatcagataaaataaaataaattgagccttaatgaaataagccaatagaccgacaacggttttaggaagcattatactactattttgtagttatttcgtattattgtagtcttttggatgatctttttgtgtattaacaaagtcaaaacaaatttataatttaacttacgttacagaatttgttaatggtgtgttttcttcttctatttttttggtaagaaatggtgttaaaaaaatgagaaaaagaatccaatggtaagattagtgttcatacatgtattggaaaatgacaaagtgtctttattggttggatgattgtgattgggccaattcgagaagacgactaaaatggacaagctcattgaattcacggcctccagtggaccacgttggcccataatcggatatacaccatacatttatcagttggtcaaatcaaaaccttttatcatagagtgcagagtatatttttctaagggttttgcttaatccgctatcttttagtgggccaacaactacaaattggattgaaggagaaccaaggaaaccacccaatttaagactcttgtcttttcgtaatctaaccaacataacgtgctcgtcagatttttgcatttgtgtgtttcctacttttccttttatgctcaacaggataattagttacatataaccacaattaaggaattaattaaagcatattaagtgctttaaaagtgtacgatgtgattgtgtatatagtaaattggataatatatagatcgtggagcctacaattattgcattgaaaaggtgatatatatgttgattacagtaattataactgctgaagctgaaattaatggattatggatgattggattcaatgtggataccaagaaaagaaaatgattgatgagaattattggtgtatgatcttatatcacagccacatgcgataggattatataaagtccactagctatatatctattttaatagtatatttttacaatgatgtgataaggacaacctcttacttatcaaaaaggtgaaagtagatcagttgtgttagttcatggctcaaatcttgacacttctttttacataatgacaaaattaatagcagaagaagactgtgttttatgagttgttaaaaattacatctatatgtatgttaaatatcatgttgaatagttaactaatccttaagtaatggttaagttagagtgtcttgtacacatagcattacttcacatccacgatacgttactaatgtattatagtggccatttaaaacaagtaatacatttttttatattttatttttcatttatataaaatataattatgattacataacaagaagatacatacttgccaactaaaaattaagatttgtcgagaaatttcctgaataattatgtcagagatattctccgggtaaaaaaaaaagcaattacatataacccgggatatttttttttaattattatttggataatttatttgacagatacctaaactacgacgtcgtatgtacttgagttggttctgggtccgtttggtctgattcgtgcacaagctcgacgaagaaaggcctgagtgtatctgtccataaatctcgtccagatgcagcggctctttgtctcttcctcacctctatcataaccagctcgtccgttagctggtttatctcaaccaccattgcgaagttacctttttgcccctcgatcttcatcccccatgtttccttcttcgccaccgtcagattctccgccgacacgatctcctccagcctctccaccaccctctccgccgtccacgccgacacgaaccgttccactcggtcgtactttctggcgtctccgaaaagaccggagagattgaaccctggagatcctgagatgatgtcgaatgcgttcatcctccttgctcccatctcgctgtcggtctcgtccgccgggagtttcatatcggagtcctctagatggaatttagacatccgatcgtcgtagccctgtttgaaccatggatcgtggatgatctcttcgatagtgatcctcgtctgcggattcgtgtctaaaagccgagtcagcagtcgccggagatccggtgaggtccacttgggaatgcgaaattctcccttgtagattttccggtacataaccatgagattatggtcgttgaaagggagataaccggcgttgaggacgaacagtatgattccacatgaccatatgtcgattttagcaccgtcgtaccctttcttcgccaaaacctcaggcgccacgtacgccggcgtaccacagagtgtgtggaggaggccgtcgggtcggatctgatcggtaagagcgctgagtccgaaatcagagatcttcaaatcgagcttctcgtcgaggaggagattctccggtttgagatcacggtgaaagatgccgcgggagtggcaatatccgacggcggagatgagctgctggaaataacgacggctaagatcctcgcagaacctgcccttggagactttggcgaatagctcaccgcccttggcgaattccatgacgaagaagatcttggatttggtggcgaggacctcgaacaggcgcacgatagaagggtggcgcagacggtgcatgatagcgatctctctctgaatgttgccattgagtcctcctttctgcagccgttgcttgctcaccactttgatcgcaacgctctgacccgtcgctgtgctcctcccgtggtacactttcgcgaaggcgccgcatcccaccaattttccgacctcgtatttgccgaagagctgtccacggcggttctccggcggaaattccaccgggtcagaatctaccattaaaaacagaatctgctaggtcaattatggtacacagaaactgaggtcattgcgaatgaatcaacgccgtagaaaaaaaagaaaagaagtctgagagagagagtgttgttattaatagaagaagcgaaaggaaaattagtagtttgaaaagtaaaaagatatgaacaaaagtaacagatatttagagagatctgttagcagagaaaacaaaagagagacagacaaattgggaggattcggataagagataagccatgctctgtatcgagttgttacatatatattactgtcttgaggtaggagatgagggtatttttgtcaattactatcagattctttttccttattttcttcttctttattttctttgtaaagacgtgggagattttctgttttgttttcttaatatatctattaaaaaaagaagaagaagaagatgaagatgtggacaagaagttgaattagaaccatacaggtgtcccgtcgctgttgtcgtgttgatttggtatctccgagggtttaggctgtagaatatactcatttcacacatatacgcttcgtcgtatcttcggctatttgctataatattattattacaagaacatataaacatgtttcctccaatattgttgaatattattattttatggtcaactcaaaacggagaattgttctttcgactagcctaggcagctagctctagttagttagtaattcagctaaccactgctttgtttagtcatcaatcgtggttaagtcctttgaacatccaaattccccttattagtattagttcaagtctcattttgagcaccaggctatatattgcggttgacaggttactacaactcccgccccactgctcaaggttggaatcgtcctataactagtgtcatttcctaatcttccttaatcttttcaaatcactatctaaactctacgttcatttttaattatgattcttatgtttatttttccactccatcactgttccaaataacttgaattatttatcaaatttaaacaatacttgggaaaatatatttcatgctttttgtatacatttcacagttgtttatttcactatttttagaaaatatatttgcttatgttggaatcattagttaatacatttggaaaacatatgtcattcctttttaaaaatctccagttgttttttcccatattcgtggaaaaataaatcgagtcttatgggcaaattgatctatttgatgctttttgaaaaaaagaaatatgactacatttaagatttcaattgattattttcaatatatgtttcacattataaagtacaaacagtgcgcttgaaaaaataacttttgcccaaaataaaaaagaaaaacaaatttgattaatatttaacattatctcattgtttttttttaatagttactattttcttacttagctaagttggaaagtcagtataattttataaagatgtattagttccatgtatgatcactacccacaatcacactaattatgtcccaattcctcagacttaaacatttgacgacttagaaatcatcgcattgcattgttagagtgcaaggcttttataatcttgtgaagttttggttaaagtttaataccaaaaaaaagaggataaattttgcagtgtcaatttttatagtaaatctacgacgtgatctacccaccgcagcgtacaacaaaatataaaatcaattttaattatttttgtaatttatccaaaacacacaacgttttaaagattagataaatcgtacgttactattttcgctgtcacgctgtgcccatttgtacatatatataaatccaagccacacataaattagtactatttttttttggtaggcataaattagtactacagtattcacataaaaccaaatcaacatcttttttaatatatataaatccattaaaagacatgtacgggaataaaataaaaataaattaccgcgttaataatgtgatgtacgaaagatttcatttgtttttaattttgattttttctgatgctgtttcatggaagcttctttcgttggggaaaaagagaaggaggaaggaaagaagctcgttaaataattacgaaatcaaggttctgtcaataaaaatggatggttatataattgccccttttctttcgttggttcgaaaggttgctccaatcaaaatatctactgattttgaatacattattaattgttgacaaacaaaataaaagaatacattattaatttagcttgttacttttggtcccatgcaagattaatgtgaccatataacccatttttacgacaaaatttaacgatataatatatatgaccataaataacttctgaagtaattaacaaaagaaaacataaataaaatgaattaaaaaaatggaatatacgaggtccatgttaatatgttataaacacgtttacaaaaaaaaaaaaaaaacgtaatgcaagaataaatgaaggctgcaggaagaaaaataaagggctttcgtgcagaagaaagaaacgtacgataacataactgatatctcccgtaagcattgtcttacgtttattaatggtctggcgactatataatttccattaattcaacatctaattacagtatttgtccgtccacgatatgcatgtattgatatttgatatcgtaaaaccagaattctttttttttttttttttttttgaataccaggaggttctgggtcgaagcccgtaattcctcagacccgaaaccacatcatgtaatattagtttcgttccaagcgtcactcgaaccgacgatctctaagcttcgcctagggtctttactaattgagctaacgacgcttgataaccagaattcttttgttaaactgtatttctggtatacatagatttacattcgtttcatcatgaagattaattacaaacacttaacggtcaaaacacacaacattctttttttctcgatcttaatagacacgcgtcttatgtctatacatatattattatcattagtgagtatagaaaaatctgaaaatgttctcgcttctattgcaggaagtagttttttgtatatatgattcatattctcacgacaagtttaatgttattacaattgcttaccgacaaatttattagtatttcataatatcgcatacgcagactagaataagaactaagggaaacgtcagtcagtagccaaaattttgtttaaataacgcgagaaaactgtttcaaagttatacgcagctgattaggtaagcagaaacctaaataaagattaaaacaaattaaattctgatgacatcgacggtttaaattttatggttaggctaagtcaattttctacaattcgtaaatattaaccacctactcctattaaatttggatagcaaatatacgaataaagaaagaaatggactccggccatagatttttcaattctttgcgcctcagtcataaaatcaattctttatcttaagattattgatggtaactcggtatggtgagaacgatctcttccgagttccgacaacattttctctaaatgggtttctttatttgttttaatagtaggagattagttgatcaaggaccacacatccaaggtccaaaaaggagagcccgcatcaattaaagtatcccatggggacacagggaacatgcatggttaggtttctgcatattctccgatccattccttgctttcgctatttacttatttctcaacatttattgttacaattattaattattcatttatttgtatcttttaacgtgtgccaagtaaattgattttgtgtccaggttcaagtgcaagaaatactagtataaaactaaataatgcttatatcatatgtttggtctgacgataccttgatggtgaaatctcttcgatatctggttcttattatgaaccattttcatatatattaaataaaaatcaatacatatatacacgttgaagtaatttttatatggacttaaagaattgtgtcgagtatgtggagtgagtcagcataagtcgggataattttgtctgcttcctcgcaaataattaaacggtgatgtgcatatttaactaactaaatgtatgtttttttatcatatagtttatgggcatcgcgtaatatacaaatcagatgacaacgctgaaggaggcactcattgatcgtgagattgcttactgttgaccaaaaaataagtgttagtgaattagaataatcttacgtaatgaagtccccacatacggtgatgtgagtatatatgaattgcaatagataataaagtaaatagtcgaagttaattatatacaacaaccaaaaaaaaataacgcaaagataattatatactacatttatgaaattccagcagaaacaaaaaaacatggtttcaaccttcaactgttaaaattattgatttaatcctacaatttcaggttcattgatccatcactactattatcaaatgttgattctgcactaaaaaaaaagattataaaccattaacccaaactttccctgggttgaaaagataaataatggaacaacgtgaataatctgtagaagtccatgatgtaatcattgatcaaacccgatcactacaggcttttcaaacacgtttaaggtagtaacaacaaattagtattttttaaaagattagacacaaattggctccgttacacagcctatgaagtatgaacagttccaagacatttagctgcagtatcaacaacactaattatatatcctcgaaaagcccaataaatgcttctatacatattaaatggcccaaagttctttgttcttgtatattattagccctcacgacggaactattaatcaatttaatctcataagaaagcccaaatgtattccctttattttattggcccaaatgctttgctatttatttttttgggtccgagatagaattcaataaactatttgtgttataataattattcagcctagtgttggatttagacccaaaacaaaaataacatcatccctaccaaaaatcataaacttagaataagaaattcaatgttcccatgtccaatagttttaataaaaacgtataagatgtgagttgatcgatataaaaaagcaatatagatattggaactttgtagacattattacaataattaatccaattttttaagtctgtacatcaaggcattgcgtatgagtggtgccattgcaatccatataagctacattctattgtttctcaattttcaactatttaaatagatacccaatagccattatattaaattgacactgagaagtgcgtgatgattcttgatttgttatgtggatcttttctttggttgacaacaacaacaagaaaaaaaaaaatttaaacaataatttttttgtgtaaaattttaaaaatgcaaacatctcataatttgctttaaagggaaactactcgtttaaaataaaaggaaaggtaactttggtaatggaaacattttgttatataatttgagaaatactactagtattcaataattcaccggaaagtggagagagccagcagagcagattcaattataaattatgaaaaaattagaatgattagttatgtgagtatatataatttaaatatattgaaaaagagaagacgagatcaattctctctaacaaacttgtaccaactgttgcattcttatgtcaccaaaacgaagaccttatcttcattcttacatttcttatatattgtaatcagtgttgctcgacaactcacgaggcgtgtaggcgtgtgttattctaaaaaactgtagttatggaagaaaatccaaagcagtcattagataaaactggttttagattaaaactaagctaagttatggcctatgggttagttgtgaaataaaaattgggtttggtctaatttcggccaaaaaaacattaccataagagaaaaagtcaaaagagaagggaatgtttgacctctcgcctctcgtgctcctctgtaaggcggctttgtcctctctgcgactgactgacttcttctgacggctccgtccaccgtcgtctcttcttccgttacgactttttcttccaattaaataactttaaccaaaggaaaatttgaaacgccagctcctctctccgtgtaacaaaccaacaactacaaccaacaagagcttagagctctctttctttctttcttcttccttttctcttttccattcctaaacaaaagtctttcttcctcatcaatggctgttactcttgattctccttctccggcgagaaaacgtcgccctttggtcgtcgggtcattcgaatctccgaagctttcttcagataccaaactgactcggtctctgtttctggcgtctcatgagatttcttctatgcagcctctcccattcattctccgacgcaattctctctccctcattcgcaaagtgaagatattagcttccgtcttcgatgagcttcttctccctcgttcccaacttgtcgtctactctcaatccgctcatctctgcttcgaagaaatgcaaatcgttatgcaacgtatcaagtctttgatcgatgactgttctcgtgttagcaaactctggctactcttgcagatcgacatcgttgccttcaactttcacgagcttgtcaccgatttatccaccgttcttgatattttaccgctccatgactttgacctcagcgacgacgcccaagatctcatctctctccttacaaaacaatgctccgattctgttcagttcgtcgacgcccgcgacgttgctctccgtcgtaaagtcaccgatacaatcgccgggatcaagcaccagatctcaccggatcactctactctcatcaagattttcaacgaccttggtttatccgattctgctagtttgaccgacgaaattcagagattggaagacgagattcaggatcagatcgacgacagatccaaatccgcagccgcctctcttatcggactcgtccgttactctaagtgcgtcttatacggtccctccacgccggctccagatttccgccgccaccaatccttatctgacgctaacatccccgcggatttccggtgtccgatcaccctcgagctgatgcgggatccggtggtggttgccaccggtcaaacatacgatagagagtccatcgatctttggatccaatcggggcataacacgtgtccgaaaacaggtcaagtcctcaaacacaccagcctcgtacctaaccgtgccttgaagaacctcatcgttttgtggtgccgcgatcagaagataccgttcgaattatacggtgacggcggcggagaacctgcgccgtgcaaggaggcggtggagtttacgaagatgatggtttcgtttctcatcgagaagctctccgtggcagattctaacggtgtcgtgttcgagctccgggcgctcgcaaagtcagatactgtggcccgagcctgcatagccgaggctggagccatacccaagctggttcgttatctagccacagagtgcccgagccttcagataaacgccgttacgacgatcctaaacctatccatcctggaacagaacaaaacgaggatcatggaaactgacggagctttaaacggcgtcatcgaggttcttcgttcgggtgccacgtgggaggctaaggctaacgcagccgcgacattgttcagtttggcgggcgtctcggcatacagaagaagactcgggagaaaagcacgtgtcgtaagcggattggttgacttggctaagcagggccccaccagctctaagagagacgcgctcgtggcgatcctaaacctggtggctgagagagagaacgtggggaggttcgttgaggctggggtaatgggagccgcaggagatgcattccaggagctaccggaggaagcggtggctgtcgtggaggcggtggtcaggaggggaggactcatggcggtttctgccgctttcagtttgattcgacttttgggggaggtgatgagagaaggagcggataccacaagggagagtgcggcggcaacgctggtcacgatgtgtcggaaaggagggtcggagctagtggcggagatggcggctattccagggatagagagggttatatgggagatgataggagctggaacggccaggggagggaggaaagcggcgtcattgatgagatatctaagacggtgggccgccggagatacccataacacggcggcggaaacgcagagcattgtagtgccaacgccaagtaggatttttagtccagttttatgatttttcatttttttgttttcccctcttcttcttgtgtaaagtttaaatgttttttttttctttcctgatgatttgaaaagaaattgattcttttacaaagtattaaaagctgcaattgtaaatgtaaattcgagaaaagaacgagagattttttcccttttactggatgaactttacacagtgttatgatgttgtttactaatctctcataactcataactagtgttttgacaggaactaataaaaatcttgaaagcatattagagttatcatatgtgtgtgaataaagagacaaaagaattggcacaaaatttcaacacaaaagacagagcaaatccacaagagatatacacacaagcatgttcctaaaggagtgatgatgattggaaatggaactgattgcaaatagcaacaatctttcttcctagagaagcaaacctttttgtttgttgtttttttacgttttggatctttcgaagcattaaataaaatatcttcttcttcctttccctcttttttaaacggttaattttattacagaactattacaaaaccagaaaacacatttgaggaaaagagtgacggtgttgagaatttatgaagcggagtgagagacaagaaatatgttcaaaccaaagagtgaggttggagtttttcatcgaagcagagtagttgatgtttaaggaaaagctgttctgtaactttttacaaccatcagttaaccatggcagagaacaaatacatagagatgtaacgtgttattttttgtttgtttgtttaaacgtgtataaaatgaccatgaataagttggcaaatttgtgtctctgtaatattattatttttggtttcaatttgacagattctttagttggagtttaaaattgatgaagaggaaaatataagaggtgctatcgttaagtgaaactattgggccgaaaacatataggcccattttaaaattttggtttgttttgcaagagatcccagatctcgaagcgtgcgataatgtttgaaaaaagcaggtttctctcttctttatttgttgtcaaacccaaacacctacttacggaaactgtaacacaataaagtgagtgaccactttctttttttacactatcgatgatacaactttttaatatcatcgtggtgcacattttaaaaggattacaatgaccacgattaaactagtaattagtacatatacaaactagtaattactctattatttatttctttggtacgaacactacttgtgtattactattactaaaacatataataaaagtgtcagtgtcaaatgtcaatgtaatttaatttaggggaaaatgaaatggccaacataatctaacacaaaatcaatgaaaatggagagagcatctcactcaccttataataacctttatattttccacgtatgtgggccccctcacataaacctctctttcctttataaattctccactcttcacactctcacttttgttcatgtaccaaagaagtccccaacaaacacaaaataatcaacagagagagtcagagagataatgggtaataactatcggtttaagctatcggagttaatccctaacgcttggttttacaaacttagagacatgtccaaatccaagaagaagaatcttcagagccaaccaaatagcaccacctccaagaagaaacaccacgcagtccctactcctacgtccacaacgccactcagtcctaggcctcctaggcgcccttctcactcttccaaagcgccaccctcccatcctcccaggaagtcctccgggaaccgtcttcgtcaccgagccaccgtcgactctaagtcttccacgacttccggcgacagcactaccacagaaacaggttctttctcaccggactttcgctcggatcaagttctcctccccgacgagtcattaacgggctcctggcacagcccttgcagctccaagttatccaaaaccgcaacctttacgccgccgccggaactcgaactccggcccatcattaccaaaacggccgccaccgcacggaaaacggcggtgaattctccggcgggggtgagacttagaatgcggtcgccgcggatctcggtgagcagcagcgcaagaagaagcgggtcgtcggctcggcggagcagggcggtggtgaaggcgtcggtggatccgaagagagactttaaggagtcgatggaggagatgatcgctgagaacaagataagagcgacaaaggatctagaggagcttttggcttgctatctctgtctcaattcagacgaatatcacgctattatcatcaatgtcttcaagcaaatctggcttgatcttaatcttccaccaccccattccaaataattttattattaagaaaaaaacatcttcttatatagtattaattactccttaataattaatcgctctactgaataaaaatgtaaatatatatgatgttgatgatgatgattcttgtactaactatatttatatgtaataatggtctagagagagcctacagtcttgtacttgcataacggccatcgttgatgatatcaagtacaggaattttctatccggattggtactcttctacgaatcttactttgcacggacaagcaagtgttactttaaatcaaattttgaatgtggacgactataaacctacttttgcgtcatcaatcatactatatatacagctcactcttcaagtctaaattttttaaaagagatttaaaaatgattggaaactcattcattgtgatcatgagttagcaagtgttcatgttgacaacaattactctgcatcacgttatagactaagactaatagtgaacgttttatatttagtgtatccattatattagacctacgatgccgacaactcattaaaacagcatctgcgcctattttcagacctaactttggatatgtgtgtacgtgtgcatttctcaatttcacacacatctatatttatttatttatatgtgtagttaactttttaaaaaataaaaaaaaattgaccacgacgtattgttttgtataatatttatatgtatatgcatgcagtgcataacacatacaaacagtgcgacaagcaagaagaaaacaaaacatttttacttttaggcatataagtgccaaagaaaacaaaaaatccaattggctgttttttatttatttatatcagtgatgggtgacaaatgacgagaatatataggaaaaggtaacatatcggaaaaaaaaaaattatatgaatatatgtagatattatagtaaaataaaataaaattagtgatgaatggttcttactggcaaacttttgcttctgtgttttatggttgtatcgttatcatgatattgatgtcattttgttttatgtaaatcttccatgagattttggtttaatagagttaaacatcaatcttaaaagaaaattgtggaattcttaaaatataaaaataggaactgaaaaggaatctcacgcgacattaaactgacaaagcatattttaggttttatgggtttccaaggaaagaagcagattacaaaacgaaacttgctcgttgatttctcaccgttataaaataaataaataaaaacatatactgtattatcaaactcctcaataattttttttgccaagattactcttagatccttaggtattgttgtaatatctttacatttcattttcaatgaaattaacattcatagaaaaaaaagaaaaaactgtatatcatgaagattatattcaattataaatgttcacattcaaactagactaataattagtagatatgagtaaatttagaattatgtggtaagatttctattgaaatacattacaaaacatcaacctatatattgaataataataataataaatcatatacgtgtgcggagttaagtactgttgcacaaaagtgaatattacactgactgaagttcaaaacagggaccaaaaaaggtgaagtaaaaagtacccaaaatctatctctctttttttcgatacgataatacacactcatacaaaaaaaggttcaaaagctttgtcgggcacgccggccatggactacaacgaattttttgtaaaattgttaagaaaaattacaacaatacttttttatataaataaaaatataagtacaacaatactttaaattaaattgtttgatatcatcgcatggtagtaagagtacacaataataagtatgagacgtttatactcccagatttttaatttaagtttcttgcttaaaacatggacttgtgatgtacgggtacaaagacaacaatttacaaagatctgagatacctattagaaacaaattataaatgtataataatgtgtttctttactggtggtggccagtgtccgtgtgatgtacgggtacccccaccactatgaattttcaaaatcagcatttctaaatataatataatattgatatttggacttgactatacctatatcaacatacaattaatttacttgtttcccggtaaatagtatacttcgaaaataaaaccattccacaacgaaatgatgtgaaaactctcacttggacataaattatgatccctttgtaaaaaattaagaaagagtatcttgttagaactgcgacgtatcatagacgcgttttctatttggaatgatatataaaagttgtttttattcgtttgtctctccttacttatcactagcacatttttagataaagttgtaagtaatccacaaggcacaactttctttttccgtgaaatgtttttgtaagtagggccatttcataattacacaagatagagaagtacatgtcaacgaatttattatgttttatttttaacatataaaacaattagaattgtaaagtaaatagcaaccaagccgaatgttgcaaaaaagattgaggagtatatgacactgttaaaacggaactgtataaacctaaccgagtgacaaaaattatgtacattacatattatgatatgaagtgaaagaatcaaacccaaaactgaattggacaacgttaccgtggttatttggatgtaagctacgtacgaaccatctctgcattaaataaattggaagaagagttatatatagactagttatgtagaaattatacgtgttataataatttaagaagttgatcgagatttcgaagaagatgtaataatggcgaagaattgtcggtgagccgcaagtggagactcggtcaacgaccatttaactgaacttgccttgcgcgcgatccgacattatcaccggagattctgcgtcttgtgacctttgtctctccgccgtccatattttcattttgaatcaaataaaacaagtacacgacacaccaaaaacaaaactactattacattgggttttcgttttgcaagaaagtcaccgaggttcacagtttctcagtgaatttagtcgagcggttttttttggctattgatgatggtacatggcgtgctgagttattagtatacctacaaaacattttcttttttgaacaaaacaagtttgaaataccattttttaaattgttttgtcttcatatcgttaattgggatgattgaaatcagttaccgtttgtatgacttggcaaacattaagccgtacctagcaaacattatgtgtgtccttttcgggtcctaataatcactgcatgaattattattcttatactactctttatatatcaattaaaggatgaggccgaaggcaaaatcgagttaccactttgcacgtgttacggacttcgtgcatttcacatcagaacttttttttctcctctttattcatcgcacaacagtttaacaagtttatgacatctaatgcaagagtaacagaaacaacaaaacagaggccattttgtattatgttatttattattttacctatcatcgctgcgtcaattgtcaaatctctttatgggatttgactcttgcgtgaaataaaaccacattttagtatttttttcgtttttatttggataaagacaatttacacaacccgtctgtgcccatcactcttatagattgtttttttcccctttttaagttagtcgaagaattatgtgccaaaaatcaatacatcttttgtgtggatataaatcagtttatattataagtcggaaatttcaaagacttaaaaatttttagaaggtccgagaactcgccattgacccaaaatttatttggtccttaaagttgttaaactctgaaatcagttttacgctcatatatttcattttgtatatgcaaatttaaattgcatctaaattactgaaatattgttatgcatgcaaacaacgttggtatttggtagccataaatattagctgttttgtatttttaggtgttatatacatattacatagccttaaaagtagttatacttaaggatatttttcgccaccgtattgtttaataatattaaaaattcgtataatgcacgtgtctttggtacgtccatgcaaaacttgtaatgcgagacgacgaagacagacgacacgaggaacaaccaacgctacatgaactggaccacttttttaatttaaagtataaaatcaatgtcgtttgttgttttgtgtttctgtttcaacaccgtaaactaaaagttttaaaacattttcatacagtaaattaatgttcttctttaacagaaactaagttaatttttccttttaacagaaaacagaataagttacccttctacccaaaaaaataataacttttcaaagaattccattatgagttataattccattaaatttaatatgataatggaacccacattattgaattaagttaaaaaacacgtatgaataactttttcttactatgaacaccctcacttttatataaagacaccaaatccttccatcgtagattcatttcggtccgctagcattctcgttcaattagtagtcaaccagtaacaaaagtaataaatccgtttttacgtgagacattgcagagcttagaaataagagaatatcattatctatgtttagaagtttcaattcgaaagtaaaatgaggtagtgtaatatgcaagagacatgaactactcattcactaataaccaaataatctcgaggataaccatgaaaattaacaccaaaatcattacaattgtaatttacgtatttagttttcatagcaaattttgaaacttgtgattttgaaaattttatgtttggaatgacattttggtacattatattggataactatttgtcttttgtaggtgtttttaagaacagatacatatacaaagattttgttgtttattttctggttcaaccaacacctttagaatatataaaatcattagtggaattttttgctgcctagttattcaatcattagttgaacaaccggcccatatctctccgcattaagcaagattttataaagcaaatgtgccatttaattctatactaaagcattcggattaccatcgaatgattattttatacagcagtggaattcacatttttcttttctttctgtaatttcgattaacagttatatacgtatatatagtgccatcaccacctcataattttatatcgttaaacaaaaaataatttacacgttttcacctgataattacttaacggtttaaaaatgtataaatagtaacatatactattatcaacaatagttagctaggaaaataatggcgtaaagaccaagtggatgatatatctttgttttaaccacaacagtctcatattccgcaacgaccaatcatttatggaaacaaacaaacatcaaatcactcttttcaaaaagattgtgaataccattcagatcaaatatattagatagattaattaataacttagccacagtgacgtacaaaagactttcaaaacggtggtagtaaactgcctttttaactgcgacaaagaagaggttatgcataccaatattattttaccatccttaaaatccaaaacttctccttttaaggtggtgtgtatatatatatatgattagtcgataaacattgcctagattatccaactcatgatgatctagtagttgaaatactagaattcaaatctttctctgcaatggttagctactacgattgccaaaaaaagccaaatttcccacatgtcttagagatcaaattagtaaagactttgatataaaattcttatggtaatatacttatatcaaacgtataggtagattaattttgttttttttttaaaaaataacaataataattttgttcataaaattgttgttaaaaaaaaaatatactctaattttttataaccaaaaatgtaaagtagaaacgaattttaaaaagttggcttgtttgagttgtttatcttgtatatttggatttcactttggtgacccatgacttaagaaagtgaaatccaaatttgatattgggcctgttgtccattaaccgtagtagaataaattacacgcgtcttctaagtgatattttagttgtcgtcttaaatcattttttttttttgtcttcttcactgctatttaaaaacttcatgtcatgtacatatatgatatatgattggaaatatttgaatatgtgaagaatccacttcacacatggctactgttagagaagaaaatatgtgattataaaaagcctacgaatcatagagaagcaaatagaaataaggtagaatctcattaaataagactgaaagaagaaaaatatggtaaaccatacgtgcgtgtagtaggtagaagtaggacccgaaaacaaagcctcatgtctcataaactcatttgccaaactccaaaatataattccaccaccattgggggagctctctctcacctgcctaaaccggactccgatccggacatgtggtcgtctacattagacgttcttttgaagtagtataattttctacaataatagcttgttttgtagaaaaaataaataaaaaggttttgataaaatcatataaataaaacgtgctaaaaagaaaaagagaaaaacgacaaggaacaagaactagtaattaagtgtggacaaaagaaaaaaaaagacgaagaaaatgcatcaatcagataaaattgattcgaaaggaggcaagcacgacgacctactaaatagccagccacaaagcccatacttagccgagagccgagccgtgcatccattactcgagtaggacctaataagaatgtccaagtcggctgatttgacacgtgtcgtttaataatttggtatcgaaagacattactccctccaatttcaattattaattaagaaaagaagacaagaaaaagagagagagagaaactacttttgttttttttgggtaaacgtcttcgtcttcttcgtctctctttttttttttccattacttttcagaagattaaacattcctctcgccggagaactaactgctcgatagatagagatagagagagagctctgataactgccattctgtctctatctgcttcctctagatacacgttagtttttttttctttgaaaggggctaaatttcgtacacacgacctatttcttcttcttattggattttgtagagaaaactttattatataggtttctggggaatcttctgagccgtttagaacaaggatttaggcaaaaatatggtcagttagtttcttgtgctagcaattttgaatgggagattgcgacgacgacgactagtctctcctcgaatcagggtttatagttgttgttgatagagatattgaattggaaccaaaagaactcaatgatagagtagtgaattttggatgtagtgtttttctcatcaacggagtaataataacaataataatgagtagcgatgatacgattgaggagagtttgcttgtggatcccaaattgttgttcatcggctccaagattggtgaaggcgctcacggcaaagtctaccaaggaaggtatggtcgtcagattgttgcaatcaaagttgtcaaccggggctccaaacctgaccagcaatcttctctcgagagccgtttcgtccgtgaggtcaatatgatgtcccgcgttcaacaccataaccttgtcaaggtctctctccttctttcttctctttctttgctctcgatacttcttcttgaatacacaatatccatttggcagtttattggagcgtgcaaagatcctttaatggtaatagtaacagagcttctcccagggatgtctctccgtaaatatctcaccagcatccgtcctcagttgctccatctccctcttgctctctcctttgcccttgacatcgcccgtgccttgcactgcttacacgccaatggtatcattcacagagacctcaaacctggtactactcttctatccctgcttccttcctagcacaccttttatgttttaactactggactcataagttaaccaatgtcgcagacaacttattgctcacggagaatcacaaatccgtcaagcttgctgatttcgggcttgctagggaagaatccgtgactgagatgatgactgctgagactgggacttaccgttggatggctcctgaggtttttgcccgctctgtcattcttgtaaatcataccactatttgacattataaaaaagccatatatgcatgtcttgtgttcgtgtcatccgtagctctacagtacagtgaccctgcgtcaaggagagaagaagcattacaacaacaaagttgatgtctacagctttggaatcgtgctttgggagcttctcactaatcgtatgccattcgagggcatgtccaatctgcaagccgcctacgcagcagcattcaaggttcttcttcttcttcttctacttcccgtttctcccctgtgatcatggagttatttagaaataaacctcttttcttcttcttcttgttgaaaacattgcagcaggagaggcccgtaatgccagaggggatatctccgagtctggcgttcatagtgcagtcttgttgggtggaggacccaaacatgaggccaagcttcagtcaaattatcagactgctcaatgagttcctccttaccctgactcctccgcctcctcagcctctgcctgagactgccaccaacaggaccaatggccgagccatcactgagttctccatccgtccaaaagggaaatttgccttcattcgccagcttttcgctgccaagaggaacataaactcttaggtacaagaaggggtcttctttgtctttgccactgccactgctttggtggataaatgacattagcagagagagagaagtagaaagttagacttacttaaagtctatagcgtagttaagtactcaatcttcttcttgtcaagtgattaactggtagtatcacacgccaaactaattggttaaatgttataacttaaagcctatgttttatcctttatcaatacttgaaacaaaacttaggagatcaactaactatgtatattatcgattatataagttttatgtttttttggatattttctacaattgtgcattccataatgatcatatatagtgtatctaattttaaatattttattataaaatatttaaactatcttaccatgccgaagaaaagaaaacgaagaataaaaagtgaatttttttttttatcaacattagttatctttaaaataaaattatcactatattaaatgttaaaatatttattatcatttcacatctaaaatatatttttatattcgtaaattggtagtatctttacattttacacaactatatatgtatatttataatatttgtacaagtgattacctgtagattagtgtggctattaataagtttaacactacaatttttcttactttaaatattctaaccttttttcttgaaattgttttagtgtttaatacttttttagcctttaagtttttttttttttaaatggcgttgacatacatataaaaattaatattagtacatgtacagtatattgacaaactagaataattaaagcttaaaaaaatactataataaatgggttgaaatgacttgattgcttatttaagcaaaaacatatactttccatttcaataacacatccagctaagtaaaaataaatgtaacgtatctttgaatacagaaagaaaaaaacgaaatttcgatatttgaaatttaaaacaaaggatgagtaaatgcaacttgcttaatcttggtttactacagatacagaaacaactaagagtggacctgtgttttcctaactaatatacatcatcatattagtaatatataaagaaagtacaaatcgaaactgacagaaagttaagaaaatattaccaaataaggagattaattgataatctacgagtagatagaaaaggaaataaggaattgttaggattgcaaatgggaaagaagaaaagtgatgagaggcataaatcttgaggatgatatattaagaatcaaagacttaaggcaaaaaatagtgtcaataagccgtttccttgaatgttactttctgaacttgggattctctaccataattgtcaagattttctagacattaacgattagcaccctattgaacaataaatacaagcactcttgttcctttctcatctcatattcacacaaacacaaacccccaaaatcacttttgttccttggactatggaactaaacctctctacacccacatcatgttcctccagcagcatctcatcatcttcgcatgaggccatccctaggaccaagggtaaaacgaaagaggaggtcacggctgagccgtcgaaggagaatcagcagcggctagagttccgcttcctgttcaacgagagtagtacaagaaacgaggctaaagcgagggtgtttgcttgcaccttctgcaaaaaagagttctctacgtctcaagccttaggaggacatcagaacgctcacaagcaagagcgatcattggctaaaaggcgtaaagagatcgaaatcaactatcctgaactctccatctacagccagtacccgccaagtggactttccttcagcagcagctcctcgcagtatgatctcggggttcgttacaatcctaacattgctaaaactactaagccctatccgttcaacatcttcgcatgtcgatttggatacagagggggactaaatttccctcccatgtctcacctctcggttccaaagacagacgatttgtccataaacttgatttcaaatctagagggcagcattcacgaccaagccgtaaaaaaagatcaacctgaagctgatccttgcaaggattctgatatagacttgtcccttaagctatagaatgcatgttcttttttaggagagttaatttttactagtttgtccttgattctgcacttctttcttacattgtgtttttacatataatttttaagtgaagaaaaaagtgactttcatgaattccctggtcttctacttaaaacacaaaaaagtgtttgggtaattaacttctgaatttcaaattttataaaacgtatttgtgttgataacagcttatttgctaacttaatgataaataaagactacaatatatgagagagttataacccttttaatatttgaatttcaacagttaataatatcatttattaatttgattatgttcctcctattagcaaatatgcagaaagaaaacccgacatttatataaagccacaactactaaaacttgttagatgatctaattattgactcgacctccacaagactaaatttagagttgaagtttttggatatatatgtatacatatagagactagagagagtacatattaaaattcaaaaatgatatatttgtatatagaagattccaacctgaagatgaggatgcaagttggtggaagtgttgtgggatagaaattcagacagattttgtgatgtgagttaagtcttgttgtttaaaatattaagaaaaggtttccttagcgtgatctctctcgaactaaacagcaagaagttacaatgctaccaaaggacgcaatgagctaggtcaactcaagctcctccaggatgaaactgaaagtgtacagagcaaagtcctctcttgggatttgagcttagtaggtgaaggttgcattcaattaccctcaactaatagcattcactcctcagcccccctcaaccacccaccctactctcttctctgaggttatataaacctcattctcactagcatactaagcataatagtacgcagagacaagagagagatagagagaaaagagagagatagagaaatgatgagagttgtgttaccactatgcctgcttcttgcttccatatttgcatggggttctgaagcagccatatcttgcaacgccgtacaggccaacctttacccgtgcgttgtgtacgtggtgcagggaggagccattccgtatagctgttgcaatggcatcaggatgctcagcaaacaggcaactagcgcatcagacaaacaaggtgtgtgtcgctgcatcaagtctgtggtgggaagagtgtcttactcgtcaatctatctcaagaaagctgctgctttgccaggcaagtgcggtgtcaaacttccttacaagatcgacccttccaccaactgcaacaggtaaacaacacacatgctttcacattttttaataaccaattcatccacattaatttatatattctctgttctaataagtcatctatctatacagcattaagtgagagaaataagttacgggaacgaccaagaataaaggacatgtatttcgtctaatgtaaccggagtttagtgcttttcagcttcttactaatatatgtgtaatgcaccaatcaaatataatctatagactatttatctacatctctttttccccttataagtcgcatcctttgtttctacggcaaattaagtcttgattgattttatttctttggaccttttggtagtttaatccaccaaccctacaagtacaaatacaagatactaaaacaaaaacagacaaaaaaaaattcaaccccatgaataaactaaaacaaactaagagtcccgcccacccgggcattgcggcgtcggggcaatagacatacacatggccgccaagggagtattatgggttgaatatgggccctggatttggatgtcaagtatttaagtgggcctcagacataacaaaaaaagaagagataatggcatgtgatgttatcattcactagattagtcatttatcacaataataaagtacacaatctagtcataagagtaataagatctcaccaaaacatcaacctcttggatggaaaatgagctagtacccaagaaacgtgggagttacaccaacctggttcgcttacataacttcttttatatataaagaaaccaataatggaaatgaggctgacgcaggcatatctgcgtatcatttgtaaatgtgagtgtagtgggcgttgttatgattcaccaaatagtttgttgccacttctgatgatttcatccttaaagattgtttcttctcagtgctctgttgttgtaatattcacctccttcttttcctttactttatattttacttcattttattcttcacttcatttttgatatatagagattacatgtacaaatcctgatccgagggacccaagacagttaattgaaaactgacgcatatatatacacaaacaaataaatgcaagtgacttatgtgtatatagattttcttgttagagacagacaaaaaatatcttccaagtgccaagaacagagtctgtagttgtcttattctcacttgtgaattgttattatttttctcccgtaactacatatcgatagattgttccacatatataataaatatatgatgccaagaaaacaaagaaaaaaaagaaagagaaaacagaaaaggaaggtccccacttttgtctaaaaagataaccacaaacctcagagacaatcaaagagacaaaagcagagtttaacttaaagagtcctgtcctcctcatcatcacgtctctcccgaacacaaattcaaaagaagacacaaatcgacgccggagactcatcggatgcatcgactgctactggaatcccacggcggcgggaacgagacgagcggaagcggcgggggagatgggtacacgagggacatgaacttcgacgcaaacatggtgatcatacttgcggctcttctctgcgcgctgatactagcgcttgggctgaattcgattctccggtgcgcgatgcgatgcggtttcgggttatcatcctctgcggcggcggggacggtggccgacagagctggattaaagaagagagaactgaagaagtttccagtagctgagtacgggtcgggggaagtgaagatagcggcgacggagtgcgcaatctgtctgggggaattcgcggacggcgagagagtgcgagtactgccgccgtgtaatcacagtttccacatgtcatgcatcgacacgtggcttgtctctcactcttcatgtcccaattgtcggcattcactcatcgaggtccacgtggcggggtctgagtgatttaattatcgtcgcgagggttaggttggcagtagtagtaatcataattagagtttaatgagtttatcattatcgtcataattaaattaataatatgggtagatagatagattattttctttagtcttcagttgtacttgtagtaatcagagatttattcagtgcgtatgttttagcagcatttatttatgtagaacacaacaacatcaggattgaggccgaatataattgggcctaatttcaatttatgttagtggaaaagcccatcttggtttttgttttgcttaggttatgtatgacgctgccctaattgacaagtgagagtgaatgagtgatgagtgatgagtgaagaagaagaagaagagcagaggaggaggttgggagtgggggtggtgtggaagcttaaagtatgtgtgagagccaaaggtttcagtttgaagctcaatatacggaacaagctctcgcttcatcgatggtcaatcctcttaagattccgaaagcatcatcatcatctcaaatccaaaccgtccgattgggtcagattccgacggagtctttttgctctcttccgtggacgaaaacagagggaagtggatacgaagaagaaactcatcaaattggttaggaatcgagcggtggtagtggcaaagaaagcaaaaggcgttggtgttgtggttactctcatcatcgtcgtcatcaattttctagtcccatggatcaacaagctgagcagcgaattagattgttatgaattgtttggtattaaataaaagcaacgatttcttcttctttgtccctctttcaacattcccatctgacctctgtgattgttggtgaaagaagtgattgggccaaagcgtcacatttctttaggctaccaggcccaaatattctgataattgttttattggaccaaattcggcccatttattgccggctaaacagaaaaggtgggaatatggacttgttttatctcccaacttagattgtcacaagactctattttagtggagagcagtgatataagatttgcaaagtcgtccagcgcttactaaattacaattgtttgaatcttctttgcattgacggcccaaaatgttgatgttgctccataatagtccatatccacattcattttcttattaaaatatataaaccgaagcctttttttttgtggaaatgtagccgaaggtgcttttaacagtggaagcaaaaaaagaggaacaacaaaagttgtaatggagtttaaattgtaaggtaaggaatattgtaatgtgctttttagtgtgtaaacgaggagtataaagggggagacagtagacacgacatgagaaaagcaaagacataataatgatattaaaatgagaaatgtgcctgaaatctgaatcgtctgtaatttacactgaagtaactttattttgagatacgtttctccggaccaccatgtgtgatgagtaatgtatatgcattgcatggcttaaatgaatgagagtgtatgctcattagctgacaaaagtaaaacttaaaagttttgggagtaatgaaaatgagaaatgagtatgtgtgtgggacactccataactatacaataatgaaagcattacagaaaaagctcatgcttggaccctttgtgactttcacttcacaatggtggacttctctttttcgctttatggaaaagaacaatcaaaaagcctctgagtaatgattattttgaaacataaattaaaatttgtgacagtgcgagactctgagtaatgcttagtgcgcttgactgactttatgccatttcaaatttttgtacagaatcatattgttttctattttgcatcatgcttactaaacagagattcaaataacacgtccaaaatagcaaaccgagaaaccttaacacaaaggctgcattgtagttatatgtataattgggagttctttgaccaacaatctttttagtgtaacagaagttgatcttttggatctactttatgaaccaaccttcaacattgtgaaacctagtgtgaagattcacaacttaacaacattgtgaactcacgagaaaaacttctttatagaaaagacgaacactatattatgataatatgaaaattgaacaaggaatgaagaaatacaaacaaggaggattgattcatctgtagttgactaatcactctaagtcatgagagggacattgtatgagctctaatatcttcaccacttcctccatctccggcctattcgacggcacttgggacccacacaccaaccctagtttaatcaccggtattgcctcctccgctggaaaattccctctcaaccgagggtcaacgcactcctccaccctcccttcttctaacccttctctcaccgtctcacacaagaccacgacgtcgtcctcagcgtactccacgggtctcttccctgtcaccacctccagcaccaggatcccaaacccgtaaacatcgcacctgtcggttatcttgactgtccggcatgcaaactccggggctgtgtaccccaacgcgctctgtaccttgccactcaagacgcacctgtccagcgccgaagccaacagtctggccagcccaaagtcagagactttagcctcccctgcggcgtcaatgagcacattcgttgctttcatgttgtagtgagtgatgttactgctatgcagaaaagccagacctcttgctatccctagaatgatactgaaacgttgacgccaagttaggcaaacgctctcatctccgtggagatgtctgtacaagcttccgcctgaaacaaactcgtggatcaagagctgcagcgattgcgtccagtagtacccttttatctccaccacattcttgtgcctcagcttcccgagttttctcatctctctctcgaactcctcctgcgactttattagacccgacactgtcagtttcttaactgccacaggacgcccatcctgaagactcgttttgtacaccacaccgaacccgcctcgtcccagctcgctgtccttgttgagcaacgcatcagcgccagtggtgtcaaacacgtccacttcccctgagaacatgaccagctttccaaactcttgatctttacttggcgaacagctgaacgtctctccaaccgacagagcgagagcagcagctgcatcgtgacgtgaaacactagatcgggcgtgcacgttgagcagagttacagccaccaccccgatggcaatgacggcagctgcgccaatggcaatgagcgcagatatgctcagaacgctcttcctgatctgccctgtgagagcaggaccatttgttggattggaggagttggggttgaggacgattggtttggggtggacagagagacatgagcggttaacgacggagccacaaagggatgggtttccggtgacagcagagagagggatggtgttgaagaaacctccagctggcagctcccctgtgatgttgttgtgggagatgttaaaggtcaagagatgcgaaagtttctctatttctttgggaagacttcccgagagattgtttctcgacagatcaatgtactcaaggttgctcagactgccaatgctccccggaatcgcaccggatagttcattctccgatagatttctgcatattactgctacattaatactgagagacgataaaacacacacagtgaattaacagaaagataacagattgagttgacttacattgtgtttaaagccgaacagttagagatctttgccggaatctggccggagaggcggtttctgtggagatgaagttgtttcagggagacggctcctccgatctcagaaggaagggttccgttgagaagattactactaagatcaagaatctcagcgactttcaatcctccaatgccggtgggtatggaaccgaagagagagttggtggacatattgagctgcaacaaacttgtgagaatccaaatgttagacggtaattcaccggtgaagccgtttgaagacagatcgaggacccggagaccttggaggaatccaacgatgggcataatggtgtcgttccctgatcttttgtggaggctaaatctggaaagcgaggaactttcagagtttccggtgaacatccacttaagcacatctccggtgaatgaattcttgctgacatcaatggagattaggttggagcagttggagagagtctgtgggagctctccagcgagcatgtttgcggatagattgagatccttcaaaaactcgagatttccgagggagaatgggacagtgccggtgaagttgttggcggagagatcaagaatctcgagagtggcaatgtcgccgatccaatcagggatttctccgatcagagagtttcctcgcagacggatggagctgcaagagcccaggcttttcatcgaatccggaagattcccggagaagtagttctcactcaagtcaagcgatttaagggaagagcatcgtccgatgtcggaaggaacgtcaccggaaaaccagttcctggataagttgatatgacggagatcgtagagaccgccgaggccatcggggatatctccttggaggaaattgtgagagaaatcaagggactttaagctcttgaggaaccagatatctcggggcaacctcccagagagttgattgcttgagaggttaagatgggtgagagtagaacagtagctgagggagacaggaatagaacctgtgagtttgttgttagccaaggaaacggacctcaaggacccgcattgctcgaagaacccgtctgggatccgacccgagagattattgccactgaaatcgacgacttggaggctgccgaggtgagggaactcggggtttagggttccggtgaggttgttgttggagaggaccaaggtgtggaggaactggagacggagaaggccacggccgatgtgaccggagagagagaaggcgtcaaggcggagctccgagacccgattggtggcagggtcgcatgtgcaaccgacccagttgcagggatcgtagtcttccgagttccaagaagagagcttagagagagggtcgtcgagtccggccttgaaaacgatgagacccaaaacgtcgtcgttgaatgtcggatctgccctcgctgaaacgacggcaaggaagaggaagagtagtgaaacggcgccgttgaacatttcctctcgcttttaaagatattaaggaggtaaaaagcgaagaaagaaggctagtcggccatggccatggatgatgatgcagagctcaagtaaggttttgatgcttgaggataactaaactgaccaaaaagcttttctttttaccggaaaagagctgcagttttaacatgagcacaagaaactgttattggagaaaaagaaagaagaggaagaagagtttgaaagggtttagaaaagagaaagagaaaacacaaaagcaggggaagagtaaaagggaaggtagagagcattaatggtggaattaagacagacaccaagaaaaaaaacagagaaaagtgagagagagagagagagagagagagagtaaagagaaaagggaagctccgggagatgagtttgaaagctcaaggattcaagtcgctctaggagacaatcttctcctctccccgctttttattactactttaatactttttcaaaaaaaaatataagtaataataaaaaaataaaaaaagagtctatcacgcttaaatgatctgatcatgtagatgagagatttgaagcagcagagacaaagaggatggagtagaagagaagtgatctctcccccgaagcctttcttgtcccttagcatgcattgctacgccatcatttcctttcttttattatacagataattacttaagtgattttagacgatccatctatgaagaagaaggtgtagagagagagagcttccacacctcaagcactactactcttagattagtcgtaccactcacgcatgtgtttactaatcttatgtcaattataaaaacatatgcatctcaatgcatcatgcatgtatagtttatataagattttcagtagaatcacttcattgaatgcacacagtggagaagtagcgtaaacggtgctcactccatctcacaaccttcccgttgacttacttaccttcactcctcttttcaatttgttcgtacgaatttttttatttattttgttggtttttatctgtgaatcatacaactagtttgatggaaactaactcctttattatcactcactaaaaaaaaaaaaaaaactcctttattatcactcactaaattaggggagattaaattaatagagaggcaaaaaaaagagggataatgactgatatgatcatttgaggataaaaaaaaaacatgcctaccaaacgatctcaagactctacctttgtttcattcccaagcaacaactcaccacttcccattattatgtttcacatgtaaaaaaaaaaaaaaaaaaacacttacattcatgatcccctactccctcgagtagaattgttttaatgtttttttcaaaaaaaaaaaaatctacttctaacttcttcttttttggttatgattaacacaaattcttagtaacaatgttttgttcaatatacagatattataaggacaactatcactcttcaactttaatttcaagttgaatgtattgtgaatcaagatgtgaccatcgtttctcaattcgatggaattgtttatccattgttaggtaggtatagaaattgtcttcttttcctataaaaactgtacacttaccaattttgtgtgtgtgtgtgtgtgtgtacgtggtgtttattataaatgagtatttgacacccaaagaaagaaaagaataacaaatatgtatggtttagcccaaactaatgatagacgtaaccaatatggttttatatgtaatgttaaatccctgtgcaccctgcattaaccatgtccatgccatcacaactgaccctatattctctgttctcatgacacacgacatgttaatttctaattttgggttaatgggcccagccacaaaacatattcaaagcttcgattgcccaagagttgaagttgtccaatagggagcaaatatatatctcccgcttccatttgcttgacgtaacaacagattttattctgacttgggcatgttcacctaattaatgggcttttttattctgaatatcaggcccatatttgactcctcaacttataagccttatttattatatgcatttaatttccatgtactgtcactgatcaagctcttatcaaacttttttttttgtttagtttttaaataccgtaaacacaaatcaaaattaacaaggttttaaatattttgaaataaataaataaaatatcaaatttaaatattttggtttctgtttaaatttgagcaaaaaatatatgcttcaaacatctaaaaagcgatattagaccatttattatggggtcaatatattgacattcttatatcatgcctttcatcctataaacattagtcaaagcataaaacggtcttaaaattaaaaatatataatactagataaggcccgcctaaataggcgggtgtaagatgtaaatgtaatttttatcgataatatttaaattttgaatagtaaaataataatcgatacattgttcttgatatataattttgaatagtaaaatagtagtcttatacattttattttgttatacccattcaatcttattgatgatatttgaagtataaatagtaacctacacacttttttttatattataatttagtatttagaagaaaaaataaatttttatcttatacattcaattttgtaatacaatttaactatctatttcataaaaaactcgattttaattctacacactttatcttacttgataatgatttcatgtcaaaatagtatatatatatgagatcaaatctatatcttagttaatattaaaaattattaacaattaacaaaacataattcataataataaaacatttgttaataccatatatattaaaaatttgaccaataacatatatatatatatatatatatttttgttaattttccttttggttaagaaaaataaaatataatattttttagatatagacatatgaattagtatatgttaataataatttattttttagttttctatttctttaagaagaaaaaagttaattgatttctttttacgtatttctatttctttaagaagaaaaaagttaattgttttcttacacatatcaacatctgatcgatagatttgacacgtggcataatcctatgagttagtaactttgaaaaccatactttatataataagattgtttttttgttaattttccttttggttaagaaaaataaaatataatattttttagatatagacatatgaattagtatatgttaataatgatttattttttagttttctatttccttaagaaaaaaaaagttaattgatttctttttaagtatttctatttctttgagaagaaaaaagttaattattttcttacacatgtcaacatctgatcgatagatttgacacgtgacataatcttatgagttagtaactttgaaaaccatactttatataataagatttttttttttgctaattttccttttggttaagaaaaataaaatgtaatattttttagatatagacatatgaattagtatatgttaataatgatttattttttagttttctatttctttaagaagaaaaaagttaattgatttctttttaagtatttctatttctttaagaagaaaaaaattaattattttcttacacatgtcaacatctgatcgatagatttgacacgtaacataatcatatgaattagtaactttgaaaaccatattttatataataagattgaatttaaataaaaacattgaaaaacataggttttaaaaaaaaaaatcaaattataaattgttattttccatatattttgggaatcaattatatgatatatatatagcatatatttatttgtttgaccagaagaacgatggagatggaacaaattagctacattgaatatatcatgtttaattagaatggtaaataatattacatactactattactgtacagtacgtcgattaattagaatggtaaattacgatccgctggccgaagaagtacggaagaaagtggaaacgattttgaccagaaaagtgagagccaagtgtgaatatcgcagtgtgtttatacttaaccaacccatcaattcaaatcaagaatgagactttatttttccacacggacgttgctttcactcttacctcttgttaacctaagcttttggagtcatcttatcttataaatacgactaaatttaaatatatgtctatagtataattatatataggaaattcacattaaacatacaagtacgtatcaatatgaaagtaaataaaaatgcattacacgtttataacgagactaacaagaaacttaagcctacactctctgtagtaccggagctaatgagcttgatattttttgctaactagcttgatattttcttaaggtcgtataatgtatattgtagctacgtacatatccttaagtaagaaagattcgtgtccatttacctgattaatttctccatgaagagtttaatatgcggcctatactttaaagttaattgtgtcatgaatcatgcattcgtcctgaatgattaacgtaccaaacagtattcgtcatcctaattttgtttttatagaattcttaaacagcatcaatctatgggttgggtacttgattaggataatcttaagtatccgttttattttatattgcatcatataggtacgctcacaatataattactaaacaagagggggaccatgacatgttaaatgttatattaaaataaaagaaatgagattcattatcaacatttgttttatgttttttcaaggagaactatattcttggctcatagaaatgagtaattattagtcaatagaaaggccctttttttaactctaaaggagatatagttttttttcttctttcctgattatatatgtatgattaatataaatgagttggttagtgagtacttagggcagaagggtcaagaaggtatctttatctttctgattagcttcaatggcaagttcatcattgacctgaccaacaatttcttgggtcgctactttttgaccctcgtgttagaattttgtacgaataaccggatatgcgttagcgattccggtctttcaatttgtttatataaaatcaataaatcaatatcgtattaaatcaataaatcaataccggattacatacaaatatattttaatttatatatacatttttgcagtcattttgtgaaataaatcatggagttggaacttacttacaatggctgtcactggcttttaattattgattttttttttttgcaataaattaattaacaaataaaaaacattccaaatatatttcaatctcatatatcacgcaaatttctccaaaatttgaactagatttcgataactatttaaaacaaaaaatatttgacagaccaaaatacaattgcaatcccttaaaatgagcaaaacacacctaaatacatttcttatcaattcactaaacttatttctccaaaatttgaactagatttcgacaactatttaaaacaaaaatttgtttgacaaactaaaatacaattgcaatcccataaaacatttattttcattatatatttaaattagcggtgtactgcgggttttttttataggacgggtttggcggaacgggtttggaaggacgttacttaataacaacagtaaactataaaataaaaataatttatagatagatataatttgcaaacttttatatatactgattttaaaaaataaattgtttctgcggtgtaccgctggttaaaatctagtttattgttatgatagaagtgacgaaaaacatgttatcctgcgtgccgatgaaacaaacagcttcaaaaatttgtgccaaacacaaactttagcaagttttttaaattaaaaaatcttgtttaaatttgtagttatgttactgtggcgaaactccggcggctgtagacagtggtccaacgagtgaaaaccctagctcaaacaaattttcgtttttttttttggtcctagtttgatatgtgtgctcggtcgctcgatgaagctcatagagacacgagcattgtctcatgcttaaatgcgtaccataagccacttgcaaagaatgattgtttctctggattcaaacattgggtactagctaggtactgttcaatgtagaataaatccaccaagtctagatctgcttcaacgtcaccctcttttcttataaaagagtagtatacatatattatcacataaatgtccgctgatggttgaaaggtactagaaaactttactcaaaggtttgtttatgaaagattcccgtatgtataaaattggaaaagctggcaacaacagtacaaccttcatgtattattgtaggttaatatgatgagtactcaaacaaaatcaccaagtagagattgaaacatattacatggagatgtataagactatatatatatatagaggtttttaggattaaagaagctatatatgtatgatgatagagctgagggatatagtgtcatgatgataagtcgtgagatgtccagaaaggattaaactcgaaagcctccacggcgagggcaacctcggacgacatccactgggatggagaccaatcttctgctatcaccggtttcatgtattcatctttgatgcgatcctgatgattctgatgttggcggaggttagaggtggaggaggagaagctgatgttggggtgaccgaatcggatcatgtgggatccctcgtgctcttcgaagtcagatgtgtcaatggggaaagttgcataagcttgatgaagctggcatatgtgctggccgaagtaagtggttgagtacaatggaggattgtgttggatcttttgaacctgcttctttgcttcacagttctggtccttggtgtaggcacacttgtagtaactcctttggtactcagattctttgatctgcttttgtccgtatttcctccagaggaagccgtcgtggtagatcggggttgaagattcgtgtctatggtagtctgagctctctgccatagatgtctttctgcaaccacatgagattcatgatggtgagcaatcactcaaagatagaacattttcaatttatgaatatgatgtttatattcataccttcccctcttgtgaagtggtttcctggagctctcaagcacaggagaagagtcctgaggagatgagttattggattgatcgtcttggtggtcattagtatcgatcaagatggagagcgcatctgagaaacaatggaggacggacttggccaaatcctccctttccatggacgagtctgactcggtctggtccatgatgagcagctggttggcgcacccatgcccgtgaagcaacttctccatagccttttgttggcaagagttcatctttttttgtttttttttgagtaaatacttataattattgctctgtgggtttattaagtttagagatgtgatccattgtgtctctctctctttagatatatatacgaataggtcgagaagacgagataatggtcttgttacgaagtttcgtacgtgtgagagagtttagtcaattactatacactccttcgttaacctctctatcggatgtactattacgtaattcgtattagcaatgtgcggattaataagtggcccctcgagaatataaagacaaaaaacaaacaaacaagtaggagtattactagttgacttacccaacaactcttctaattataaagttagttaatgaattatgtgtaaactcttatctaacaaccatgacttcttagatctctagtctctactacttaattaggttcgcatctccaaataatcagtaataagtactcctagaattaggaaaaaaccatcaaacaagattccatatatctatttgatgtcgtcgcgtaaaatcaactgaataaaaagtccgttttgttgtaaaattgagtaaactctcacaacggtggcggtgaacgtatataagtcatgtgacacggcacctgagaagatggaacggcgaataaacggccgtagaaaaaggaggaggcagccactttgaaaggcgagagagagcttcatcaagagtgacgtagggttcggtgacctcatcttaccttgatggcgtgacgtcatggatagttgaattatggatgacagataatgcactaatcaaatctaatctcatcaatccaacgatggatatcaactgcttcaaaagtatttctggttttgtaatataataagcgtaatccgcatgtgcttgtttagatgtctacttatgtttcttttcttatactaaattaatgtctagatctagtacgtaacagcttcaactttttatttctctcttacccttttcttcctttattagtataaattagtaaaataaccattacactaagctacataaatcataaattaaagtagcctttgtttctgcttcaatatcggcggctcagtttctttcaccttattaggttgcgactttaatttcctccatcactaatatgtaactttaattatactattgtttactggacttccctaaacttggtcgaatccggatttgagcctcccatttttatgtacgtttagataatagctgggataacatgatccctcaaatcacgatgcttgatgtaattttaaaaaaaaaatctcgaattctcgctgctatatgtacgtgttggtgttctatacggaccttaaatggttaactacatatataaagcagcattaatcaaataattcttcagaaatataacctgagtacttaaatatatcttaattatatggcagtaatacgcctcatccactagtttcggacgttaacacgcatgtgaactatcaacggtgtcagactccaacggccttactcttacccttattaggtaacgtgccctaacgttaagttttttttttctttccctaacgttaagctctctcacgttataatgtttattgcttaaccctagcttggatccaatcttctcacccaatatcgtccgctaaacgaaactataaagcacttttcttaacaattaacatttttttttgtcaacgtgcaaagtagtatttagatggtgaagtaataatacctacgcttcgtttatataggtaatcaccagtcaacagtcgacggtcaacccacaaaaaaatgtaaatataatcaaacaaataataaaattgagtttagtgcataaaatgtataagcacgataaaaactattgtaggtaattttgcaagtttatatatactaggtgagtaccaacgatacgcgtgggttgttgttttgaaaattgtttaaaaacaattatgtttaactatttttattgctaaattttgttattttcttatatgttattatgtaattaataaaattatattcattttatgtaattatatttgtatacttagattcacttttgattcaaaaatcaattatatttttttcatgtataaatcttcttatctatatacccaagattctaatcattttttaactatcatgaaatacttatatcctactatattatttgggaagtacattttaaatgtaaccttattttttgtaagtaattacataggtatgccattagaaagaaaatttaaaaagtaaattaattcatctcttcaaaaattaaaaagtaaaatactaatttaattaaaaaaaaaatacattattactttctaaaaaaataaccaattaaaatcaacaaattagatttgatatctaaattatcatattaatttttttattaattattatagttcacctctcatctttatatgattataattttgcgaaatatcatcgttataaacaaataattagattttttttgcatataccataatttgaatttttaaaaatgaatataaacttttcaatacataaaagaatattataacgggtcaaaaatagatttaagaaaactttctactgagtactgggtcataatttgaatatttatattcaatttcatattttatttttgaaattcataattttatatactacaataattaataacatattagattttttatgtgtatgatgtgattcaatttttaatacaagctggaaaatcctagaattgacaggtttagatcgatattaatatatacaagatggtatactaaaggtgaaactctaaaattaacaatcaaaatacaagtgtataattttaaacactaaacaatataaataatatcgacaaaacatatacaactcgcagtttactatacatttaaaatcaaataaaataatatcatatatttgtaattatctttacaataaaagtttttagtttaactaaaatataagcttacctgcggtatactgcaggttaaaattataaataggtagattaccatcacgatgtatgtaccttctcagatacacacctatcaaaaacttaaaacctttcaaaatctcttggtatattcaaattaagattcttcattcatggaatcattattccaagggttttgggatgtcttatgaataattttggcagaagaggatgtaaaattttttgaataaaaagtagtcagcaaaatatatgttttttggggagtttttagatcattaaatcagagaatagggctggcatatgagtaactcattcgagttcgggtagaacccgttcgggtttgggattaatgggtatattatttactacccaatagaataattctaaatatttggttctggtttgggtcgggtccatttgggtttgggtcagtttggataaaaagtttcatgccctaaaaatacccaaaaaatagaaacgggtatttgtttgtagatagagggtctccaaacaaaaaaagcttttaaatttgttaagttttcataaatttaattatatttgaatatattttactaaattttgacaaacagaacaaataatttttgaatagtttagttgttttggatatttaggtccaaaattaattgacatatttagatttataattataatcttagataattagattatattacgattaaatataattaatattttggatattaaattaatgtttgggtttttgaataccctttttgggtaacgggtaatttctggaccaatcagatatccacgggtttactaaaactctacccaataaggaaatttcctaaaattctaacccgccttaacccggttatttggttcggatatttgattggttatcgggtccgttttttcgtgagccctatcaaagataatctaatatagggtccaattaggtccacaaatataaccaaaatactatacaaagactaattataagttagcccaaaaattagatcttctaatacaagggaaacatgttttttaccaaagcaacttgtatacaaattttacacatttacttaaaactacatatgttgtatttattataaaaataatatttttaaacaaagtcaatctaatgtagcattatatgcaaatagtaaaaacattaaaaaatattatggcatcacttttatactatactatttcttatgtaattcaaacaaaatatacaatttaatttataaatgctcgtgctgtatagcacgggttatgatctagtcaactatatatgatacaatggtatgcaattatgttactttttggtttgaaagttgcttagattgattctaagcaaacaattttttgttccataaattctctcttatctagtatttcaatcacatcataataggctcatggctaaatattggattgacataatttgaataacaaatatataactaactactcatttgctttaaaagttttcatatgaaatagaaaaaagaaagcaaaaattaagtagtcttttataccattattaggtttctctctttgcatttgtatatagtcatattggagagagtgtcgtatattgaatttttcggtatatctaacgtctcaaaagactattacttaaaaaacatgcacaccattgttaatgttaccaatttatcataaaacacaaaaagaccatatcatataaaccaaaaaaatgtaataatacgaaacgactaagttaaaaattactgaactatgaatggtttagtagcaaacagctaagttgcaatacacaaaaatttctaatcgttatcgaataatgattattaaaaaagtagcaaaataagaaaagtaaaatgaaagtagtgtatgatacagtaacatgattttttgtattttctattttaaatgaagatatttagttaagagtgggattaatggaggatttaatgcaatgtgaaacttttaatttttatattactaagttttgttttttaaatgatattaatttagaatgacatgtgacactcattgatgtgatgatgtgttactcatatggagagaattgaccaattttcatatatatatatatatatatatatatatatatgatttgacgttacggaaaactatataatgtatgcggggcttgaatatattgaaataaatctgtcttggtcatttaaattttgcctgagtcctgacatgggcttagatgtagaaagggagaacagaagttggaataaatcacgtttatgaattcgattaatacataaatggtgtggatgaggtgtgttttgtcgtttctagtattcaacttgcgggttagatcttactttacattaataatatatcatatagtatttgtaattatttctttttaataaaaagataaaattaataatagaggcgatggagatggataatatagttgactgattgtttaatgttaactagcgttggggacagatggatccacacaactcgactcaaaaaattaatgcctggtttacgaacgtgtctttcttgacggaccccatgctttcattgtttggacatagatacttacttttgattccatattccaattttctaatctattagtaaatgattacgtttgtagaggtggtagctgatagatggcttcaaatgtttggggcaaacttaagtgaaaatatccaaattcaactggatagttttttaaaactgaaataggttttataattttcagaagaaggatcaacaataacgacatttgttttaatactatagagaagagagggagagatctaacacaaggtttctcaatttggtcttaactcttaactactagtattaaaatggtatgcgattaaataaactgctagttggataacaaaattagttgccgacaattaaatgaagggaatggtttctcaaatttggcaagtagagtgtttttatattatacccgtgtgggctaaacagaaaagaatgggcctatggatcaagagaaaagcccaattgtaacgagacattacaatatcaagatatgatgggttgggtatttgcgatgatcatatctctctccaacacattacttttggtcgagctttcttcttcaatgggcccattagcgatctcgacggagctttcttcatctggttgttcttcacctgcctgaaaaaggtcgagaaaaaacccataaatgaatgggaagaaagaaggaaagggagagtagtgttgaaacatttattacgaaggtgaagcgtctcatcttctcctgctgctccttggctctcagagatcggattggagaaatcttctgttgtccaaatcaaacggcaaattactttaaatactcttcataactaaaagaaagaagctactatatatgtttgctgcttacagaggaataggcgtggagctccttcaatcgaaagaggcgatcgacctggatttcaaggcttttctgtgtctctcctctctggagaagatggctcatgtgcagatccatggcttcatctctctcctttagcagcttctcagtgctctctcgatcctctctcagcctctcgagtttcttcttgaaggcactaagctcctccgcaagagaagcatcgattgatgtctcaagattcagattctccttgagcttctctgcagctttgggcttcacgaagaaagcatcctcctttggggtctggtagatgtttctcggctgcagtgcttttcgacctgaacatttcatttctttttgtgttttggatgatgaatgtttgagattgagagaaaagcaaagcaaagcaagcagagcaacttatctcaaaatgcttttttagaaccaaaaatgatgttcacaataagattatagaaaggagaggccatttcacacagaaagagaagaatcataagcaatacgacaagacaaaaaaagaaagagaaaaaaagaaactagccgttaagcgccgaatccaattcaaattcaaaataaatcttttttttttgttttttgtatagttaggaagtagttggtgaacaaaaaacgaaagtaaaacctcagggactgttacaaattaacattttaattggacataattgagattattgggctatattgggccactattgagatgattgggctatattgggccacttgatgtcactcatatgaatgacatgacgacatttggacataaaatgaaccaaccaaccaaaaaaaagaaagggagagcttcaaagagataagatggcctctcttctctctcccgccacccccaccgccacctccgccgcatttcattcctgctccaccgccggattctccactcccactcacatttcatcccagaacagcagcctgtccctcctcagccgccggggttgtatgatgagatgcagtttttctccgcaggacattcctgttgattccctctctcatctccctcctttccttgactttcagaactccctcgccacattttcggatacccagaaatgggggttctttgtctccgccggaatcgtctggttttacctcacggcgaggcctggtgttctcatcggcgccattgacgcctaccttctcgctcccctccagcttggcctcgacactctgattggaaggaggttgaagaggtccgatttcttggtcactgagaaactcggcgaaggctctttcggcgtcgtctatgccggcgtcctactccccaagaattctactcttgttgatgacgttagggttagcaaagcaagagctaaagcgatggactttaccggcgaattcaagcagagagtcatcctcaagaaggtaacccctgaaactgaagaaaactatttgttcaaataaaagactcatctttgatatcaaccaacgcaggtcaaggtgggagtacgaggggccgaggaatttggcgagtacgaagagtggttcaactaccgactctcaagggccgctcctgacacctgcgctgagtttctcggaagctttgtcgccgacaagaccaatactatgtttactaaaggcggcaaatggcttgtctggaggttcgaggtgtggtcttcttacttacccttacaatgaatctgctgtttatagttgcgatgatgatgatgaatgaaatgttttcttcaacagggagaccgtgatctcgctgattacatgaaagatcggagctttccttctaatttggagtccatcatgtttgggcgcgttctccaaggagtcgagtctgtgaaacgtcgtgcactgatcattaagcagattatgcgccagatcattacatctctcaggaaaatccatggcacgggcattgttcaccgggacgtgaagcctgccaacttggtggttacaaagaagggccagattaagctcatcgactttggtgccgctgctgatcttcgcattggcaagaattacatcccggaacgcactttactcgatcctgactactgtcctcctgagctctatgtcctcccggaggaaacgccaagccctcctccggagcctatagccgctttgctttccccgattctctggcaggtggttttcttattcttgtttgccttcttttttacttgagtctttgcctgatttggagtgctgattcttacagttgaacagtccggatctgtttgatatgtattctgctgggatagtgcttctccaaatggcggttccgaccttaagatctactgccggtctgaagaattttaatctggagatcaagtctgttgaatatgatcttaataggtggcgggaaaggactcggacgaggccagacttgagcatactagatctggactcgggcagagggtgggacctcgtcactaaactcatatccgagagaggttctctgagacgtggacgcctttcagcagctgctgctctcagacacccttattttttgttgggcggtgatcaagcggccgctgttctttcaaagctcagtttcagcaagtgactctgatttaaattcttatgatgtaaatgtacacaataacacgactctcttccttaaatatatttcttgtatattctctgcttcttgattcatgctcaaacgagtttcgttttgcgtgagcggttttgcatatcaaagtagccgtcatcaggtcagaggctgcagaagtatgtttgttttgatattgatctggaatctccctccaaggtttggtatgtttaaacaatcatcttgattctttacatatataatatttgttaaaaacttgtatacactgatctttgtattcacgcagttgtaattcacaaaagattgtgatacttaaagctcgtcgtgcgagaggagggcatcaagagcagtctgattctttttcttgcatccccatctgcatctccagctacacaaggagttgaagatggctagtcgctttgactgcagagatatgatttttgaagctgtgtgagctcttgtgaggtaaaccgcatagccgtcatccatgaactctgccccctgagggaagacctgccagaccagactcccggcaccagcccctcctttccttgttgagttgagggtcatcttgtacactgtgttcaacatcatgtcacggaaagacgtgttgaaaccagggtcatgtgcagacacaccaaactctgtgaacagaaccggcattcccaagtacatctctgcgtcctcaacatgagcttgcatccaagagcttgtgaattccaggaaagaatttgatactgccggagatatcctacagttcacaaattatttactgcatttttcagctgttctctgttttcagattcagggcagtctctgtttcttggtattttgcattaaaaaacataccaggaatctggatagacgtgaaccgaggcaaaatcaatgccaagaacctgattatttctgatgaagtcagttccgacttgtgcagcgtaggggttggggttgaatctggttctcgcaggggcagagggaccatagaagccttcaagtccgatctccaccaagtgtttagcgtctaagctcttcacaaacaccgccatttcttgtatccaagactggagtttgtcgccggaaggatcagaggggcaacgaggctcattcataagttcccaggcgaagattgtggggtcgttcttgtaagttatgtttgtgaaggtgttcactctattcagcactgtctgcaatgcaacacgttgaagttacaatttgtccctgatgggtaaataagcaatgagttttcgctgagatggatggaataatcacccggacatgggattggtagaagtttctgagggtggggttggtgaagaagtcgtcatcggaagtgagattaaggccggaggcgtttccccatttaacgtactgagctttgccgccataggcgtcccagttgttgaccaatgacagtataagcctgattttgtactttctggcctcgctcagcacgaagtcgagggcctgcccaattgctcaaaccttttaagtagtagaaaagtcttcaaggaagaagctttaggcgtagagatataccttgaagacctcttcatcgtaaacagagggagatttctggagagctctccattggccatcgttgaaagcccatgtcctgcctaccgtcattccaaccgcagaggcttgttggaacacttccgtcactttgcctctcgtggaattgtcagctgcaagagtcatcatccagtatgtgttgaagccattcacatagaatggttgtccatttagagtgaattgcatccctttcctctgcaccatctcccattgttcttctcctaccgattctgagttaaccctgcaaaagcagcctcaatctgtcattcttctctgcaagtaaataattccgtgaccaaataatcgtaatgttagtactcatgggactcgctgtccaagtctgcgagagctctgttttgagtcagaattatgaaaaccgcagaacagagcacaattctgaatccaagttggtccttcatttttcgttggtttatggatgagaacagattcctcttcatttggttgcatgtttaggtatatattcatatccacagagtcaataaaacatggacttgattatttaaataaaaaacattaacttacaaggcaagggaagcggtcctaggtttcagcccaaaagcaaagagatgaaacttgaagcacatgttggagagatattaatcagaggactggaatgtgagacaactccaaagtaacgtgtcactgccaagctaagattcgaagccaacccccactagagttagctgacatgtcatattcaatttttcttgcgcaagcttcggaccaacccatctttaaagtcatttcacaaatgcacaatgtgatctaaagcaaatcctctttaccgtgacaggaactagggaacttatgtttttgcattacgtgcatataaaatgacacgttactcttagcaaatttgcatcatttgcgttttgtctcagtaactgatcattaaagaacttccattaggcatacactagctaaagacatctcacaaacggtttcgagagttttagttcagccctacaacatctctcaggacgcgggaacttcttttttagagttgtagagaaaacgtcttctgatacaactgactaacaaagtcagaagaaatcactataaatcttacaatggaaccttgcccagcacgttgctcttgaatttccatatcttcatgagtttcttcacagtagatttggtatatcgactggtgctactaaaccacactgcacaagaacagactcaaatgagaccaatttatcctcatctttcccctgacctgaacgcagcaatcagatggttgcagagattattctacttaccgtctcacatctgagattgaaaagaccattgccctcctccgcgagagctgtgtcaggacttttgcagcagacgcagattacgaacgcatctaagacacaatgattttacatatcagacaagacacccaccactagaaaaacaaaaaaaaaatcaacaccggagactagttatggaattcaccaatgtatttccggaacacagcttgaaaatccttagaagacactaaacccttaatctctagccgctgctgtttgttcagcgatacttttgtctccatttgggcaagtaagaatttcatgacatgatctggcttcctatgcatcctgaaaaatgtatatttaaaagtgataaatggctcaataactacaagtagttaaagggaagatgagttagaattcgtacgttctgcagagatcagcaaagtttaaacaaacagttatcgtcccttctgcaaggagctgaggaggcatcatcactgttcttggcctctctgtagaaacctcgacatcttcctcacgaagcctatcaaacaccatactcaagagctgcagagcatagaaaagctcggatcacaaatgagaaccagtagcataactaaagaactctaattttagcgaaaagtacctctttgtagccataatctggctcaaatttccggctagattgacagtccggtaagttatcctctgttacgataacatcaataaaggacagtagcttcagacacaacatagatttgggtacgattaactgattatcttccaacgcaattctttgaaagctaattcattacccgtaaagtgtcctccattctggaagaagatgtcgtcttcgcgtatcagaggcttctgcttcttcttcttcttcttcttagaaggatcaaatttactgacctacatcagcataagctttagcaaaacggaacccgaagaaacggtgatataagaggtggagaagctgaagcatacccatgaagaatcgttatctataacctcgagttcaagtttccaacacgcctgcttttgctgtaaatccatcgtcgccggcgggtcgacaagtttcagcgttgatcggaggaaaattaaaaacgaaaccagggactgtgattgggcctgtattgggccttcagacattgatgttggtataacgaattttttttttttttttttgattcgaagtttggtattaacgatttttgaaaagaatatattacagtgtaactggaagatatctaattggttaaaaagtaagaaaggtggagtcaaagtatatgtatagagatttgtacatagatgcaatggttggagtcagcgaggagcgatgctgggaacaaagccgctgctgagatcgcttcctagaaggctcgacgactcgtaaaggtctcttgtcacattcgacgacgatgttgacagcactgacgaagatgacgccaattccactcttgtctccctatcgggggatgcttggagcagtgactccagctccttcaccacctccgccattcctggcctcatctctggtgagtcgtggctacacctcagtgccaaagccgcaaacttttcaacactttccatcgaccacggctccattctcttgtctatcagcgataccatcatatccctctgctcagccgtcttcacctctcgtactatattttttccatgggatatggcgtgcataccagtcagcagctccaagaacacaactccgatgctgtaaacatcgctcttgtccgtcagcttgtgtgtcaggaaatattcaggatccaggtacccctacaacattcaataaaactaagcaatgaatctcttgtgccaatatatgtttcacatcattcattttgatgactcactggagtcccacggacaacggttgagacgtgcttaggcacatcctcttcgtcctccaaaacaggagcaagtcgagacagtccaaagtctgcaactttggcattgaagttggggtcgaggaggatgttactggctttgatgtctcggtggaaaactggcgggttggcttctgtgtgaaggtagagaataccttttgctgctcccaacgcaacacgaatcctcatcccaaagctcaatgactccttccccttagctgcatcaccaaatattccatcaattgagaaaactaaatgacacacatccgaaaacgccccatgaatcattgtgaattactaccagacaaccagtcgcgcagggtgccatttgacataaattcgtacaccagcatctgcaaattcagcaacttcataagcaatttttatagacatccaactgataacaccttactcaggcggttctactgggtatcaagagagtacctgctcgctttcttcatcacagtaaccgatcagtgacacaagattccgatgatgcaacctcgagagcagctctatttcattcaagaactccttttcaccttgcaaagacccttcatctgctcgctttattgcagcaacagtattgtcagataagacacctctgtaaacctttccatagcctccgcgcccaaccaaagttgagctgctaaaatcgtcggtggcctctgctagctctttgaaactaaagcctcttatcccagaattcaacaaggaagccttcgaggctgacaaatacaaccagattcagttaaagttggttgtaaatttcagtgggataaattgggaatggaagatttggttacacttacatgaccgtcttctagatatctctcgctcgtgcttgctgtatcttctaagcaacaaggctgcaaccacagcggatatcgcaacagcagtcaccacagcccctgcagttattgctgccaatcgtcgccagctgacgcctttcctttcactgttgaagttaactgagaggagataaagaagactttcacttagctcttagcagtcagtctagatctacttgggtaaaaaacacttattaggctaaaaaggcacaccatatgaataaggcccctgcagagtgaagttgagcagttcatacgggccaaataagtcactaccaggaaatctccatgaagcgaatatgcctcggattctgagaacttcactctcgttaaatgttcttgtataggtttcattaactttcggaaaaagtttcagatacatcctcagacgaggccctttctcccattgatatgagtcgatccagagttgatatggttccatttgaaggaaatcggtaacatactcgccaaattgatcaatatatggagggaagtatgagaaactaggacttttgagacgatatccaattctaagaggcgctgcacaaaagcatcgtaatggggatgctggactgtattcgtagaagtcaggagtgggacaggcaagaggaggacagtccagtgcagaattggttgaattgtttggtagtgatatccactctttgcctttggactcacagaataggtttgcgtttgatatgcttccattagtgcagatcagattgccatcaagcctggagattaattaaactttctgtaataagcattcaagacagaaacaatgaaaaagctagccaaggtacacataccttaaagtgacattttgtggaggagttagatctccttgaacacgtgacagagaattattcctaagatcactgtaggaattgagagaaaacaggaaaattagagaagttgataaactgcaagtgaatgtaagtgaagtagggatacaatgactttacagtagaagtctagctttcttcggaaaagagatattcttccaaagggaatcagggacagatccagataacatattgtttttcagcaatctgcagaagatgagatttttatttgctaagtcaacattgctactcacaagcttattcattttggatataaagaaacataaacataaaaacttacagcatctgaagtaaagggagatctgagaagctctgcgggatggatccgttaagtatgttgtttgataaattactgtaaattaaccagtacaaaacccaaagcagtaaggtgtacgtctaaacgcaattgaaagtcggttaagaataaaggaaacataaataacaactgtaaaaagcatacatggttgtcacatccttagaaaaattagaggaaggtataggtcctgtgagttcattccagctaagatccctgtagcgaacaagaagcacaaacacattcacaacactggaaagagaatacatgcattgagattgatcagaacttacaagtatttgagatgacgtatcttgctaaaatcaggaagtgcccctttcaaactacaatttctaagactcctgtaagtacaaaaagacgaacaaacataataagttctctctataatcttctaaatgaaacaatcaaacaaggactttaaagataacagtggcctgaaacttacagctttagaatattcgaaaagtttccataggaagctgggatatcggatccactgaagttgttattatcaagttgcctgaaattgaggacaataaccataaatcaaacaaattacttgtagaacgaggtaaaacacacaatcgagaaacatacaggatttgcaggtttggcaatgcagagagttgtggtggaagatttccagataatttattgttgtctagcagcctgtaaaattagtttgacccctttaaccatcatgatgtaacaaatcatgggaacagtggcaacatcgtggcaatgactcacacatgaaagatgttagtaagattggaaagctcaactggaatctggccggtcaacgaattattgttgaagtgactgtacaaggccaaaagaaaaatatatgagatgatattgaaaaagctgcgtctcagtttgatatcactgtctggcttgatgttcagactcacagatgtttcacttttttcaagttggaaaaggactttggtattggtcctgtgatgttattctcatctatctggaacctgttcaagttcgaaagatacccgagttcgcttggtaaagtccctgaaagtttgtttccattcagcagcctgcccacaggttacagaatcagaagataaagaaaaggaacacacatgcttataaaaaattgttccatctagagcaatgattatttatcaggtaggtccaacttacaagagtaccagggatgatatctgtcctatctcgtttggaattgaaccacttatattattccacatgaaatctcttcatagatgccacacgaaagaaatattagacagtcagtagtgtaaccaaaatatagggcgttccaaaataaacactttgcaaagctttacatgttgaaacttacaatatttcgagatgagctaatttttggagctctggtgacaaagtcccggagagattcatattcatcagcaggctgcttggcaataaaaggaaggatcagggaaggaatatctggtcatgtaagcaactgttccgagaaaagagaaaaaaaaaagacaactgaaccagcttctcccaaaagtaaagccttttagttaactccagcatatatacaagcagactaacagcgaaagcaagaaggtacataagaagaaaaaaaagaagcaaattcatacagttctcggacatgcaggtagtcgtcagtaccaatctcattaaagcagataactccagtccaatttgatctgcaagggtcgcctctattccagtttctcaaataatctttagggtcaagtagacttcttttaacagatcgtaaagcagtgacttctgaagggtgggttctttgagcatcggcaagcagaaggacgcaacaacaggcaacaaggagcgcatgtagatagagtctttgagggaacaccatggtgcctttggaaagcgtaacagcgtaagaagcagataaatatagactgagaccaaatatccaagcgcacaaggagctcgtatttaagacagaaatagacacagcaggtctaaaattcaaccccacgcaattcaatagctcaaagacaagatcattacctcactattgagatcagcaatactagtactagttccctaagagaattttccaaaaaggcaagcggataagagaaagcttctgggatggcaaaatccctgaaacgggcgagagaagtcaaaatatgcagacggcaatgcagatcaaatcaaaacatcgggaaaatgatgcaattaatcgagagagaaaaggggggaagaaatgaccttgatgggtgtttgctaggtttgatcttgacttgtctgccattttaaaaagcttaaaccttcttccgtggtcataattcggaactgggttgactctacctacctgctccacaagtaccctcgtgtgtgtgagcctttttgaccaatagtaaagtagaaagtagaaagaaagaaacccctttagccattagcctgcatttattagtatcagcaacccaacattgacggcgtttcgagacgcgctcttgtccctttcttctcatgtcagtcaacttctttctttcttctcagtcagagtctcagagagagagagagatattttattcctccccaatggctgggggctgtagtcacgcatgttattttagtaggcttgcattaaagcccatttaggttataaggcccataatgtatttaataggctgcccatttagagaagactgtcgtcgcttcctttaagtcaaccaaccctttggattaaatccacaatgcaattcgtccaactaaaaaactctcaaccgttgatttgattcacacacagacgagacaagacaattccgtcccctctctctctctctttccgcagctcgccggatctcctttgtcttcttcccctgggttccgtttagctcaatccctttttaggaaagactccgtggctcgatcctagtcttggcgatcgcctctaccctttttgactctattcttcttcttcttcattcatttcccctcttattcattgcctttagggtttcttacacgatatgagctaaatacgattttgatttcaccctaagctttcttctattgcttctcgtcgttgcaggtactctttttttttgttttttggaaaacgcgttttctttccaccactgttagctaatcatcttcatatatgcttttagggttttcttaaatggaaacgcccggcgccagtcatgattcatttaggggttctcctcgtagaaactccatcctctctgcttctaacatcatccaggcccctatttctaccttgttagagtattcgggtctctttcgagctaggccaagtcctagtcatgaggctgagacgcttgttagtgatgattcttcaggactctccaatggggaggttgccattaggatcattggcaacaccgagcaggatgctgaaactgataccaatgctctgagggaacccggacactctgaactcttgggttcttctgctactcaggttgatcccatgggaggtgcttcagaaggtgcctctcaggctgctccaggtgatcctgctgctggagacgccgcttcccgggattcgccttaccaaagatatgatattcagcaggctgcacgctggattgagcaaattcttcccttttctttgcttctgttggttgtttttatccgccagcatttgcagggtactatttcatatctctctctctcgtgtcttttctgatgatttcctcctgctatttgacttttcctcctgctatctctctctcagggttctttgtcgccatttggattgctgctgtcatgttcaagtcaaatgatattctcaagaagcaaacagctttgaaggttttcttttgcttttacttgtttcttttcccattcaatgttcaaatgggtcagtcttaagtctcttttaatgatttcagggtgagaggcatatctcggcattaattggaatctctgtagcatttacggcccatgttgttggtgtttattggtggtttcggaaggatgacctcttgtatcccttaatcatgctgcctccaaagtccataccacctttctggcatgccatttttatcatagtggtgaatggtctgtactttctctcctatatttggtttcccttgctttaacgagtccactttcatcagctaacagttcatcagctatgcagtattcccaatatgattcgttgtagtatcctgttggatcatttggtgcttactcacttgtccctatattcctcagatacacttgtccggcaggcctcaatgattttcaagtgttttttgttgatgtactacaaaaacagtagggg

SEQ ID NO: 1395 - DNA, 87581 bp, Arabidopsis thaliana
aagctttacatgttgaaacttacaatatttcgagatgagctaatttttggagctctggtgacaaagtcccggagagattcatattcatcagcaggctgcttggcaataaaaggaaggatcagggaaggaatatctggtcatgtaagcaactgttccgagaaaagagaaaaaaaaaagacaactgaaccagcttctcccaaaagtaaagccttttagttaactccagcatatatacaagcagactaacagcgaaagcaagaaggtacataagaagaaaaaaaagaagcaaattcatacagttctcggacatgcaggtagtcgtcagtaccaatctcattaaagcagataactccagtccaatttgatctgcaagggtcgcctctattccagtttctcaaataatctttagggtcaagtagacttcttttaacagatcgtaaagcagtgacttctgaagggtgggttctttgagcatcggcaagcagaaggacgcaacaacaggcaacaaggagcgcatgtagatagagtctttgagggaacaccatggtgcctttggaaagcgtaacagcgtaagaagcagataaatatagactgagaccaaatatccaagcgcacaaggagctcgtatttaagacagaaatagacacagcaggtctaaaattcaaccccacgcaattcaatagctcaaagacaagatcattacctcactattgagatcagcaatactagtactagttccctaagagaattttccaaaaaggcaagcggataagagaaagcttctgggatggcaaaatccctgaaacgggcgagagaagtcaaaatatgcagacggcaatgcagatcaaatcaaaacatcgggaaaatgatgcaattaatcgagagagaaaaggggggaagaaatgaccttgatgggtgtttgctaggtttgatcttgacttgtctgccattttaaaaagcttaaaccttcttccgtggtcataattcggaactgggttgactctacctacctgctccacaagtaccctcgtgtgtgtgagcctttttgaccaatagtaaagtagaaagtagaaagaaagaaacccctttagccattagcctgcatttattagtatcagcaacccaacattgacggcgtttcgagacgcgctcttgtccctttcttctcatgtcagtcaacttctttctttcttctcagtcagagtctcagagagagagagagatattttattcctccccaatggctgggggctgtagtcacgcatgttattttagtaggcttgcattaaagcccatttaggttataaggcccataatgtatttaataggctgcccatttagagaagactgtcgtcgcttcctttaagtcaaccaaccctttggattaaatccacaatgcaattcgtccaactaaaaaactctcaaccgttgatttgattcacacacagacgagacaagacaattccgtcccctctctctctctctttccgcagctcgccggatctcctttgtcttcttcccctgggttccgtttagctcaatccctttttaggaaagactccgtggctcgatcctagtcttggcgatcgcctctaccctttttgactctattcttcttcttcttcattcatttcccctcttattcattgcctttagggtttcttacacgatatgagctaaatacgattttgatttcaccctaagctttcttctattgcttctcgtcgttgcaggtactctttttttttgttttttggaaaacgcgttttctttccaccactgttagctaatcatcttcatatatgcttttagggttttcttaaatggaaacgcccggcgccagtcatgattcatttaggggttctcctcgtagaaactccatcctctctgcttctaacatcatccaggcccctatttctaccttgttagagtattcgggtctctttcgagctaggccaagtcctagtcatgaggctgagacgcttgttagtgatgattcttcaggactctccaatggggaggttgccattaggatcattggcaacaccgagcaggatgctgaaactgataccaatgctctgagggaacccggacactctgaactcttgggttcttctgctactcaggttgatcccatgggaggtgcttcagaaggtgcctctcaggctgctccaggtgatcctgctgctggagacgccgcttcccgggattcgccttaccaaagatatgatattcagcaggctgcacgctggattgagcaaattcttcccttttctttgcttctgttggttgtttttatccgccagcatttgcagggtactatttcatatctctctctctcgtgtcttttctgatgatttcctcctgctatttgacttttcctcctgctatctctctctcagggttctttgtcgccatttggattgctgctgtcatgttcaagtcaaatgatattctcaagaagcaaacagctttgaaggttttcttttgcttttacttgtttcttttcccattcaatgttcaaatgggtcagtcttaagtctcttttaatgatttcagggtgagaggcatatctcggcattaattggaatctctgtagcatttacggcccatgttgttggtgtttattggtggtttcggaaggatgacctcttgtatcccttaatcatgctgcctccaaagtccataccacctttctggcatgccatttttatcatagtggtgaatggtctgtactttctctcctatatttggtttcccttgctttaacgagtccactttcatcagctaacagttcatcagctatgcagtattcccaatatgattcgttgtagtatcctgttggatcatttggtgcttactcacttgtccctatattcctcagatacacttgtccggcaggcctcaatgattttcaagtgttttttgttgatgtactacaaaaacagtaggggtcggaattatcgtaaacaggtgatgtagaaaaatattcttctctgtcccctttagctgtattcagtttcatttggcatggctcactgtggcgtctctgggatacataatttggttattcacttccaatgcagggtcaattgctaactttggttgaatatttcatgcttctgtatcgctctttactgcctacccctgtatggtaccgtttctttttgaacaaggattatggaagcctcttctcctctcttatgacgggattgtatcttacattcaagctcacttcagtagttgagaaggtaggtggctttctagaattattggacctccctttttttttttgtggaagctaagggaaattggcaatgagattcaggttcaatccttctttacggcattgaaggctttgtcacgtaaagaggtgcactacggatcatatgcaactacagagcaggtacaatttaactccttgcagattcgaatctaccttatgcctcttaaggtttaagcccacatgagcaaagaagtgtctttctaatgtgtgcaggtaaatgcagcaggcgacctgtgtgccatctgccaggagaagatgcacaccccaattcttcttcgctgcaaacacatgttttgcgaagattgcgtttcagagtggtgaggtgtttttgcatatagcaattatctttgtgtatgaatatcttgatgttgaaagaatgtgattatgactgggcaggtttgagagagagaggacgtgtcctttgtgcagggccttggtcaaaccagcagatctgaaatcattcggtgatggatccaccagcctcttcttccagattttctgattaaaacacatatacaagactgcaaagtaaaaaagaccctctagactcacttgctcactcgatagttttcttagagagtatttctatacaatgccattcaagctgtgaaagaaaccactgatgccttggaagatgttcatactatgtcatttgttaatatgaatgaaatcgccttttatattccgttgcaaaaaacaatctgatttcattcaagaagaaataattaataataatgaattcaagaaactgaaaccacacttgcacacacagagctctcttcagcaaccacaagcatctctttaatcatctcttgactaggaggagactgtgaacggtcagcgggtgaagaagtcatcaacgtcgatacgaaaggggaaacttgtgtcacctcttcactgccctcgtctatgtacacaacgtcctgcatcgtaagctggtggtattcaactatctccctcaagaaccggttttccctcgcatacacagaattttcatgagccaaccgtgctttctctgccagtaggctctccagctggagtcgaatctgatacaacagcatccacaccgagttgttagatggaatgcaacacacaaattagaacatgagctcagtcaaaagatttaccaaatcttcgtctgcagggttgcttcctttctcacggtggctctctctcagatgtttgttctcttcctcaagctgagcacaacgctctttcgcaaatgcaagatctgctttgacagttttcagctcacggaggagtagtttagctttagcagcagtggccatcgccacctgcagctcacagaagaaactatatatcaacgaagagagctatcgtacaaaaatcaccaaccaaccaagccatcgaaagactggaccttacatcgcgagatgccttgagttgagtttcatgttctatatgatttaactgcattggctgctctggagacttcttccatgagctactaactccataagattgattctgattctcatcttcaccaccagttcctcttcgtctggtttgaagttttcgtgtttcctggatgatatcagctgttttgttctcaacgagtgttcggccatcctagagaaacaaggaagcaattcaaccaaaagaatgaaaaagcggaacgatttagagagaaggaaggagaaacaacacctcaaaggctttttcaaaagtgtcaccgatctgattaagagaagatgtaagcttatccagccccctccgaagcttgggattgtccattttcttgaacccttcatctgataggtatgaaaaccgggactagaagagaaacaaagaccaaaaaaccatgacgacgtcaaagcaagaggatgatggatcatgagaatgtacttgagtcagatgagcaaaaacaaaacctgagaagctgttgtagagcgatcactagatttatcatcttcaataacagattttgctttctgggctatgactccccacaagccctttggctcggtcgtaaaattctgcagttatacatccccagaaaacataggatcaatggcagaagaaagatctcatgatcacaacttgtaacaaaaccactagattcgacctcacagctgaatctgatcagaaagtttagcattaacttaagacagtcaaaagtcgtcaaagattggtcactaaggatatcctaagagcggatcatgtaaatgcaaaaacataaagtggactctcagttgagataaaggagaaaccttagatctgggttggtcaaaagcaggggaggatcgagctggcggtgatctatccttgacggcggtgatgctttccgggggaagccgatcaacctcctccttgaaagtcgcaaactttccgatcccctgccttcttctatacgccatgatttaggttcaaagacgattgataaaaaaaaaaaaactgtatggacaaattgatggatgcggacccacgaggctctcgaaagaagccagtgagtgattatttattaatgtccaagacaactcgacagaatctgtgatattgtcctaaaaactaattagctttctatggagaacatcttcattcccaaacccagtacttccataccattccccaccatctcagacccatctgatacatcaatgaaagctctttgtgtgaaccatcattaagcttgagaataaaaatcatgtataagagttgccgactctacaccacatttctacaagttgggaaagatctctgcttaaaatgcaaccactttactagttgagttagcatggcttttgatgattcaccaacatacaatgtactatattatggatttgactggcggctcaacggaaactccatagtcttttctgcctctagacttgggcaatttcacagaagttgaagaccctcttcatgagtcggagactttggttccttttagtctagagataataaacgttaagaaaaaaggaaagaagatgagaaatgtctctcagctagacaagacccccatccgtcgtcgttgacccctttccgccataaaatcccaacacctgttttcttgcatcgaaaccatccccttgccttgtttgcttggacagatgactccttgctagttttttgaagatccggccgtatctcttcggtaatcttttctcttcatcctttttgttgttccttgtgattttcgagcaattggagattagtgtgggtgtatccggtctgatctaaccctccttggtcatgattttatatgtatgccccttttcagacctcaaagctgccgcctttggatccgatggaatcacaaggaccttctaatggtcatcccatggatatcagcagcaattcaatcccatcgtctgcctgtaatctgtgcggaagagtcgttcaatctgcttccgatgatcttgaaatcttcagcttatgtgtcgactgtaagtttttgttgcttgaagatttcggcactcccgcgcctcccttggctcggcggcagacaattaggaggaggaggatgaggaggaggagaagaacaactaggcacgacagctctgagtctgtcggtgtcggtgatctttcctcccaacaattcacacacttgataagcattgcaagacaaagcctttcaacggttcaagctagtgaggatctacgtgatgacctgcgaactagctcccataccactccaagcggctcgacaagatggagactcttctcagaatctgaaagtgatgattttgacaactttggcgaaaccgaatcaaacgctagctttagcctctacagatttccccatgctgataacgataccatttcttttagtgcttacggtggagagtctgatgcttccacggacaggcatgccgatatctttgttcaaccagatgacaggagcgacattgactttgacactgatatagacccgatgcgcgctggtcttaaccagtggaactcagacgaagaagacagggaatgggaggaaggagcgggtccttctggggttgcaggaacacgctatagaaactatttggcaagtccaagtgagagctacagctccatgactcggtttgattcacctgagttagagagaagctttcgtcaaagaattatagagaggaggcattcgttatctcgcaacatcttcactggtttggaggatttggacttctccccctatgctgcaaatgttggggattatcttgatgagagaggctttgatgaactgcttgagcaacttgctgagtctgacaattcaagaagaggtgcaccacctgcatctgtctcatgcgtcaggaatcttccaagggttatcattgcagaggagcatgtaatgaagggcctagtttgtgcgatctgcaaggagcttttctccctccgcaatgaaaccacgcagcttccgtgtctacatctataccatgctcattgtatcgtaccttggctgagtgcccgtaactcctgcccactctgccgttatgagctcccgacagatgataaagattacgaggagggaaagcggaatgtgctggatgtgagcgaggatagctcctcctctgatgatggtacagaatcgggggaagaggaatatgtagagagaggtgagagcgagtctggtgtgagcagagtcagcagaggaagatggctgtttctggctgctgcaccagttgtgagtctggtgggcgttgtgttggcaatgtggctaagcagcccacacaggaggggtatagcaatctctcatagccaaagggagaacagaaccagaagatggctgccgtttttctgactgatgcccagatccgtaggtgcctccagaatctgtatttttttaagacccttaaaagatacttgagtttcgtctgctgtttatcgacttggtactgtttccacacattagttttaattgacgtttaactaaagttgtgctgtttgtcgcgtgtttcaaataatattcttgatatatccagagaaaaagggagtgctcattagttgaaaagagttataaactaacatttacacaggaaaggaaaaaaaaaaaatcagaattttggttggttcaggcacataggagatgccactgtatttacacagaagtattgtatagtagcagatgaatgtgtcaataagaagagaattcagaagagtatgttaatgtagagtaccatccatccagccattgagaagatggcgaaaatgtggacccagaagagcacagcagctgattcccttccacagcctctaaggttggcaacagctcctgagagcactgatgtaggcattgtgtgctgaaggagtaacacaaatcggaacatcttatcatcagcaggaaggaacccaagtttgtctgctactgtcacgattcctagtcctactggtggcactaacaccaaccgtccaattataatagctgctgttgtcttgaaaccaagttttgaacttcctggtcctaaaatttacccaaggaaccaataagatccatgtgatggatggggctaaaaactaagtcagtatgaaaagaaagcaaccaccaaacctaccgttaatgagatttccccccagtgccagtaagatacacggtatcatcgcgtccctgatagccaaaggttttacatatattaactaattaatttgcagctgcttcacagaagacaaataaagagtgtgcttacccaagaatcatgcagctgtctgtgaagaagaatagaggtgcaccatttgtgaatatcaacttctttgtgaaaggtattgctccgagtatcatggcaaggatctgaagttaacaaaaacacgtctagtttagttacatggtaaaggcaatcgcacggtctcttgatctttagattgtcagataaaaaaggggaatagaaaagacgagatacttaccgaagcaacaattgcaggctggacaatttgcttcagtttcagcttctcatagaggaaaacaaagatctgtgcaatctacatcacggagcaaaagataaaaagtttcgtaagaaccagcttatatcaggtaaaatactcctgaaacatagaataaagattccataattgcagtcccaccttgcctttccttgaaacccctcttcccctaggttcggtgctctgtacaggcaaaagatcttgagtcggcgaaaagtccttgggaaaattctgagtaagcaaggggacttgctctggagcagcatctactggaagggtttttaaagcaagattttcttcttcagcatcaaacccttctggaggaggagcaaacatctggtacacatatgtatagaggatgatggcaccaacctgatataaaaagtaaaccttgtggttaattgaagtcccacagagagaaataatatccattcccataagacattgatgacaaacagtacattggaactaaagatcctatacaaaatagtttcaatgaggatactcctcatacatcaagctcctcttcatccaaacagaaaaaaaaagcagaagacaagaaactgtatcactgttacataagagacagaaactgaagcagctaatggactgattctagtaggtataataatagttacagcatagaagcagttaaaaagagaaaaaagagtacccattgaccaaaggagatataagcagtgccatcaatgctacatttttcggagtcaccaaaagggttggaagtgtccctacaaagagccgcaagtaaaacaagaggcacattgccaatgttgcctgaaacaaacaaggcacataaagtgagactagtgtcagagcagaaaagcgagggtagggaaaaaaaggggtctaaccaactccaatttgtatgattgtaaacttgaagtaagggtaaggcggacgaacgatggaagcaacgatgaaaccgattatggagccagagatggtgccaagaacgacgttaacgggaatgaaccacctgaaagatggaaaagaatatgatgatctatataaggactagagagagactaggggggacaaagaaggaaacaaataccactgaagcattttttggagagtgacggcttgtccgagctgggaaaagatcaagcagggaagcaaaagcgagaagaccaactgtgtgaaaaggagagacagtttcattcaaagtttgctttttttggatttatagagaaagtgaaaaagtctagtgtggagaattaattaccccgttcaagagtttgcggccagagggaggcaagatgttaacgtacttggaggccatgagaagacccaagaagcacatggtgaatacctttgcaattggcatcacagcgattttgatggtaccgagcactgatccaccaccggcagccaccggcatctccatggaatcggctaaggcggcaaggatccgagcaatcattctgagaattttgagggtggacttgggttgaaaagtggaggagaaacagagagaatcggagtctctgagatgatattttgatttgatgagagaagagaatcaaagacttctctcgatctctcgtgactctcgtgactgcctgccacgtgcgccgcttcttcctttacttctttccttttctaagcccaaaagccccttcaaaacttccccacatacctttttttttattctgtttttattattactcaagtttagaacttcatttatttatggtttattttcatttaattaaaatactcaagtttacaagtttttacaacaaacttgtaaaaatatcagctgaccaagcctcaaaactatgtttgacctgacttgggatttgggataatgaggatcacaactataaaatatattcttaaacggaaataaaagcaaaaagataaaaagaaaaaaaaacaatgatatagttgatgatgccctaggatttggacacatcaacaaatattggttggttccaacatgattctgtagaaaaggtattataataataataatcaagtttgtagaggggagagagatgaggcattgcagtaagcgatagctgccttgagggaatcgtccgttaatgcttcatccttattattactcatgctgccttcgtagtagtatcgtagggggctcttgtttcgtcgtctctgtataacttggaggacccacctctctcccacgtttactttctctcttatgactcccactatactcaaacaccccactttcatcatcaacctcgtcacgctgctgtatgctgagaagcaactagtggccgatgagaagattgctgtcgtcgtctgcatttcgttctcgggagatggcgaagaagagatgctcaatcctgtggttctgactgctttgttgatttgtatttcaatgaaagattcaccattgttgctgctatccttcgacgcttcattcatccatcccacctcgttctccatactattagttaccgggtcacttcccaaaactccatctactacgactagttatagatatataagatttgatctcttgctcctaattttttaacaataatcaagtagattctaattgatatacagctagcagctcatgtgagctcttagtgcaataatataagagaatgaatacacgattattgtctgatcaaattaaatctctcgatgggatcgggggattggtggtataaatcaaatttttaataatatatagtttggacactagtccctgataatatcataatgtagctaactgagttgtatttatcgccaagctcttgggatatcacatgcatatatcacatgtcacattttatttgctttctcgttttgaattgtattttggtttctcatttttgatggagtcaaattccgaaaagccggaaagaacagctaatggattaagtcttgaaatgtatcttttgtatacgtgtttcggtttttgttgtgagattttattggatcacgcttgaagatattatttcaagggataaaaggataaagaaaaaagattcttgataaaatattatgttagcttagcttggtgtacgtacaataatatgagaagagcgattttgatctcaccgtaaagtactttttccaaacgggtttgcactagatggcccataatgaagttttattaggcccatggatgatagtccaatgaaatgatgtaatcaaacgtaagcaataagtaagaacttatgaagaaccaactggtttgcttcggtccatcaatgaacgttatgcaccgtggtccgtggtaattagacttttctagttcgtatttgaaaattttcaatagttcttattttgtaattatcataatctctaaacttttgtagtgcagttgggaagtaaacaaataaatataaaaataacatggtttatatagctcaaagaaatgggatatgttttttggagaactttttgattaaggatattgggtagtgtaagttgaaagtaatgttcttgttaaaaataatgatatagcattatagcgtaaggagaaattgaaagttgatgaaatatttgtaagaatattatgagtacgtagagtagataatattcttttatatatgattaattaactatcactttagtattgtgtaaaactcaaactctcggtatgattatagacgcaatgacaaaatcatgatacttaagtcgttcaagtattattaaatagatacttttgtcatcgtgttgcgtttgttatacaaaaggtggaacagttttgagttttgaccttatttttagggttgttttgtaagggaaacaacgacgtgcaatacgacaactgatagagaacaaaggacaaaacattatctttgtttgaaatgctcgacaacatctacatattcctatttaatcacgacattacgttacttgaaaaattccataattcaactatggctatatcttatatatttgaaaagaagttatagaattggaaaaaacaagaaaaatgagaaatttttggcaaacatatagtataaattatgcaatcaagaagaaaagtttagggattttgaaaatgttaaaatcttctcctagtttctaagcaaaaagtataggttgaaactattttcacaagtaaatttttttaaaaaaatctatgaaattcgagataaataaagataattatgaagctacagttcatattaaaaaatcgtgttgtgaccactcgatcgtaatacacacgcaaagacaaggaaaacgttggagatttgggttgggttagaaccaaagacaaagcatcactttctacctttatccttaagaatggaccaaattgtggtcattatggaagcctatacggctaataccattcatttatcaaacttgttaaatgtaaatgaaaacatagaagaaaatttttattgatacttattgagttattgaatttcacttcacgtattgaatgtgtgtgttatctttgaagagaggacgcattcattgttagggagtgaatgctttacggagtaacatttttgaaatttgtaaacttttttagaaatttaaactatcttcgatccgatccgctgcactatataaacaaaaattgtatatagtaatattgaaccgtaaaaaaaagtagaggaattttcaaggttgtgtgttaatataaatgaacaaaatttaaaatactgacaccaaatatatcttgtggaagttgtaaaaatagacaataaatgggataagtaatagtaatacaaactgttatagaggtattgtaccgttgcatacttgcatatcatttgatgaatacgactttatttttatttttatacttctttagttccaaattcctaatttaatatggttacgtaatttgtaaaaaatatataatcttattgaatacgtcattttatgattttatagttatcaaatctcatcgtagatggatccgtcaattacacgattcccataatagaaaaagaaacagttaattagtaaactatagtataaatttaaatcttgtcgtcattgatttggattagtttagaattaaacccgttgattaaaataatcacctggttactgagagaagataaagttggtgtttttaaatcttatgttgaagatgcagagagatcgaggaagacagagcaagagaacctcttcactcacagacccactcactgcattttctcttcttttctcagaaaatacttttttcccccgagaaaatgttccacaagaatcagatcgaacaataagggttctcataaatgtaatgcgattcaagcacgagaatatccacagagagagatacagaaggctccttttgagtatttgagcaagtttcagaactcgaagactgtgtttgaaagagagattcaggcgtagtaataatggatggttcgtcggaaaatttgccagaagtggaagagaaaggtagagaaagcagttgctgcagctcggaaacaaccagacaagaggaggaagaacaaagccctagctgtacggaggatttcacggcttctccggtttcatctcgttggtctgtgaagaacatcgatggagagaagaagaagattcgttcggattcaagagtttcaggttcgtcaatttttatacaaatgcacaccaaatgtttgcttttattcctcactgacaatttattaaagttcgtagctttggatttttctgtctgagtttaaggctgttttgtgccactggtttgactatgtagaggttgagatgatgaaggaaagattttcgaaactgctgcttggagaagatatgtcaggttctggaaatggtgtctgtacagctttagctatctcaaacgcaatcactaatctttgtggtatgtggaattggaattactcacatgaattggtggattatactctttgaatatattttgataggctcgactttgtgttttgcttgaagctaccttgtttggacaactatggaggttagaaccactgcctacagagaagaaagagatgtggagaagagaaatggaatggcttctctgtgtcagtgatcacattgtagagatgactcctacttggcaaacatttcctgatggaaccaaacttgaggtacagattaggcattgatattgattgcattgttgttgtttcgattatagacccatatattttgtttttccattgttgtagataatgacttgcagaccaagatcagatctttatgttaacctcccagctctcaggaaactagataacatgcttcttgtaagaacaagtgatctcttttcgtcttcccagtttctctataggtattttaagcagcaaaggtctcattcttattcatcttccatctttgcaggagatattagatagttttgaggagacagagttttggtatgttgaccaaggaatcatggcacacgaatcagcagcggacggatcatcttctttccgaaaatcttttcagagacaagaagacaaatggtggcttcctgttccacgggtttcaccaggaggtttacaagaaaactcaagaaaacagttgcagcataaacgcgactgtactaatcagatattaaaagctgctatggccatcaacagtatcacactcgctgacatggaaatccctgaatcataccttgaatctcttccgcgggtaaaaaaccgaactatatatacatatgtactgctaacatactctaatatgaaatttaaagttgcaacttttttggtatgtttcagaaagggagatcttgccttggtgacttaatctacagatacatttcatcggatcaattttcacctgaatgtcttcttgattgccttgacttatcctctgaacatcaagccatagagatagctaaccgagtcgagtcatcgatctatctatggcacaaaagaactaattccaaaccagctactaataccaaaacgtcgtgggaaatggtgaaagaactaatggttgatgcagataagctagagctaatggcggatcgagctgaaagtttattgctttctttaaaacaacgattcccaggtcttcctcaaaccgctctagacatgagcaaaatccaatacaacaaggttactacatggaaatcaaatcccaaatcattctttcttcttgtaatccgctctaaacagttttcctttttctctgttttaggacatcgggaaatcgattctggaaagctattcaagagttctagagagcttagcattcaacattgttgcacgcatcgatgatttgctctttgttgatgatcttacaagacattcatcggatcagattcctacaacattaggcaacaacgggaatgacgctcctaagagcattgcagtgccggtttcaaactacacaactccgagctactcgccttcaaaacaggagcttcgatcatcaattacagttccaccatctccctcccggttcaagattcctcacagtagcagtgttaaaagggttttgacagcttatgtaacaaagaacgaaccaagactgaagaatcttcctttagaaagatcgagccgttcttcgtcgagtgagagattgtctctggagaaatgcatgaaggagtcgttgaatgtatcgaaccttgatcctgggatttgaattacctacaccttggaaaagtctctgtttttggatcccttttcctttcagtatcttctataatgtttattattctttctttcttgtgtgtagtttagatttgtataataataattggaaagatgggctttgactttgagattaacaacaaatgagtcaattaaacaagtttaacaagtgcattatgacaagttttataaccaggtttaacaaagaggatgaaagttgaaaagatcaagaactaggacaaatgtaaaaagaatctccttggaatctttggaggacacatcttatgacaaaaaggcagaatctgaacattgttctcctcaaaagtagattcccatataaaccagacaaggaacctttcacaacccaacaccgataataaccagaccgatttgaacattcaaacataacaaagagtttcaaagagctagaacaggattacaggaagggttatttatttatttatatgcgtggaaactggaattttaaagagtttgtacaaaaccatcaacggtttaactataaaattaagggaaaattaaatctgaaccggtcgggtcaatcactaaaccacgacaagggacaaaaacaactcccctgctttctgcagctaagctacattcaaacttcttccatactttttgtaataataagatgagaagttactaaaaacgacggatccacagctactctattctttttttgttcctatgtacctgcaaaatccgaaaccaaaaccataatcagtattgcgtgtctaagaaccgaacttgaatcatttcaatgaatgtttgggttcattataccttgattttgtagttataacatttgcttaagtagtaagatctctacttagtaatacagagaccctggaaagttttcaagaacggttagagaaatggaacaagattttccacaaagcagaacaaaatgatcaaaagatgggaatcggataccttgccaccaatttcctcttgaggcacttccggaatcatcttcgcctccatctttcttgttcttcaaaacgataaaacataaccaaacaatattctttagaaacaataatctatgaacaagcgtgataacttcggttctaaaacccttaaaactcatcaaaagttccacaagactaactttataaaaaaaacagctatagataaaagtttctagctatttccctaagtaattcgtcttcagattcttcagccagattctttagagacaatagtcgatgaagaagcacaataacattggtttcaaaacctttaagaccatcaaaagctccacaagactatcaggtagctacatataccaagtttctagacttaatgattaccgtagagttgctggtggaattttgaggctggaaataaacatcaggaccaccgtaatagatggaagaactcagatgacagggttgtactctctgatcctgctgataacctgaaccatgattctcctgttgttccctgtttctatcaacattacctgcaaataaaattcaaatatcaacaagaagaaatgcataacaaagactaatcattcgttatcaaagatgatgtagtattaccaccagtcttggaggttttctcgttccagcaaccaccagtcacagtctcttgtcgcacagattctcttcccaaaacctgaaacaagaacaaacccctgaaatttctaaatcgagaagaatagtatcaaattcttcttaacgaagagaagcttgttctccaagacacgaatcatgaaagtctccttcatcttcagtggtcttattctttaatttggggcttgtggggtcttccataatttaaaaatctcctttttcaaaaatccattatttccaaaaaacaaacaaaactcacaacaattcaaaaatctgaaacacgaaattgaaaaacaacaatcaaatcagattaatcatcgtttcgttttgaaaaccctaattcctcaaaaatcccaatttttatcccaattaaaaatcgatcgaaatcgaaatggaaacagaggttatgaaaattgttaaaacaaaattgaattcgagaaaagaaagaaaaagatcgaagctttaattaccttagaaggaggaggaaaaatggatccgagaataccagaagaggaaggagaagaagggttttctctggaaccaaaaagctcagaggttaacgaggaagaagaacaaggagaggaagacgaagctttcttctttcttccttccattggaattcgtcgctcgctctaaaaaaaaacactctttcagctattatacgtatatgtatgatgtatgtgtctatatacgtatgtgtaaatacggagagatatatatatatatatatgtgggtgtgggtgtatgtatcggtttatacgaagggtgaagttatagagagaattgtgaaaatatttgggagaggaaaggggaagtaaaatgtataggtcggtcttgagaatttatagagatggatgatgaaacctaactttactactctactacaaatttgttggctatttaccaaaatcatgtcatttttttagacaacaaaaaaaaaaggttacacgaattttttatacatttttttgtttttgattgtaaaaatttagacatttattgtgtcatcacttgacatgtggagtatgagttttttttcttttgtgtattatgcaaaagaattattaaaaattcacaatttcgttttactttttatttttggcttacaattttttttttatcgttttgtataaccaaaattgacgattaaaaagcttgatcctctctaggtaatatttgggatgatatcaattgaagtaatatttgagttttgggataattttaccataggttgaatcaaatatcaattagagatcatctaatggtttttcgtagacaacaacaatatcaaagactcacctggtacgatggcttaattgactgaattacaggggataaaaacaaggacactaacgttgatagttggaatatgatttcatgtcaatgtcataatcgtacctatgaccgttatctagttactaacatacaactcccactcgaggtgtcggataagccgatcgacacgtggtgatcgaatacgagagtaggaccaggcttatctaaggtcggtagttgccacatgccacgagtcagaccaaaaaatggataattaacgaacaccttcaaaggatgagtcaaagttcgttgggtttttaatctttgactcttctacgtctctcattcgctctttgtggatatcagtttcacgtgacagttaaaaaacaaacaaaaaaatataacgaagaccttatctcttcttatctattgtcggctgcgacattgaatttgacctctctactatctaatctcttcgcaatgaatgagacgttttattaaatgccaaacacttttttcttttctttgtccaactttattttgttatcatatttttaaggtttcgagatgtgaaagattagtttgaaaatctggagtgggccgatcatctccacttctactcgcctttccataaaattcaggttttgatcttaggtctactagaggactggaaaaaatgatttaagatttagatttgacacatagttttgaataacaatcaaaaacttgtttttttgttaaaagggttttaattgtaatgaaaatgtgaacatatttgtttgggaacttggtttgatgcggaagatacgtcggttaagctgctaactatgacacgtttccttattctcgtctcgagattctaatacaaggatctttcgtgatcctaaatttgtaatgttgctcaatttactagactcaagtttttattcactccatctcattcatcaagattttgagaattattaaaatctatatcgtggaaaaaatatgcagaaccgaatatcttaatggttacagagcaataaagcccaatgggagaaatttcgaggcgagtgatggtaccgtttcaattttctacaacattcgtagagattaattgtgcttatgagtcccgctaaattaaaatcttggatctatacatgagcaaaaaaaaaattgcgatatcttcaattcaaaaaaacgtgaagaatataattttatttatattgggctccttttgcacacaaaccataaaaatctattgggctccttatttttagacccaacggcccaaaacgttttctaatctttgaaataaaattaaaagaatatgcaccagccgggaattgaacccgggtatgtaccgtggcagggtactatcatgccactagaccactggtgctattgtttactgtttatcttactgaactaaataatttctcaaacatgtaaaatcaagcctaaatttttaaaagctagtattgaaactttcaagaacatgaattatataaaccagtagatgaaaaaaaaaaagagagagcattgggaagatagcgtaatacagaaacagcgcccaggagtcacgcaacctaacaggtgacgtcatcacagttgattctctgtactactaccccctaatatgggccctaaatattttgtttttaaaaaaaatgagaaataaccattttatggaaaaatattatcccaaatagtatttgttgtcagttttatttatgtactccatttatgacatgaccaaattacttctcttcattttagtttttatgagaaataaataataacaaccctttagacccaaatagtttttcttgtattacaccaaagaaaagagtaatacaatcaaaattagggtctaaaccttatctctgtgtgaatcatattatgcattatctttttgttgtgtgctaaatcatgttttgttttctgtatagttagttaaacatgtagctaattatggttggaagtaattttggccaatgttttaaagtaacaagaacaattgttcttctagattttaatctaaatctctgttagcttttcacctagatgctaagttgtatttgatggaacataacataatatagtcgtcaacatgtggtgtggatttgtcatttatgttatgatatgaccattttttaatctaatttattgcaaactacttaatttgatttacgagagcacaaataaatcctatatatcggttcaatttaaaagaagaagaaaaaaagcatcgaatgactgatgtgatttatactttaagaagtgagttggaattatctttccatgtgccaaaatatagtattggtaccatgaaatatggtttctatttccataattctcctttttaatttttgctatttaaattcttgtttaggtcgtgtaatacagttctcgatgataattacaaaaatcatcattgtttccaattgagtgtagtttttctttagttaggatccctaattaaaattgatgggagcgcgtggaagtgagtcgcgagtgaatgggaaatgagtagatatatatcagtttctgaagaagacgtacggagttttgtgaagaacgagaaacgccgttacatcaactgacggcaaactcggtggattctcactaagcaaaagatttgtgcagagaaaaatcatcaaacgtaataatctttttgaatgtttatttttaataatctaaacgacgttagcatgacgacgtcacctgagaatcccaatgggcatttatcagaacttgagtactttgcagttgtaatgttactttaattaactgctacgtactactaaattttgtactgtccctatagatcaacttcaaagatctatttttattttattttattttggtcaaaaacgaaacctaggtgccttatgtatatacactacaaaaaagttttaagggttgaaccaaataaataaaacaaatgttccaaataaaatcgttgaatgacaagattcatttattgtacgtagctgaacataaatcatattatgttacggataattaatacatcatgctaatgtaattgttttttctttattattcaattaggaagttggtccaatggaccttaattttcaaaacatgtgccgattatagttatttttttagtaaaaagtaattacttggtatattgatttttattcgtgatgtgacactttcgtattatcgtgtataacatttttacatatatttatgcatgttgtcgtccaaaagttaatttcaatagttcttgtggttgggatgttatttagctatgacctaccaagcaattaatagttttcgcattattattttaacctttatgaacttcgatacaaaataggtaaaatgttgatacaaaatagtaaacgaccaaatgaagaggagttgtgcaagttgagaagcgatgctcagactcttccctcagtgcaaaatgaaaaatggtaaatctgcagagttttgcaataggtccgttagctaggtactaaattcaagtggtctgctaataccaggactagccatagacaccaaagttaatgtgaggttagtcgcgattgagctcgggcgactacaaactcttgaccttcaagcactttaacaagtgtttacctctcttgaggacacttctacctcaagaaaccggatcatcgtttattcgtttatgaaattaagttcttgattcgttttcacatattttatcttctgttccttataacatcctcttcctcatgaagttgattggcacgattctgaaacacggatccttatttggattagaatgctgtctcgaggccgtttgagaacttgggggcatattatgaatatcccacaacaaataaataagggatggtttcttatcttcaacatcattttaatcctcacctctaactcaatatacatacactcgcctttggatgaaaaagcaacatcacatgacaaaatctttctacaacccttatcactgcaaaatctcgatcagccagacaattctcaccacttgggtttcaagccttacacatccatgttgttttaataaaattccaaaccatccccattatttttgtaactagggctcccccatgaagttatttttgtgcaatatactaacatttaagaaaaaaaacctagaaaattgaaatgatacaattattatgaatttactaaaattagagtcgcaaatctaagcgcgcattacatctatagaggcagataatgaaaaatatatgtaatttttttttgggttatatactattttatgttcagccaagaaggtgaaaaaggagcgattgcttaaaaatgttttcgtgtggttacccgtgatgcaatgtaaaaagaaaaaagaaaaaaaaaagaagagaagagaagaactaataattacgtgcactttaatttactgtaatactttattggagtgccttggttctttttcaatttttgtggtccatcttagccaaaagaggaaatacttttatataatataaaatattgtaacgcaaagtattgcttagtattcgaaacacattttttcaaatgatttacgtcccattatttcccatgcaaacggaaatatcctctaatgattatttcaaacacgattattacagtacagtcgaaattactttcccggtttaatcatattctggcatatcttataacatattttttgcaaaggtattcgcttttgtttttgtgacaaattatttattaggtttttaaattattacaaataactctcacagacgtatgtaatccaacacataaaatatatggttgataagaattcacatcaattttgattaatttagggactataaatatgttatatacaataattaatctatgcatcttttttaatcattgtgattgttctagttataataaaatatggttgatcacaattcacaacaattttgattaatttatggactataaatttgttaacataattaatctaggcatctttttaaatctttgtgatttctctaattatataatatgaactgcagaatttgattgttctcaatgtataatcttacgggtcataccataccatccatgctttgagttagggatgtcaaaataggtcaaaattcatgggtcaactcaactcaactcaacccatgaaccctaatgagttgaaaattttgactcaaatgagttgatgagtcaaatgggttaatgagtcaattggtttgatgagtaaaatgagttgggttgtaatggttaatggtttcaatggtttacccaattaacccatcaaattttataaaattgaattaaaccaactaaaatctctaaaccaatgccaatttaagtttaaccaacacatctaaacaaatttaataaaattaatatttttccaaatttcttaaatatacaagcgatgaaattgagaaaaaataaattcgtaatttttccaccaaaaaacataaacccgtgattttctcgccaaaaacgtaaacccgtgattttcccgccaaaaacgtaaacccttaattttcccgccaaaaacgtaaacccgtaattttcccaccaaaaacgtaaacccgtgattttcccgccaaaaatgtaaacccgtgattttcccgccaaaaacgtaaacccgtgattttcccgccaaaaacgtaaacccgagattttcccgccaaaaacgtaaatccgttattttttcgcccaaaacgtaaacccatgatttttccgtcaaaaacgtaaatccgtgattttcccgccaaaaacgtaaatccgagattttttcgccgaaaagcttaaacccgaaattttccagccaaaaacgtaaacccatcattttccggccaaaaacgtaaaaaactataattttcctgtcaaaacgtaaatccgtgattttccgtacctaaaacgtaaacctgtaaaaaataaaatccgtaaatatcttaagtttgatgataatgaattaataatgataattatttattattgttttataataataattaattaaattattacttaaatgggttaacatctcaaaccattaaattaaatgagttataggttgacccaacacatttaacaaaatgagttgggtcaacccataactcatttattcttaaactcatttgattataagttgagtagagttgggttatccattttgatatccctacttttagtactatagctacaagcctacaactatggagattagtgtgaatgtatgattgtcgaataaaaatagagtgactaaatattttaagcgtaaaaaggtatttattccagcaaaagaaaagaagaaaaacgacaaaaagaagacttaaaagttgtagaaatgtcagtacgtatgtgaaagactgagacacagaacactttgtacaagaaccagttccagtgtcaccggttacagccggtcgccttctcttgattccccaaagcctctcccaccaaacccgggacttttcacttttcatcagtatttttttttgttaaagattttcatcagtattttatatatatatatatattataaagatcgaatttgtttgcatgatgaggaaagtatatcgagttactatgtatccatcgtttgaaatacccgttttaaaaaaaaataatgagatttatttttaggacttcagtatatatacgattaacttttaacagttgtgtgactaaaacgaaatgtaacaaaaataagagaaaactacaaaacaggtagtgaaaaatgacaaaaaaattgtaggacgctaagacgaaaaaatgattcaagaaagaatatgtcttttcaatttcagttttacgaaatcgtgtaataacgtaaatactaaatcacgatttcacagaaccatataaaatactaaaatcccacgcaatcattaaacttaattcaccattctacggatgacctatgagagagcattgaattggctttagtaacaaacaccaaaaagatgaatcttgaccaaatttgtaatgctcatactaaattcctccaagtcttataaacattagatattttatattttaggttttcaaaatatgtcatataaagaaaaatttgatatacatattgatcgtgcttcaaaaagacaccaaaagagcttctctctctcttaacctctcgtttcgccattatctcttacactgttactctctctctctcttcttcttcttcttcttcttctgcatctcatcgacatcatcctttcccatggctgatgcatacgagccttatcatgttcttcaacaaagccggcgagacaaacttcgtattccatctctcgattcccacttccactttcaccctcctcctcctccttcctccggcggcggaggtggcgtctttcctctcgctgattccgatttcctcgcagccggtggctttcactccaacaacaacaacaaccacatatctaaccctagctacagtaatttcatgggatttctcggtggcccttcttcttcttcatccaccgcagtcgccgtcgccggagatcattcctttaacgccggactttcttccggagacgttcttgtcttcaaacccgagcctctatctctatctttgtcctctcaccctagactcgcttacgatctagtcgttcccggtgttgttaactccggattctgtagatctgccggtgaagccaacgccgccgccgtcaccatcgcgtctagaagctctggtcctctcggacctttcacgggctacgcgtcgattcttaaaggatcaaggttcttgaaaccagcacagatgcttcttgatgagttttgtaatgtgggtcgtgggatttacaccgacaaagtcatcgacgacgatgattcttctctgctttttgatccgacggttgagaatctctgcggtgtttctgatggcggcggaggagataatggaaagaaaaaatcaaaactcatctccatgctcgacgaggtatacaataacatgatcaattctaatctctttaaattattgaaatctgtaaattttctttaattattgtctatactttcttacaagtatgtgaattattgtgttaaatgttcacagtttttggtcggtgtcctttggaattggagacaaaatgtgttaaatgatatgtctcttaaaaagatcttccttggaaaatgaaactccttcaaagccattttaaaattatatgatattttatttaattcattataataccatatgttaattaaattaatgttccctacgttttgcatgaatagatgatgttatagcgtccattttaatacattatataaattacaagcttgccatcttcatgctgatttttaatagaattttaaggttatactaaagtaaggataatattatcttgaggaagtaactttatatagagcttccttagctcttgatctgaatttgtgaattagattcttcaaatcttaggggtataaacattaagtgataaaaagagaacgtcttctttatgaaaggaatatatgcattatatgatcttaaagctagggacttaaagattttaattagtttattccgaggtatataacatactttttgagtgaggaaataatgtataaatttataatcacccattttattatgtaagtgggggaatctaaaaacatttccatgtgacgttttgaaggtttacaagaggtataagcaatactatgagcagctacaagctgtgatgggatcattcgaatgcgttgcaggtctcgggcacgctgctccgtacgctaacttagccttgaaagcattgtctaagcatttcaagtgtttgaagaatgctataacggaccagcttcaattcagccacaacaacaagatccaacaacaacaacaatgtggtcatccgatgaactctgagaataagactgattctttaagatttggaggaagtgatagttctagaggcttatgttctgctggtcaaagacatggatttcctgatcatcatgctcctgtttggagaccgcaccgtggcctacccgaacgtgctgttactgttctaagggcttggctcttcgatcatttcttgcatccgtaagtaacccttctcgccatataaatgcttttgaaagttgttggattcgagtttgaacttggttccaacaattgattaaactaaatgcaaacgtttaattgatcatgaaccaaattgtatatatatgcttgtgaacaatagctttatatgtgtgtgtcagtgtgaataaatatgtgtgtatcgaagtgtatttttacttggaagtatgttttagatgggacatgtcgactgcttgtttgtttcccaaacttggagatgtcgtgttgcaagcgtaattatgtgtctatatatatgtgtatgttagtatatacaatgatatattaaattgttgttgtctgtgtcttttgttgcagttatccaacagatacagacaaactcatgctggctaagcagacaggtctctccagaaatcaggtttcacttctgatatcttcagtcttcttcttttttctctttccatcttttcttgttcacaatttaacaaatttcttgctaattaagcatgcacatagtcacatagataaatatatgcttttatgaaatgagtttctgttgtcggacaataattatatgttttaaatcttttcacatatatcattagtatagtaactatgttataatttggtttattaggtttgaataagtgttacacttttgtttttgaaaatttatccgttggtgataatgaataatttagggattttctatcgcttgagggttattaatttattatggtaaaatgttattttaggtatcgaattggttcataaacgcaagagttagggtttggaagccgatggtggaagagattcacatgctggagactcgacaatctcagagatcttcttcttcctcttggagagacgaacgtactagcaccaccgtcttccctgacaacagcaacaacaacccatcttcgtcctcggcacagcaaagacctaacaactcatctccgcctagacgggcacgaaacgacgacgttcatggcacaaacaacaacaacagctatgtaaacagtgggagcggcggcggtagtgcggttggtttctcgtatggaattgggtcgtcgaatgtgccggtgatgaatagcagcacaaacggaggagtgtctttgacgttagggcttcatcatcagattgggttaccggagccttttccgatgacaactgctcagaggtttgggcttgatggtggtagtggcgatggtggtggtgggtatgaagggcaaaatcgtcagtttgggagagattttattggtggtagtaatcatcagtttctacatgattttgtaggttgagattatttgtgtggaaaggaaaaaatatgtttgacgtttgggtatgtataagaagatatgggggaattgaaatgcatatgatgtgtatattagaatgtttcttcttctttttttgttgtttgcttactttcacaaatgttatctttttaagaaatgaaattggattcaataaccaatgttaaaaacatgggttagactttagagttgtctatgtcttggtgaaatataaaaggcatctatcattgttttaatattttggcatgattcaaaacatggtgctttttttttttttatgtatgtcacaattatcgttgaagaacgcgattaagatgtttatcattgatcgttgatattatattttgaactatcttgttttacttgatagtaaacattgactaaacaacatgttttcaaaccctaaaccttgaaatatttcagactatttgagttatctttttgagtcggatgcagttttgactccgatccgctcaacattgttgaattcttctactcataaaagaagtttgagccgatttcaaacacacaaaacaaatgagttcggtttaatgttcagtgtgtactaatacgttggcttttgaagatcacatgagagcaaaagtattgaaaataaaattgtgcttttgttgcttcaaataactttccatttgcttttggaaaacaagaaagatatatatatatatatatatatatatatatacataacctttccctctcatgggaaaaaagtaaatctttttctttgtagaatttattctccgatcctaaccatttctcagcctttttgtttgtttacaccatttttgtttatattcttggattatgtctatatagaataagatgtaaacataaactgtattagcaaatatgttttgaattatatgaaattcaataattgagaagaggttcatgtaatgagccgagagaagaatataaaagcagtcaaataattttttcaaaaaactatttgtatattaaaaaggtacaaagtaaaaaataaatttaagaaggtgccatcattggctcctaaagaacaaactacaaagaatcaatttctcatgatttgatctctcacaatccgtctcctttatgtggatgcggaaaaacactctccacacgtttcatgtaaaaattttagttaaatttctaaaaacaatagagatactattcgatttgttcttgaattattcatgaatacatatagtggcaaccttagacactagccacgtcaaccgtacatgttatatcatatatttttatattggtctatctatatgctgaactagagtctagagataaatatgagaacatataagaaaccatggacaactaaagatattgtctttctgtgtgagtatttgttccagaagcattaaaccttcggaataagtataattcttttgcaccattactatttttataagcttcaccagctctatatatattctcaccattaacataaaacaacaacaacacgaagaagaagatgaaggtacttgatgatgaacgggtaatctgcatcctgaggtttaaaaccaattaagcatatacatatgcgaatgtatagtttttaatcctcgggatacagtttacctcttccttactcaagaaaacacttagctttaacggttttggagaaagaagaagcatcgaattaaatccatttgaaacaggttagttatcttagtgaagaatatatccatcaatcataatttggtctagtcattcgaagtgggatatgatttgatacatatagtctaaaatatgattttatgccagtaatattttgttttccctgtcccctacctatatctagagcttgagatcctccttttaaaacttttagatgattaatcgttttacaaatcatagtcccagactttcgttccaatctagatcggtttagatgcgttttgttttggaatttatacaacgaaaaccaaagtttagattaaaagattcgaaaaccggattacataaaatctggtccaggacccctttggttaacgaaaaccagactaaagggcagaaacgtcatttgacaaaaagaaggatgattctctccttcctctttccccaatgcaaagaaaaagcattatagacttttcaagttttccgatataagcacgaaatcgctgtttctctcttcgacgaagctttgataatttgatctcaatcgatcgattctattgagaatttgtgtacctgttttcttataaggttaactaaggattgtggaatcagaagtgttgtgtttttgtgatcggagattatggattggggaaacgtaacggttgatgatctcttcgatgctctccgagaagttgactggtcgtctccgccgcgtcctccgtctgagttcttctcaaggttcaccgttcctaaatctgtccctaaatgggatagtcgcctcaagtgcaatctctactagtacgatctctctctctctttcttgttcgccaatttcatatctattcggatctgatgttgtgatcaatctctcgttgagaattaccaatcaaattcgtcccaattgaacatagaattcttagactttggttagaacacagagtcttgatagcttagtttctgtattgagcttaattttgacctgtgatgatgatctgtttatgcagctaccgaacaaactatttcatcatgatcgtcgttatacttggtatgtggtgtgaggaagtggctaagcattatcatctgtgttgtttatcaatgatgtcttgttcacttagaattgtcaaattttacttctcaggattgggagtccttacaaggcctttagcgatcttcgctgcgcttttgacagcattaagtttggcatttctaaatgacaggtttttcttcatcttccttttgtttttaaactctcagagctttgactagtggatatgcttgaatcagtagatccatattgagtattcttgtctacagctttgcaggttcttttagtgagaaggcgacacgaaccgtcagaagattctctccacagttagctgctaaaatgagacctcctttgacgtatgtttatctctctttgttgcctttcatactctttgttactccttgcttattatcatctatgttatctgtgttttttagacctgtcactcgtgggcgtccatcatcaaagagagcaatccatgtatgtggtcaaccccgttgggtttttgtcttgacatgctcacttggtatgtggctttgtatattttcatttgatgtaatatatctccaaaaaccgtaaaaaacatgatttggagttttttttttgtttcgcagtgagttttgctctttggtatatttcctctggtttgctcagagtctcggttgcgctactcattgcacatcttggtatgcagtctacacaaatcctcataagtcataacttagtttctctcactctacttcaaaaatccacatataggcttttataaactcaacctctttttgtaatttgtgttacagcaacaattcttcatgcaagcttgagaacaccgaacttgaaggcacgttttaacacatttagggaggaattccgagcagtatggcgtaactacagcgagatttagagtaatgtaagtttgaaatatcttcttcttagtctaacatctatttgcttaactggatggttagattttctgaaatgttgacagtctttggcagcttgtaccaccatgatcgtgttctgctgaggacataacgctgtaaagaccaaacttactgcctttctccaagataaacccggtttcgttaacactgtactatggatgttcaatctggatttgttgctcaatgactgggatcatctgttttttctttgatttgagatttgagctctgagctctttttgctagcaaaatcctctcttttttttgctaaagacttgtaaagctagctttgttgttcttcgttctaacacaaaaccctttgtgtaaagtcctagaatcgtttaatagcttgcatttttttctttctttttttgggttgagaggtctagtaacaataataatgagataacaagaaatggaaaataaacaaatgatttgactacttagccgagagttttcggataagaataggcaatgggaaaatgcaaaagaattatactttattgaggtcgtaacattttttccaactgacactcgaaagagttgcatcttatatctagcaaagtacctaaaaacccattaaaaacatgtagcaatattgttaacaagcataacacatgacctcactttcaacgattgctcatggtgatatcaagttcatctaagataaactcaaaagtttaaagcaaaaagaaatctcgctcttattctctgaacaaagttcagtttcacttctcgacaaaagacttgagatccttgagccattgaagatactctctgctatctttgttggccacataatctgccagaaaggtagtgaagcttggtttaatacctctgatctccaagtacctgtggaaagccttctgcaaattctcatccaagtcactgcacataacacaataaccaaattcaatcacataacaataccccaatctcatatattccaaacaagaactcactatcattgaagtaaacttactcaaagtcaggtccttcgtaagcaaggtcattatcagatccttgcggttgtttgatcgataaactatcaatcacaatctcatccgggtatgcgctgactccaaactcaagacacacaccatcacctttctgcacactaacaaccatcggaacccggactttacccgagctctcttgatcttcatcgtcttcttcattgtttggttctgcttcctcttcttcatcttcatcatcataagaagcaacagagtcaacttccacttggatggtttcatcctcaaatttccttgtcagcaacacagttctctcccctgaattatcaatgatttcaaatggaaacccttctggcttatcttccaactgtttttccaaaacatttctaattcagatacaattgttctaaaccccagaaatattaaaatctcatgaattcgagaagaatcatgtatattgaaagagagaacttacgaagtcagtgtcatgaggagcctcctctgcgacggcgcattcgatttcagattcgataacgctaacaagattctcgtcggcggttgttttagagatcgcactttccgtcgaaaagctcgagactgagaatgaactaaccgatccacgcctgatctggtggctaccacgaatcagcctctcgacggagacagcgccactgcggaagctaaccggagatctacccgcacggaaagcaagattggctactgttgacgaagctcgacgaaacacggtgctcaacgccatttctgaggattctagggttttccttaaaagtgaaaagagaaacagaaatgagggttttactgagagaagaagagaggtttaaggtttgtttatagtgcaaagcattatgtaggagataaaaagccatttaataaggcccaattacttaatgggccataagaagcccatatattaaaaggaattggtcattcgtacagtgagagaggaatgtctgtgtgtggacacgtccttaaaggcaaaaggagagaagaacaaaatagctcttgccggcgtcagaattgcgtcactgtttcttccaacttcaattttaatatcgttggcttgaagttaagggaaacataattgttcctccaaaaaagcagaattaaatttgtggtagatacttgtttttaaattcatatagctcaaaaaagttgtcatttttaatgttggttttctggtggcgatgctcttaattacccaattccgtacgatttatgatcataagtcaacttttgagatttgggtttgtgaaattttcctgaataaaattatgggtttagggtttttatgatcaatttcctgtaaagtagcgatttttttctcccggggattttggtgaggaacaggatagaaagtcttggttttgttctgtttattgtgtttgtttttgggttctgatcaatgaagaagatgattgggagtcctggaacaatgagtgggttgatactgagactagggcaatgtgcaactgctgctgcttccattggtgttatggtttcttcttacgacttttccaattacactgctttctggtaattgtccatcttcaatctcattggtcttggtgttttggtttagtttagtttagttgaagacattggacactgatgtatcaaaaatcttgactttgtagttttttcttggataaacttttgaagatagagctaactgaactagtaattgtgtatgattaacatttgcctgaaactttgacaagatttttttctttgtttggtaaaaaatatgtggaaatggaattatttctatatttcgattactgtatggggttatctcaaaagatacaaaatgatgatagattgcttttgccaatgatttcagcttcttagtcgcatctatgggtcttcaattgatatggagctttggacttgcgtgtcttgatgtatatgcgataaggagaaaaagtgatttacgaagccctatcttattgagccttttcactgttggtgattgggtattaaacttatcttccatttcattatatgcttattcactgttggtgtcttgttgttttaaaggttatttgtttgataggtttcttttggaattctgcaggtcactgcacttctcgctcttgcagccgcgtgttcctctgcaggagttactgttttattcactaaagacactgagttttgcaggcagcaacccgctctctcttgcgataggtttcagatttctgttggtttatctttctttaattggtttttagctgctatatcgtctcataccatgttttggatcttgatatgatatcaaacaaaacccatctcaatgattttacaaaaatccatttctatgaattgtttttctccaatccataaccggaaacagggcaagggtacaagtcattttggtaattttctaagacagctatgtctcagtaacctcttgtgacagaatattgatgatgtattcaatctcatcagcaacctctttcatcgaaggtcggttttgtctccgttcgttaaggcacgcagatgctaaattcccgagctgctgtatcgtctgcatgtcaatcttgttagctgtcttcttcagcagtggatcgatgcattcagtcaatctctcttgatccatcatcttgttaatatacatcaccaggttcacatcttcctcttctctagtgaaatctatcgccttcttcgatgtaaccatctccagaagcacaaccccgaagctgtacacatcgctcttatcagttagctggaaattccggtagtattctggatcgaggtatcccaatgtaccttgcgcacccgtgaagatatggctctcgttattagcggtttctgtcaaatccacaagtcttgacagcccaaagtctgaaaccttggcgtttagcttctcgtcaagcaaaatattgcttgactttacgtcgcggtggtaaatgggtggctgtgctgcggagtggagataagctaatccttcagcggtttggtatgcaatctgcagtctgcgccgccaagtcagcggtttccaagtacggtctgaactgccatggagatgttcgaacagcgttccgttgggaataaactcgtagatcaagagaggcaattcaagatcaacacagcaaccgagaagcctaactaagcttctatgattgacttggcagagaatccggacttcgtttaggatctgatcagtgcctttggtgttgttaagctttgctcgtttgatcgcggttatggttccatcctcaagaacagctttaaacacttctccaaaacctccagtgcctatgagattgtcttttgagaaattgttggttgctttcgtgatttctctgccagtgaagattcttgatgattttccagtggaatttgcgctaagcatctcttctcgctccttaacaatgttcttgtggatatcctttttaaccttttggtggctatgtttggttccaattactgctaccgcaatcgctagcgtaactcccacaaccgcaacagccgcaccttcaagagcaaagaagttaaaatggagtacaatcatatgggcatttgaatatatttttggtttttcggttcatcctctgtacctgcgaaaacaacggtcttcttcttctttttgcagtgtttcccatggcgacatttaccacctaatacatgtatgccaagaactaatcaatcacaatgatctgattcaagaaatttgttttgaatagttcacttgttatgcagtttacttacatattgcgttaaccggatcccattccaaaccttttttgcaggagcatcgtttcaggccgagactcgttggatcaggcaagcattttgatttacccaacaagaggttacaatctacatcagttttgcaaactggttctttaggcaatgcccattgcaactcgagccccgtgtcaggccattttttcccgggaggaggaacctctttgtttggattcagccccacgaagctttggtacgcgaggcatcccccaccgttgatcctgatcgtgtaagcggtttgagacccgtcggttctgaaggtgcaacacaagggagccttagaacaaggtgatgcattgttcttgatgtagctgtaacataagctggtaggactacaatctattggcgcctgcagaccccaaaatctcttggtcagtcctgaaaaccgggttccattacattttaatcgaaatctactttcattgaacccaaacctaataaccaaactaaaactgatctcaaatttgatcataaaccaatatgttctacaatcttcacaccaaaccaactaaacttttttgctttacctgcagcatagcctgagagcaattaaggagcaagatagtgttgctactagtgatgctgaaagggagatgggggtcgagctcgaggccctgtttagagacatcagctgagatacaggatactgagctagcaagaccaggcgggcgtagaacgatccgctgggtcactgagttgatggacgtaatgacataagatgacccatggagggcaccgaaataaagcttaccaccaacacaatttatcctataggcttgatccccgcaggttggacccgtgcttagaggataaggtacaaccataggtccgcagttaggacaccgtggtggtccggccatgggaggttttgccttagcatgtcgggcacaagaatgacccgcgcatgctagccatacggtcaagagagtaggtatcaataaggcgtagtatgatcgcttcttctccattttgttgtataactaattaagagtgtggacaattagtgatcaaaagatgtgagtaaaagtttaggtttatgtactaatgaaaggtcattattatttatttatgttattgctgtggttatacatttgttacgtatatcttagtaaagtaaacaaaagcaattcccgagttgttttgaaacgagaaaatgtgaggattggtttggattttctcaaaatcatgtttgtattttctaaggaagattgtgcagattcattgtctgtcatgatcatcccgacattttcatgtttcctaagttttctacttttatttactattcaacgacaagtattattgactgttcattttttactcgattttgcgttatcaatttagactggaccgttttcgacaagtataattttcactacatctcttattcattttggttgaggacgagtaattgcctattcagaaaaaattctggtagattttctgatttgtaaaaagaattttagtaattgttgtatcacatctttcactatttatccgtatagatacaaaaacttaagaatttaaatgggagtcgtgtgacagtatagagttttctagaacatgtttttagtaaatctattataaggttttttttccgtaatcgtatacatcttccaagatatattacgaactttaacaaacactaaggaacaaaaaaaagaagaagaagaagaagaagaataaggcatgaacaatgtattcaagatccaaagttttgcacatgcaaagattttaagttcatcacatattttattttgtttgtattcgttgttacaaactttaacacgagaagcgtccggtcccattacggagttatgtaaccaagtttaagataccgttcccacttcccacaccactggaaagccacaataaccccttaattacccctatagctatatacttatcaattaaaggtaattgcatacgtcaaattacatagaaatgtgaagtatatgatattgaaattgtgtttagatagaatagtatcgccattttctcaagaaaaaataacgaatgattattattgttcacacttctcaactatttcatctatacttatatagttatatcatacattttcaagtcaacaaaagatgtaatcatcatgatcgcaaaaagatcagttatagattctcggaatcaacttcgtaggttaaaaatgaatgcacaagtgttggttgataacacttgacaaaaagaaaaagataatgcataagtgacacaaaagacatcgacacaatctggcaaaacagcaatccaaaactcactatctcaggtactttcttgatacaaataaaactaaaagcgtacaagtgtgagtttatcagaaacaaatgtccatagttgcaagaatataaactttgtgattatatgggccgtttctaaggcccaattagaatagcttgatcatcaaaagcccaacaagttttgttcttcttcctcgctctcacactcctctgaagcaagcttcgtcaatctgaatcactttctctggatttggaaaagttatggaagatgaaattagttcgtttttcgaatcatccccacctcagaagaacatggaggagattctagagaatcttaatgagttcatcaaactgaattcatcgtcacaaggcaagatcatagctgttgattatatacgtgacattattgaattattgaaaatgattcaaagggtttttaaatttcagggggaaggaggattgtatgtgtgacttcagggggaacaacggttccattggagcaacgatgtgttaggtatatcgataatttcagctccggaaacagaggtgctgcttctactgagtaagttttgtttctcttatagaaaccctaataaagttgtggtttttctctgtttttatgatcactctttgatctaaattggttttgatttggtgcataaggaatttcgtcaaggctggatatgctgtgatatttctgtataggaggtaacgttggccttgtcatgtgtttctcaattgtgtgtagttgaaagataagtgagatttttgtttttgttggtaatggttatggtggtttttaatatcggtttattatgtgaatctttaggggaacttgccaaccgtattgtcgatctcttcccgatgatccattccttgaatgttttgagttttctgataagactaacattcaaggttttttcttagaacatctctttctcaatctatatagatagattcatgtttattcaaatgtagttcatggtttatggatattaagtgtgtgtttctgctctctatggttgcaaattatgtgtctttatacatcactttgttggttttcagttcatactcacatttggaagctgtgaaaatggctgttatggatcagcaaactgtatgcattagaccatttttttattgttattgaattcgttcacggaaaatgctgagaactcttttcagttttgttgtgtaataaccttgcaaattaacattgcaggcagtagcagaaggcagcttactaaaactcccattctcaaccatatatgagtatcttcaggttcttcgatcttacaccaagctaatctttgttttttgtcttgaggcatatagtaactgcaaaagaaactgccataaagcgtagtgagaattcttcaacagagctgccatggctgaaattactttctttttgtgaatgtttctggttacagatgttgcggttgattgcagaggcattgaaagatgttggtccatgttcaatgttttatcttgctgctgctgtatctgacttctatgtgccatggaagagcatggtacgagtctcatgtccctaagactatgctacacaattcttgtatctgaaagatgttttttgtatatatttggtgaaaccagacagagcacaaaatagaatcaggatctggtcctttagacataagactagctcaagtccctaaaatgctatcagtcttgagatcaaattgggctccaaaggccttctgcatatcattcaaggtcaatctctctctctattctctattctttcttgtattgattctccgaaatccgatgatgtatatgcaaattcttgattcagcttgagacagactcaaagattctgatggagaaggctacaaaggctctaagaaaatacaaagtgcacgcagttgtagccaatgagctatcaacccgtaaggaagaagttgtggttgtttcaagcagcggtaatgttgtggttagacgcgaatgcgataagcctgaatcttttgttgaagataatctcattcgtctcatcgtagatcgacattcaacatacatcaaagaatctcacaactgattgctcaagtgtgcttctaaaggcaaagaaaagtttaaatctttcctccacataaaatagaatcatagagcatcttgttatgtgtatgagtgatgattaagtttaaccataatttaaacaatatttcagatttgttgttagatcttttagaatttaacacattttgaaatgtttgaatttataaataggtaaatcacccaaaacttcacgaattaaaatatttagcgttcaatcttttagttaatggattggaacgaaataatttgaaagtattatcataatttgcaccctgttcaagtcaaacacgtattctctagattaaaatatagttttagtcatgaaaatgtttagcatttttttttttataggtttaatcatctgtattgactgcgacaaagcaacttcgtcgttgacgaaaaagaatgcgtaaatgacaagaaatccattatgatatgatttttgcaaagaaaaaagaaaatccataagataacacacttgactttcttttttggttttacaattacacaatgaacaaagccactaatcaatacatatatgatcgatccaccgtaaattaaaaaaaaaacagtaaattacatatttgtttaatttcttcatcaaaattatggacaaattatatttacagtttaaccataatttcgatgattttaacaaaccttagttttactagcaagtataataatttaaggtggaccgtacgtatataacaatatttaatttacaattaccacaatcatatctttacgtatgtatatcgatcatcagtcgtccttacgtacgtttggtgatgttcctagtggaaacacgagaaggcgaagatgacggcgtcgtttcgagcattccaaaacggtccgtcccaaatcgtcggagatcggacgttcgaaacctactagacgagtcgccaggaagtcgcatgtaataaccggcgttagaaggagagtgatgatcgctgagcaaaaccgacgaaaagcttccttctcttttatacataacaatggctttgtacaaaaatggaatcaaaccctccattttctttttaaatctctgcaatccttaagaaactttttttttcttccttttgatgagatttttttttttgtggttttgtgatttgatcaatgcgagagagggcttctggtgtataatataagagggaagagggttgcgatagtgacgtggcgtgatgcttatgttgccacgtatgcttaaacgtgacggtaaataatgttcttgagaggatatgcatcgaaagataaattaaataaagatgttttttatgagacgatagataatatgtgaaagggaagtctcaacttacataaagaaatcttcatcttctcaagcaatcttgagtttaacatttttatataaatgaaagtatcctcacaaacaaatttgttttggtatatgaaaagagtctctactcaaaattgaataacaaattctcgtatgaagtataaaataatttattcaaaattcattcgtatcaaattacccaccgcactatcctcaaaatcttgaatgaagtcatagtttacatcatagattgggaaaagtttgatcccatagtcattatattttatatattatccaaaaagattagttaaaatgatataattataaaattttgacttcaatacagatataattggctctctcactcaaaaagcaatgacaatactttcttagttttgaagatcgtgttaggtgagggaaaataagaacaaacacatatatagccgttaaaattgaacataattctattttgggccgttatataaagcccaacatgtagaatgtgagcttatattgggcctcacgtggtttatgtcgacatcttctcaaatctgcttgctttcaaatatcaaggaatccggtttggttcggttaatgcttcaattttcaaatgtgatataagaaacaaaatcatttagtggctttttgacttcaaatcggagaaccgccaacgaagaatcgtcgtcttcttcgtcatctccgtcgctgatcgatctcattctttcttaaggtagagctggtggtttctgtaatcgccggtggtgatggcttctaacgatccaaaaaacggcggcggtttcttcgcctctcttgcttcatccatcaccaatttcggatcggccatgagtaaatcagtgaacgggtaagaaaatcaaatcccgaccactttttctcgtttgcgaatcctagaatcgtcagctggattcacatacttgttatgttaatctttgatttggtctccatgtggaaacggaggagtaaatttggttttgggaatgttctatcatttcatttggttgggactcgaagtcttgtgttaattggtgaattctggaaaagatctagtgatatagttggggaagattgtgcatgttgttgtgaagaatttgattttgtttgatggtgttttttctcagtttgatgggatatgaagggcttgaagtgattaatccagaaggaagtacagacgatgcagaggaagaagcagggagaggaagatggaagcaagaggtatagtgctgatttactaaagatttctctctttgttcttgttgttgttacaagaattggaagaaaaaacagtactctggatttatatgttggcttgatttctcaggaacgtgatggctattggaagatgatgcagaagtatatagggtctgatgttacatctatggttactcttcctgtgatcatttttgaacccatgacaatgttgcagaaaatggctgaggtttgtggtcttagattttagattatatgaaagatcttttagcttctggtttctattgaacatgttttggtttctccatttgttgtctctgcagttgatggaatactcatatttgctagacatggctgacaaaactgaagatccttacatgcgtatggtatatgcatgtaagcacatccccactcttcttgttcttccttgtagttttttcatggtgtgactaatttcatctgatctttaatagcatcatgggctatatctgtgtattacgcctaccagcgtacctggaagccgttcaatccaattctcggtgagacttatgagatgactaatcataatgggatcaattttatagctgaacaggtgagtgatttctttacaactcatattccaatgtgacttgggaaaaattatgagttcttagttgacatatgtcaatgttttgttcctcaggtctgccatcacccaccaatgagtgctggtcatgctgaaaacgagcatttcgcttacgattgcacttcaaaactgaaaacgaaattcctaggcaactcaattgatgtctacccagtaggaaggtaatatctcctaactatgtatttatatttaagagtctccttgtgagactaaaacactgaacttttcagtcaatgaatatgtgtgcaggacacgagtgacacttaaaagagatggtgtcgttcttgatcttgtacctccactgacaaaggttcataaccttatcttcggtcgaacatgggtcgattcgccaggagagatggtcatgacgaacctgaccactggtgacaaagtggtgctttactttcaaccatgtggctggtttgggtaagttctttcttcatcaaacttaaaaaccttcaaacaaatctgatcaattgaaatctcatctccatgcttctccatttagagctgaaatgtggacctaatggacagatctggacgatatgaagtggacggttacgtgtataattcagctgaagagcccaagatgctaatgaccggaaaatggaacgagtccttgagttatcagccatgtgatgcggaaggcgaacctcttccaggcaccgaactgaaggaggttttatcaatttctctcctctaagcaaaccctctgcatactatatctagtcacctttctaattatgttacttccacaggtgtggaaggttgctgaagctccaaagaacgataaataccaatacacacattttgctcacaagatcaatagttttgacactgcccctaaaaagctactgtcatctgattcacgtctacgtcctgatagatacgcgctggagatgggtgatatgtccaaatctggattcgaaaagagcaggttactaactactcatagtcttttggttagcttccctaagactactaatcccaaagtaatgcaaaggctaatagaagccgggtttttttttgttttgcagcctagaggatagacaaagagctgagaagaaaagcagagaagagaaaggccaaaaatttgctccaaaatggtttgatgaaacagaagaagtcactcctacaccatggggtgatctcgaagtttaccaattcaatggaaagtactcggtgcaccgcgccacagctgaaaactctgaggatacaaccgatgtgaagttgacccaattcaacccttggcaattccaagatctctctgcttaatcctttggtgccatttgttgtgtaatgcgttgttactttcttagatctttcatttgtttttggtattaatcaccagtttcattgtaattttccataagaaagagtctatattttgataatctactctctttgtaaggctttaaagctgattactgattttctgagttgtcttgaaagcaattttatgaattgaagtgacgtcgttaaaggagaaactatagtagaaggaaactgagaagtttcttggggcttaagcaactaataaaaacgagcaagcgattcttttctttgtttttttttttcctttttctttctgtcaatagataaacggaatggagcagaagtaaagataaaatgaaatcacaagaacatcgaaagtaaaatctcttggtttggtaacaaaaataggaagttggtgccaaaaacagaagataaaccaaaaaaacaaaagttagtaatttattggctgtcatgggtggatgaggtaattacgcaaaaggtcgtggactcacgaggttggttaaaattaaaaacaactgcaacatttattttttaaaacgtttttttgtaacatgaaatttctatgaagattgggtagaatgcatttaccgcgtttcatgtgggacgacgtcttcttattatatcccttcgcaactaaatcctcgcttccatattttctttcaacactttatcatgaatattgaatacacacacacactcataactatgatttttcttatcgtattatttaaagtcattaagtgaacacaaatatatcgtaaagaaaacatctaattatgttagggtttctttcgaattagttcgttaaatatgtctaaactaaagtttatatggtatactaaaccgacgcatcttcttctgattgaaccgacgtatttttttaacttttaactgtcttccataacttcccattttcttctccaccactctctctctctcgctcgctcgcatatatatacgtcactttttctctgatctcataacactgttccgagagtgaggagtagaataccttattaccggtttaatcaaaccggttcagtttccaaatggataatctactctgcgaagaatcttggcccgcgagtcctttaaccccggagcctttaccaaacttccgtcaccgttctcacgacaatgacgtcgtgaagatgtatccagagatagacgcagcgacgatggaggaagccattgctatggacttagagaaagaattatgttttaacaatcatggagacaagtttgttgagtttttcgtctcaaagaagttaaccgattataggttccatgcgtttcaatggctaatccaggtaccttaattattattatctctttgtttgtcctatgtgtgatatttgatagtaaaccgcaaaaatttgtagatacttataacaacctataaaatctttcaagatagcctttaaaatttgggtttacgaaaaagttttttgcatcaaaattaattatcgatattataaaaatatttggtatgtattatttttattttttaacatcatattgttttataaaccaaaagttaatttttggttttactttctcagactcggagtcggctaaatctttcatatgaaacggtattttccgccgctaattgttttgatcggttcgtctacatgacttgctgtgacgtaagtatacataagcaaacacaattacttaatgtgataaaaactttataattgcggttgaattaatgacatgttcattataaataaatgcaggaatggacgaattggatggtggaactagttgcggtaacttcattatcgatcgcatcaaagttcaatgaagttaccactccattactcgaagaacttgaaatggaaggtttaactcatatgtttcacgttaatacagttgctcagatggaactcataattttgaaagctctcgaatggcgtgtgaacgcggttacgagttatactttttcgcaaacccttgtgtcgaagatcggtatggttggggatcatatgatcatgaatcgaattacaaatcatctgcttgatgttatatgcggtaaaatttgatctacatataaaatgtttcttgttataaatgtaagattgacgtgaaacgggaactgatatggaatgttattcttgatgcatgcagatttaaaaatgcttcaatacccaccaagcgttgtggccactgctgctatatggattctcatggaagacaaggtgtgtcgagaaagtatcatgaatctctttgaacaaaatcataaggaaaaaatcgtgaaatgtgttgatgggatgaaaaatcgagacattgatcatcagtcgtcgagaagaagatacagtgaagggaggagtattctgagtctgttgcagcgaggcgatgtgatgaatatgaatggggattataacgttgaagatctctctaaaatctttcagattttccgatacgaaaagaagaagagggatagaggaaaccaccaagacaacattcgtccggcaaaaagaatgacaattgaaatgtcaaattacatttagcattttatgaaagaagcctacaaagagagaaatgtttgtttgttttttaattgtttttacacataccttgactcaattgtaatatatactacagaataatgtattgattaataaaagttaaaaaaaaactactcatattttattttacagataaaacaatcaaatctataacaacaaaaaaactctaattgtaatctgataaatatatacatatcattttataataattaaataaaatcatggaatattatttaatgtaatcatgaatacattcattatatatacatatatatatatatatatattttttaatttatttttgacgacaaaaaaatataaatgagtttataattacattaaatattaccccataattttttttttgttggtgaggccatgattttgttttactgtcagaaaattctagcaaaaaaaggaaaaatgtgttgcaggatataacacgtggcgaaatatgaatggatcggagaaagagagcagtgtagccacaagctaaatcctgaagtgatttctgaagataaagattgttcatatcaagtagttttcgttaattcactctacaaaggaaaataatgagctcgtcgccgttatcttcatctctctttcatcctctgtcgaccttgtcgactcattgccatggtcggagacagaacctctgtttcaatcggaagcaacaacctttcgttgtcagagccgcaaaacttcctgaaggggtaacgtttggaacattttttcaaatattcaaatgtctatcttcaatggtagttaaatcgtgtttttcgcaggtgatagtgccaaaagcacaacccaaatctcaacctgcgtttctgggattcacacaaacagctgagatatggaactcacgagcttgcatgattggtctcatcggtactttcatcgtcgaactggtgagggttactagatggtttctttttgcaagaattgatttaatctaacatacaacgaaaccaaactgaaatatacgttttccagattctgaacaagggaatacttgaactgatcggtgtagagattgggaaaggactcgatcttcctctataatgtatatcactgtttgtgttctttccaacaaaaacatctcttatgaaatgtaaaattctcaagtttaattacacatcaaaacgtgacatttgttgtaaaagtttgagattcttttagagtacacgagtggtgcgagcatctatgattgctactttacctaacggctctgagagagtcaatgcttctgatagagaaatgcgtttgtttctccacgctgattcggcccatgatttcattttctctccttcgctttttctgttctcttgaatcagtagtaactccgcatacccggctgcacaatcgaaaaatcgaatacgcttattataagctaaccatggcaatcgtttctgtttgcaagcaaacgagcttaagcttacctcttgctaaagctattacttcttgattttccatgtttattatccctaaagaatgcagaaagaagttgttgaggacaatcgttgtttatctcaataacctgcaaagtagatagatgtctgtaagtaccttttgaatccagtggaggtgctttcatgagctccaatgcttttctgtagaggccctgagatgaaaaagaaacaggggtaagatgacgaaactccaatgtttttgagtttaaagaaacttatctctcacctcttgaatcaagatagaacttgagcgttcttgctttgctttgtttccatacatcagagccacagcggttaaaatcacaccaaccttaggatgattgtctcctgatcaaatgaaggatgatataaaaggcagattccgttagtctggagatttagtcattgagaatcgatgaccaaaaaaccgcaccacacagtaccgtaatgttcctcagtctttgtcaatgcgtcggtcagtgtcttctccgcaacaccaaagtttctaacaaaagcaaacacaaacagggactagtgatatagccagaaaattcacactaggacctgtatgcacaagctcaaaagtctacccaatgtgtgactcgagctgacccagagcaaatgtggcagccagtgagactgccttcaagttcatgttacatgaacacatagattctttggtctctgtcactccttgaattgccttctgatacatctcctttgccagttcaaaatttccagtggcgtgcaagtattcaccataagaaagtgcaatgttacctattatcatgtagttataaagaggtcccaataatcaggtttcttcaaggctagctccagactaacagaaaaaggctagtgtgtacctttgcagctttcatgattctcaagtcctcgaaataaagattcggctgcacccaaaatccttaccattaaactataccaaacttactttggaattaaaaaaaaacagagagaagagaggttgaggcttgtgtctctaccggattcgatatttcctttcacaagctcagcaaggcctttgatcgctttaactgtagcaaccacaccctgaagattctcatggccactctcttttaccaatttcagaaattcgtcagcaacatccaatgaagcatcatcctaaacacgaaaaaataataatcatatttctaacacaagttcctaaatatagaaacacaaaaacatagcagcaatgttgggatttgaacctgtcctgactgaatcagcagaccaacaagggcttccacagcaacaactgcacaacaaaagagagtttcagatacagaaggccacaaaacactcaacaactcttaagttcacaacaacaacctctaatagccaacgatgagtgtgtcagagtcatgacttgcttaaggcgttcaatggcctcactactattcccactgtaaagatagaaaaccaatcaatatacgtttatagaaatcttaagctaccaattgaaacaaagagagaaaatggtaaaaaaagatgaaacctttcgtataaaagatcagacatggcaagcaagactgttgctttagaatcatgagaaacctgatcatcgttaggttgattcccaagacactgctcaagcactagcatcccttgagcataagattcatctgcaaaaattcagaattcacagagacccatttcgaattcagtcagagacttagagtttaaacacctaaaatccttataactatagagaaagacctgatttttgtgacctagcgtgagaaagagcgtaattaaccatctgaatagcaacatgattcgcgtttggaacgctgatttcaccgtgaatcaatctcaatggcgtcgagtatcgaataaggtttcctctaacggagatcgtgcggccacgaatcgttgccgctgcttctctggagaatttggcagctgcgcgaatcataatcgctcaatatcttcttttttcttgtcttgctcagaagtaaaggttttactcagtaaacgtcggcggagctcttcctcgccgtcgtcactaagagtggccaatttcaatcggtataatttgagtttggtttggaaaaatcggtataattggcttggttttgtgataaccaaataaaccaaaaattgacccaaaagttcctctagaattttttttttttttttttttttttttttgttgttgtggtttttaaagaacttataatccattgttgtatatgttcactttgtaaatcattgtgcaaattcactctttacatttgcaatatgatttgaagtgttatctcaatttggtttcatatgttattttgcttcagcttgaagtaatattgagcaagtagtactcatcaatatgttatatgtatgtcttgcaagatacctacccaccaaaaccttcaacctccccacctgttattaaaagcaagtctatagactctagtgacattcttggcttcgatctctattattacctttcaaaaaccaacaaaatattataagaacattaaaaagagaatgatttgttttgtgtaaatatagcctttgtttaaaaacaaagcaaatcctctcattgaagtaatgcatatatgctctctgctgatttgatgtacaaagtgaaaaaggtcatagcaaaggtaagaaatgttgggacatgctaggctactagcaagtgatgaagtttatatacgcatagataacatataacataatttttgaaagaaaaacaaactgacatataaaatcaaaagttcaaaactctagtgaagcactctaacattttccttattacaattttcatatagactcaaaacagtgaattcaggtggtaacattacgacattattacaaaaattataaaactatattcaaaaatatcaaatcaatttctaagaataattaaaatgttagacaatgagattttagctaggtctgaaaattagttatggattgtaaagtataaacaaatttgccttaaagaaatgcaatgatgaagaaatctatgagtgttaatctttatccaataataaacgtttgagagacatatgaatctttctctttttctttaaatccaactttaacccattcttcatagaagaaggctcacgatcaagcctccatatctttctctttcccactaatcccatgaaagtctcagtttataaaacgttagcacttggcagttccctatacaacaatccacttcaccacaccaatattagtcttgcaacccaagtttccacttcttccttcgaccacgacgtcctcaacatattctttattaatattctcttgaaaacaaccacaacacacacaaaagcaaactttagaagtgatatatccccacacaacaacaacaacatcaacaacaatgacgaaatctgcaactctattccttctctttctcactatctcagccttcactggtacgatatctcttctccttctcgataatttatgaaatgggttttgtttctcgttttgattcctctcaataatagtgactttgttcttttgcagatggagctcagcttataatagtgaataactgccaggagagcatttggccgggaattctcggcggcggaggccaaatcacaccaagaaacggcggattccacatgggaagcggcgaagaaaccatcatagacgtaccggataaatggtccggtcgaatctggggtagacaaggctgcacctttaaccaaaacggtaaaggctcatgccaaaccggagactgcaacgacggctctatcaactgccaaggaaccggcggtgtaccaccagcaaccgtagtagaaatgacattaggctcatcttcctctccgcttcatttctacgacgtaagtctcgtcgacggtttcaatcttccggtgtcgatgaaaccaatcggcggtggagttggatgtggcgttgcggcttgtgaagtgaatttgaacatttgttgtccatcagctttggaagttaagagagatgggaaagtggttggttgtaaaagtgcttgcttggcgatgcaatcggctaagtattgttgcaccggtgaatatgcgaatcctcaggcgtgtaagccgactctgttcgcgaatctgtttaaagcgatttgtcctaaagcttatagttatgcgtttgatgattctagtagtttgaataagtgtagagcttctcgttatgttatcactttctgtcctccaaagtgagaggcttctgatttttatgttatgtttatcatgcagtagcttgatttggtacttgtacggtctgtttttaggtcattgaatgagaaactgagaaaatttgaactcaaaatagaatcaaaatttggtcattatacagtggttaccatccttttaactagtgttctaaagacacaagctttagctggtgggtccaaagacataaaagacggttttagtgcttactcatgatataaggaagcacagacggttttgtctctttgtatctttgtctctaaagagaagaaggttcgttgaagattgtggtccatagtgaatctaagagctgcctctcctctttagcggctgatagatcttcttgtgacataaacaagctcattgctttgacccggctgattgctttgatccgatcttttagaatctgtctgagtctctcatcgcctttcactatgctagaaccacaagtactacagtcttttctagctttcacgagctcaagcaatcctcgaagagcagcttctcttacatcagcatcgaagctagacacgaggtgcatcatcaaatggtgaagcccgaattctatagcaatatcggagtctgagtcattctcttgtagaagataatgcaacaagtttaaagctttcctgaagaatgagaaagtaatgacaaaagttttgaaagttagacaacagcagaacaaaggttacaactttgtgttctctcaaagttcagaggaatccaagcatgaagaaaagtgaagagtattattacctttgaaatctcacactatcagtttccaaagcatcttttaaaccagagtaaccatttgcaatccggaaacctgtgatcccaggtttattattgcgaatcaaagctgtaccccaaatttaccacaatacattcatcagatttacgatagacatttttgtttttgaaaaaggcattcgaccatctaagtatataggatagaactcagagcagcttacatgatattgcaccgagagcctgtgttcgagaatgcatatcggtgtctgaagtaaaccttaaaagcaaggactctaaaccattggcttccataactgattcttgactccgaggattgttctcaactattgtgcttacaacatctgcagacttagcccggatattagcattggagtttttgaggtagccaagaagaggtaccaagcctccaacggaatgaagatctgcccatacattcaaagaagtacaagttaagcccagcaatcaaaagacagatatagaacaaagttacaaggtcaaagtatgaaaagactcaccattagccatatcaatcgattcaacatgttcctgcaactcatccaacaaacctaccaaatcatcataactcaaaatcttagtaaccaacaagagagaaaatagctaagaaaacaatagtgaactccatattgaaccttcaatatcttgaggggtcacttcatgagcctccaaaacttgttgaggtgtctgcaatacctgtgtaatctccttcaaccgcttgactacatctaccgtttgtgattgcatagcttctgcaaaccattttcgatcctcctcactgtctaaccaaacaatttcatatcatcaaaaaccatctaccaaacaataccaaatcaaatagtcaaattccactacatgattcattcctcataagaaactgacgcagaaccacgcaaatttctaaaacaacccaacaaacaacataagctccactaagtgaccaacaaaacctgaaattacaaagaaacttcgtaccttaattggcaagtaggtcgagtaccatcggagtgagagagactccacttaagcagaccgtcccagttaggtccgtctttcgccattgaagcaacggaagaagagaaagactctgcgaaggtcagagagtcagagacaatgacaaatagtttgggccttatgttcacgctaacttaataatgggcttaacaggcccaattgttaactcgaaatatcttgaaggggcctaccttatccacacacaaaagaaaactgaagaaccccaaaaatcccaagtgaaaacgttatccacttcgagagagtgacacgtcacgaagcaaatccaaattcaaaacctttccataaaaatcaaatcacttcttcttattacttcccccaaatcgaaatcagtcacttaaaaccctaaattatgacgatcgcaccggcattgcagacgacgttcgtgtcatcaaccaacttcctgaaacattcttcttcgtggggatcaccatcaccgaacaatgtgattcttcccaaaaacaagagatcttcttcctccgtagttgtcgccgccgtcggtgatgtctcttctgacggaacaatctacttaatcggcggagccatcgccgttgcactcgtcggaactgcattcccgatcctcttcaaacgcaaaggacccgtaaaccactctcatctttttaccttgtgacttaaaccggttttaatgctcgttaaaccaaattttgactgatcaattgcagattatcatagtttattgtccggttcaacattcgaattatcttaaccggactaaatcctctgttatggattttgaaaacgtacataaactcttagccgatgtagtaaactgaatcagagattgtacattgtgagtttaagctctgaaatgtgtgtggtttaggtgtccggaatgtgacggagcaggatttgtgaggaaaggaggagtgactctgagagccaacgccgcacggaaggatcttcctcagatcgtttgtgctaactgcaatggactcggaaagcttaaccagattgataaatcataagtcttcttcatatatatgtaaaaagctccatttctcattcctcttcttctctacaatatacctctgcaaaagtagatagcttggaatgatcaatggttgcttggagatgggtggatatatatatatatatatatatatacaattgcttttttatgtgtaagtttctttgctttcttgttctgtaagaaattgtctgagtattattgtaagtttttaagcagttatagacgaaggtgctcagctaccaaaataaaacgaacaaaaaataaatttaactgctgcataagtaattagagatgaacatttaatggccaattaatgacccaactgtcattggcttcttacatcacatgcatatcaactaatcttcattacgtgtctatttctgtgttttataaataacctcgccagaaacgtttttatattttttcaagcaaatagtattattgtataaaaactaaattttttgtaaatgaaccttacgcgtcagagtagaagattctttgaattgttcttgaagtttcttagatttagtagtgataggataatgggacattattaaatttatcttattggtggaataatgggaaaatcgtgaatttgttcattaatacatttaaattatggggaaaaacaaattcagggagacatcatcataggtaaggagactgctaattaaagaatataaagaaacgtgacaataatttagaacttgaaaacagaacacgtttcgttgcgtcccctagttgcttcttctcaatcttcttcttcttctttttagaccttttgttggtttttgaaacagagcacagtagaagaatacaaacaaagtagatgaagcaaaacgagacattcgatcaagaaagggaagatttgtatcacacgttcgatgaggaagatgaagaaagccaaacagagagctccgttccctcaactcctttatctcgtaacagatccgaagacgttcccgttccgtggcctcgaagttatcggtaaatcattttctttttaagtgctctgtttttgtaagagatctgaagaaattattctttagagaataattttggtgttcttggggatattttcagacaatctatggatttgttgactggagttacacctccgactagtacaagttttgtctcttcatttcgccagagacgacaaagctctgttttcggttcgtttacttcttcaccaagcaaacagcaacttctcatagacaaagacgagatccaaagctctgttgtgtcctccatcaaatcatttcttgcttctcatctccagctatcagtcccaggggatcttttaactccccaagaaaaccgcagttgcacattctctcaatccgttctcaacggtaataattgcattaggaatgttcaatctgagttttggttaggttttctctgttttccaagattagtcaaataatcaaactgaaaccaaatctgatatatattgatgaactgagtttacgtttagtatagcattagtgcgagagtactgagtttacgattatcttttctatttagattgagattcttaacattctctttttgcaggaattaacgttctatgtggagtagctttacttacaatgccttacgcagttaaagaaggaggatggttagggcttttcatactcttctcctttggcattatcactttctacaccggcattctcctcaagagatgtctcgagaactcccctggaatccacacttacccggacatcggtcaagctgcattcggaaccactggacgcatcctcgtctctgtaagattatttttcaaataatcaatcttaactttgtttgtgtgtgaattgtgatcctaacttaacttgggtttggaattacatttcagatacttctctacgtagagttatacgtaagtaccaaactctctttcatgtttcatatcatgattgaagaaattgaggtcctaactttgaatttttttctgtaggcatcttgtgtggaatacataatcatgatgagtgataatttgtcaagaatgttcccaaatacctccttatacatcaacggattttctttagattctactcaagttttcgccattaccacgactcttattgttcttcctactgtctggctcaaagacctcagcttattgtcctatctctcaggttcatctcgtaattggcacacacaacaatctctgagatttgaactctttaattaaatttaagaaatgttttgtttccttagccggaggtgtcatctcctcaatcttgcttgcgctttgcctcttttgggctggatcagtagacggggttggatttcacataagcggacaagctcttgatataactaacatacctgtcgcaatcggaatttacgggttcggtttcgggagtcactctgttttccccaacatttactcatccatgaaagaaccttccaagtttcctacggtgcttctcatcaggtaaaacaacttttgcttatagcgcaagaaacctctaggtctaattttcatcacttctcatttcataaaataattgtttgttgcgttatgtagttttgcgttttgcactctattttacattgcggtagcggtttgtggattcacgatgtttggtgatgcgattcaatcccaatttacactgaacatgccaccacatttcacctcatctaaaatcgcagtctggacagcggttagataaccttccaaatcaagaatctcagaccttcttcacattctgttcataataattttctctcaattcctatctcatttgtatgattaggtcgtaacaccaatgacgaaatacgctttaacgatcactccagtaatgctaagcctagaagaactcataccgtcttcatcaagaaagatgagatccaaaggtgtctctatgctctttagaaccatattagttctctccactttggtcgttgcactcacagttccattcttcggtaaactatctctctctatcaatttctagttaccctaacttcttgcacaagaaacccctttgtataaaacaatgaccgaactcgttaatgtaacaacgttaattgcagctactgtggcggctctgattggatctttcatcgcaatgcttatcgtaagttctccaagaacaaatcaatctcaataattgccggaaaaattaaggatcaaaacaagttcttgacgatttcggttttggtctttttcaggcgttaatattcccgtgtctctgttatatcagcattatgaagggtagattaactaactttcaggtaagaatataattgaaaacttcgattttgattatatatttttactgtcaatacttcgtagaaaattgagactgaaaagagtttttatttttcagattggaatttgtattttaatcgtgataatcggcattgtaagcggttgttgcgggacttattctgctatcgccagattaatcggcgaaatgacctgattggttttgcagaataagtacgtatattcgaaggaataaaccggtatatacttgaataaaaccggtttttgataaaccaatggttttttgtgtgaagataatccaatttgatttttttttttggtattttattcatagttttaagtccattttactcaatgtagtcttcatttttttttttcatttgctcatttaaaaataaataaataacagaatattttggaaaatgggactggagtaacacttgcattgatggatttacacagttttggaagttagtcaacagagaagacgaaaagaacaataatcaaaaaaattgcaaattcgtagaatcctaaaaatatcgtcagcatcaaatctacaccgcaattaaaataaaaggaaacaaatattaaagaaacattaaatagttttctctccattgatatgtttccgtatatagaagaaatctctttgactcgccggaaaacaaaaccccgttgttctccgtctatctctccctctctctctctgcacatttcttctacctttctttgagatttgagaaaacagaggaagaagatgaaactcgacgaagaattcttacacgacagagaccattcgtttctgacagatgacgaggaaaatcaagcagcacttgcttgttccgacgatgaacacgacggagacgacgacggtcggagaggcggagaaaattcagattcctcctctccgttatcacgagaccgttctgataacaatctctcggatgtctcaaaccctccatggccacaaagctatcggtaacaaactcataattttcctctgttttttcaatctcgaattctctaaaattacaagagttcagatatttttagatgaatttatttcagacaatcaatggatttgttgaccggaatgactccaccttcggtgagtttcatgcctcaaagcagttcccggagattagcctcttccttccagaagaagcaacaatcttcgttttgcgattcgttgtcttcttcctcaagcaaaccccttctctctcaaccagttcctgacaaagaagaaacgattttacccgtcaaccctcaatctcagctcaagctctccgtcaccgatcttccattaccggaacctaacctctgctccttctctcaatctgttctcaatggtaaaatcatgaataactcttaatctctaatgatgattgctctgtctcataaatagaggaatgttttcatatatcaagtttatttgcaggaaccaatgtactgtgtggattagggttaataacaatgccttacgctattaaagaaagtggatggcttggtctgcccatactcttgttcttcggagtcataacttgctacacaggtgttctcatgaaaagatgtctagaaagttcccctggtattcaaacttaccccgatatcggtcaagccgcctttggaatcaccggtcgcttcatcatctctgtaagtttttgatcaatcaaactcaaatatcaaaattttctgtttcttgaaaatgaaactttggttcatgaattgcagattcttctatacgtggagttgtacgtaagtttcatcttagttattgttaaatattcttgtctaaattcttccactgatagttgacaatttattgttaatcgtaactctgtttttcaaaaataggcagcttgtgtggaatacataatcatgatgagcgataacttatcagggctattcccaaacgtttcattgagcattgcttcagggatatctttagattctcctcagatctttgcaatcttaaccactcttcttgttcttccaactgtctggcttaaagatcttagcttgctttcttacctttcaggtttgaaaattttcccactgaaaactctgattatctcctcattggctatatataatgggccgttcttgtggtcttaattatctagttggaggagtcttggcgtcaatcttactcggtatctgcctcttctgggtcggtgcagtcgatggaatagggtttcatgcaacaggacgagttttcgatttaagtaacttacctgtcactatagggatttttggatttggttactcgggtcattcggtttttcccaatatctattcttcaatgaaagatccttcaaggtttcctcttgtcttagttatctggtaagtccaagaaacctatcctttacttgtttcacaaggaaccctaatagacatactcatcatccttctttcttatgcagctttagtttctgcacggtcttgtacatagctgttgcggtctgcggctacaccatgtttggcgaagcagtggaatcacagttcacattgaacatgcctaagcacttctttccatctaaagtcgcggtctggacagcggtaaaatacaacattctcttatattctctgtatactagtataaccataaattgatgttcttcaatcttttaggtcattacaccgatgaccaaatacgctttaacaatcaccccaatagttatgagtctcgaagaactcattccaacagctaagatgagatcacgtggtgtatcgatattatttagaacaatgctagttacctctactttggtggttgctctttcagttcctttcttcggtaatgtctctatgtatccctaacttcctacgcaagacactcatcccactatagcttctctgatcgaattttctcaattacagcgatcgtggcagcactaatcggatcgttccttgcaatgcttgtggtaagttcttccatcccaaaaaaattgaaactaaacattatcaaacccaaggatattcatttttgttttgttttgtcgaaggctcttatcttcccatgtctatgttatctcagtatcctcaagggtaaattaagcaacacacaagtaagaacatacctactttactttaaatgtaataattatttgattcagctttagtagtctttaactgtttttcgtatgtgtgttgtgttttatttgttcagattggattatgcatattcattatagtcttcggggtggttagtggttgttgtggtacttactcggctatctcaagattagccaaccaaatgacagattaactgaaattttcgacggcgatttaaaattaggtgtgttgtgttctaatgtttattatattatctagtttttattcagttttggttcagatttcttttaattgttttaggaaacaagcagagataaaaccacatatacttcatttcagttttaacaaaatgtatctttcataccctatgtattatggtttgtatttaacaaaaacttaagatttattgtattttagtttatatttatcttgcataaaaattgtactcacttgcaatcgtttgttatctgttagattaatcaatgaaatcattactacaaataacgacgataatccacttaactctaattaagacctttgaaactcttgttcctaagctgcaatcatcaataaaactccttaaacttctcgcagagacgaacccggctcgaggaattaacattataggtgatcagaatagaaatttcccaacctcttggtcagctattaggtatatttaaatgcatttcagaaagaaaaaaaaagtttaatagtttttaatcagatgatataattacgtagtacaattttaaacctaacatattgtgaattcaaagcaatgtgtcacacgagctagctagtgggcaagtgagaagaagttgattggtaagtgaaggtatcctgatttggagcaggattcaataaacatggacccaaactcataaatgatagggctttgtccttaaaacagcaaggcaaataacatgtgcaaccatacctctcaattttcaaaagtctttttccatgtgaatgtcacatcttcaaactctcatccatttttattccatttcccaaaagcaaaacattagttcatcttacagcttctttattctttatttagtgttttattcttgggttcaaatggttttggggaaaagtgaatataatgattacctgcaaattaaagttctgacatctaaacatgggatccaaactctgcaatgtatattacgaagtcgtttgatataacacctctcttgataaaagatgattagaacctaaagtaattttaaaatatggtgaaaaattagactcttggagtatataaatggctcaatctgtattgcccgcaccgcccaaactcccatggcaaatccattgacgaaaccaaggtaaaaatcacatgctttgagcgtttttttaaaacagaagtgtaagcttaaattttttagtttaatagtagtaacaaattcaaccttgtgaagagatttattaataatattaaaatcattcccctaattatttgccttgagtttcgagccttctactgtaccactcacacattaaaaatcatcagactattcaaactttcttacatggttgattagttcatctcatatatgctcagtatcatactcttgcagattaatttttcattttaattatcaacgaattttttatttaattattcatgaccaaaatacatttattttttttaaataaaacaaataataaatttggaagtcaaaaatacaatcaatagaaaaaaaagtatgacagtgatagataatatttgcagaatattatgtgaaagctattttctctgtaacaataaatgagaaaatctttattattttacatgaaagaaaaagaaaacaaaacagagatatttttccagctgaaaagaacaaacatctctcattgatgttcagtgaacttgcaccaaacttcacttcttctatacttcttcatagccacaaactcagttctttgcaagaaacacaaacttaagtattcaaaatatcgtcatcatgttctcaagattccatgctctgtttcttctccttgttctttcagtaagaacatataaatgtgtatcttcatcttcttcttcttcttcttctttctcattctcttcattttcttcttcgtcttcttctcaaactcttgtcttgcctctaaagacccgaataaccccaacggatcatcgacccaccgacaaacttcatttccaccacaacgtcactctcaccgttactctcaccgtcggtactcctcctcaaaacatctccatggtcattgacactggcagtgaactctcctggcttcgttgcaaccgttcctcaaacccaaacccggttaacaattttgacccgacccgttcctcctcttattccccaatcccctgttcctcacccacttgtcgtacccggacccgagacttcctcatacccgcttcttgcgattcagacaaactctgccacgcaactctatcctacgccgacgcttcctcctccgaaggtaacctcgccgccgagattttccacttcggaaactccaccaacgactccaatctcattttcgggtgtatgggttccgtatccggatccgacccggaagaagataccaaaacaactgggttattgggtatgaaccgtggttccctctcttttatctctcaaatgggtttccccaaattctcttattgcatctccggcaccgacgacttcccggggtttcttctcctcggcgactctaacttcacgtggttaacgccgttaaattacacgccgttaattcgtatctctacgccgttaccttacttcgaccgtgtagcttacaccgtccagctcacgggtattaaagttaacggtaagcttttacccatccctaaatcggttctcgtaccggatcataccggtgctggtcaaaccatggttgattccggtactcagtttactttcctgcttggaccggtttacaccgcacttcgatcccatttcttaaaccggacaaacggaatcttaacggtttacgaagacccagattttgttttccaaggaaccatggatttgtgttatcggatttcaccggttcgtatacggtccggaattctccaccgtttaccaacagtttctctggttttcgaaggagccgagatagcggtttcgggtcagccgctattgtaccgagtcccgcatctcacggttggaaacgattcggtttattgtttcacatttggaaactccgaccttatgggaatggaggcttacgtgattggacatcatcatcagcagaacatgtggatcgaatttgatctacaaagatcaagaatcggtttagctccggtagaatgtgatgtatcgggtcagagactcggaatcggatcgtaaaccatagataaccagtgtgtaattatagttttttgcctacgtagaaatggtttctctagtagaaaggtatgcacgtgactacaatgagatttgtgttacggacacgagcgggtgtgtaataacttcgagtttggtagtagttagttagttgtctctgtttgcttttgacatggtcttttctttgcgtaattaatttttagctgagagttatatcacaaaatctttaatcgtcatcagttttggacttttgaatcgcactatgttttttttcgttattcaaaataaagttacaaaagttaatgttaaaaatcgcgaaaaaacaaacttgttttgacctatgtcaatcgcaaaagtgtatatgtagatttgatcctttaacggatccctctagttacaacgacatggattctttttgggcgatcgtgtgtttaaagaggcccaaattaatttcactaaaaaagcccataataaccaagatttgggcatcaaacaggttcaagttgctgacgagttaataatttgaaacgtcagggcccacaatagtctcactcccacgtgggaacataacgcggtttactgtctttttctttagttcacgcgccgttgcacgtgcggcctctgtcatgggccaacggtttctcgccaggtcatggccgtgatttgcagtcgcctctggttgagaacgcggatttgcttttctcctttccttctataccgaacatttgaacttttttaatgaaagaatattcggacactagagagtagagatcttaatcacacttcatctccaacaacaaaactaatatctggaggaagaaaattaatcttctaagatcatggatgatgcagataagagttgtagcccatcgctggatcataggtttttcttttcaacaaaacataatatcttctttttacttatttttccttctatgttttatacaaaacaactctatgtaaagatttaaaacttgatctcaaaacttgtatcttgaatctgcaaaatcaacccaagtttctctgctcgaattactctctttcgttctgctttgtacgtttcccgcaagttttcatcttctttaaatcttaaacttcctgagctacatagtattgtgtccttagatgtttgctggttttcctcactatgttttaaggtgaagtgtgtgtttgtgtgtagtgtttaggatttgtatttctacggcaacttgttgatgatgacttaagagatactcaacacttggatcttatctttactatggacaaattttacttgtggatttagattgtggactaacaagatttatgatactttctctttatctcagtgtggtatcaatgaaaaatgttaagtcttttgttgactggtgtgaatactttatggatagttacttgtaattatggatatgtccctttatggtataagctgagtgttagtcttctatttatcctttacctctttttgtctcatggaaaataagtcaattcatgacctttcactagattaaccatatatgatttcagcgatatcaacgatccgatgatagttgctgtggaatctctagacacaagcaaaaagagaaaactgcatgctgaagaatcagacttgttacccttaccaaaacacttttgttctgagcatcaagcctctcttgttaattcttcatgtccatcatcagttatagattatgcagaatgctcttatgccatggagaacacaaaaaccagcgatgaagcctcctcttctgcatcttttacaggcccttctttgtacatgtttaaagactctatttattcaaccggaagttctagttctggttatgctgctacatcaagcatagaacaatgcttttccaaagttgatcacaaaacacaagaagatacccaagactttactcacatggaattcatttatcacgactccgaatttgcggtcgaagatcttcaagaggttctgaatccagttgagtcttatattctttcttctgcaaggtggagtgtcagcaaccaaggtaatcaatgaaaagctaaatgctttagtgtcacgcattgtgtatgggaattatttgtgattattctttcaccatttggattgcagattccaaagaagctaccacgaaaccaaccattgatcaagagtttgagcagtacttttctacactcatgatgtaaacaacaagaatctatctacatatttatcaatatcactaatcactgcaatgtttatataaatatttcaccttgtttttgaatagaaacatatataaaaccagatcagaacaaaccttttacatgttcccgatgttgcagacaaatgatccatggatctcaccttcaatactactatatagtagtcttagacacaaatgctgaaactattcacaatgatcatttcccttaactacttgtccaatgctgatccggtaaggtttatagtgaaacattgatgggcataaacatagtaaaaacattgaaagcaaattatctctagaatcataaaaaacaaaaggaaagattattgattcagaataaaaaagcattaaaaaaacaaaatcctccaaaatcatatctcttagctttcttccaagaagaaagttgcgagctctttctccaaatgttcttcggtagttttcttcactgcgagaatcggatgatagtaatcagagtgagtatccatacacttggaaaacgtcccaaagagtcccgcacacttagtaaccaaatctttgttcttctcagcttcctcctcagtgaaattgcaatcatcattccaagccgtaaatgattctttgcaaccacctcctttcatgaattctacaaacttctgatcttcctcttcgtttatttcgtctagggaaacagtagttgaagacaggaaagtcttcacatggctttcttcatttgaacgttgctatatccattccaatcatcggtttatagtaatcagagtgagcctccatacacttctgtagcatcgggtaacactgaccgatagtttcattcttctttttagaatcatccacgcaatcttgaaaatccatatatacttgtttgcagccacctcctttcatgaaaacgtcatgttgattttgccaatcgcttgaagaatctaccactttctcctgcatcgggatttggttattgtattgagatctgtactccggtttcaaaatcctagatgatatgatccccatattttctcagcagggagagagattggatcttatgaaaatcaaggaacagacgaagacgataggtcagtcacagttaagagaggatatatatatatagggattacacgagtatgttaaaagagatgaattgaaagctggagaaataaacaaaacacaaatgaacagagaatatccaaataattaaccgatcccaacttacaaaatctacccgaaaatatatgcaaaaaaatcttttcaccaaatatatcggatataattaagagaatatcacaagtatgactaggtctttgataatcaaaaaacaaaaaaaaatggggatcggatccccataatttctcagcagtgagagagatcggatctttgaaaatcaaggcacagaggaaagacgtacgataggttcaaataactttgtgaagatatatatatttagggattaaacgagtacgtcgagtagacttggtatttgatgatattacaattttcttacaaaaaaaaatttggtttcttgtatgaatatttgcattgattgaaatctggtaacaaattttcgaaaaacttgtatcttgaatctgaaaaatcactccaagtttctcatatactctgctcggaatcggaatttcccttttgcttttcatttttttcatcttctgtgaatggttatttacatgagctataaagtatcgtgcctctgaggtgctagatggttttcctcactgtgtttaaaggtgaagtagtgcgttttggtgttaggattatcaagtatagctagcatagcaacatgttgatggcctacgagatactgaacacttgaatcgtaagtatagctagcatagcttatctttgctatattcaaacaaagtacttgtggatttagattctggactaacaagatttgtactttaagagatccttcctcttcatctcagtggtacctatgttaaatgtaaaatgttgtctttagttaaacggtgtggatactttatacttaagaaattaacttggaagttacaattgtagatagtcatctctttactctcatggaaaataagttaatatatgacctttactatacgactatttgctttcagcgatatcaacgatctgatgatagtcactgcggaaaccttgtgactcagagcaaaaagaggaaactgtgttgaagaatcagccatgtttacccctacggaagcacttttgtctggagcaacaagcttctcttcctgattcttcatccgacatagaatctgctgaaatgctcttatatgccatggagccatggagtacacaaaaaccggcaatgagacctccccttttgcgtctctcccagaaccttatttgggacacaaaaaccggcaaggacacatgtctaatcattcaaccggaagttatggttctggttatgttacatcaagcttggaccagtgttgttccaaagttaatcataaaacacacgaagatgttgaagactttactcacctacatgagtcaatattttagtgtcacgcattacaaaattgtatgacattcatttgaattgcagattccgaagaaactacctcaaaaaccaaccattgatcaaagagtttgagcactactttttcaacacttatgaataaccaaaaaaacagagcaaataaagacattggttcatctgaattttcgttaagcttttgatgttgtcttgttcacagtttctaaacctcactttctcacccaattatgtagttgaaaaaaactctctaatcaataaacagcataatcagagtttaacaatcaatctttcaatctccgacaagaactaattagatctagaacacaagccaacaaatttcgaattggaaaacagatcaaagtttcattttagcaaattccaatttcgatacacaaacaaagtcatctctctgaaagataaataaaatctaataagagaacaaaccctaaacatgtatctacagagaagaaagtaaaaaaaaaacctagataattcaaatcaaatcaaatctcaaaatctaagcgcaagcttctcttcgaggctgtgcgtagaacaaagtttcaagatctggtggctgaaagtacccgttcctcggcggatctcgttttctcaccaccatcaacttcttcctcggcggcggtggacaaacagacgccaccggaatcctatacatcgtgcttctcggcgtcgtacatccttcctccgccatctccgtcttcctctccaccacctccattcttctctctcgaactcgaaatcgtcgtaagagggaaaaaatttgaagtctgagaagaggcggttacatctttattttatatatcaaaaaaaaaaaaaaaattcagattatttccttttaaaaaattcgaaatttgggagggagaacaaaaaaggaatctttctcacgaagctctttctgaaatatcaatcggacggtggatatggttttaaacagcttgatgtgagctggctatgctgacgtggtggaattttagtggttggtagcaccaaatttaagtaacgcgtgacccaaccgcaccgtttctcacgctccactatcattattggtaaatctttattatattaatatatattttgtccacttttatcatatttaataatattttttatctgtaatttatccgtttgtgacggcgcgaacttgcgcagcaagtccctttgggcgggaaaattaaaaaaggactccttcctttttgcagcgaaaattttatgttcgtataccgatcggttttggtaacattaaaccgaaattgtaaaccggtatctttttaatccttatatagcttctggaaatgaatcacgagggtggcacgtgcggtcttccaccaagttattcacgtgatttatttctgagagttaaacgcactctcactgttaccgttgttcttgtcctccagttacaagccaacgtagcaaaaaataaaaattataagtaattgatttttgtcaagattatatattgattatggtataacaaaactttagaaatataaaattatcaaaaaattattatagtagcaaatttaagagaagcccataaaccacaaaaagtatcaatcggtcaaacccaagaagaaagcaaaaaacccaaaaaaacttaaacggcccaatctgattaactatataatatatccgttttggcccattaaaataaacattaccggcggcgaaaagagctccgagaatatgtggggtgctccggcgattaataattaaaattagtttattgtaacttcatgtttttcgttgttgtcaactactaatccttttcacttgactcggtcttctagtttcaacatcggttaaaatggtcctcagataagttcttaacttgtcgttttaaattacaacgtagacgtattgtagagcttcttatttaaataataaaaacaacgaattttatgtggaaatagagttgtttgcaggtctttgttgtactcaaggaaattttcttgcaatttgttgtttcactgaaatgtcaacgtatatatatgtgaacatggagagcctatcacattctctactctcgatgatcatgagtacaaattatacaataatcctagttattagtttttaccattatataatactaattgatcaagcaatattgcttgcggctccacttttatatcaaacgaaacctagtcctggactcctagtaatttaattttcattttggagattcagttatcagatttttttattaaaaaaatataaaattgatatatgaaaaaaaaaaaaaaaaaaaagagaaataacagggagattgtagtctacaatttgtagtggagtctcagtctacatacatgagtcatattgatgtctttctatagtatcaattaagttttgacgaatgagtgacaaaatattttgttagtgcctttagttttgagtgattgtccttttcaccacgacttgacaatttttttctatgagtccgaattacgaaactacacataaatttctgattcatacgccaaaagaaaaaaatgttatatgatcactaacacgatttgaatatgaatactatatgataagtaatacattgacttttatcgtaactcgttgtactagcagaatagctttagttaattattttcccttgttattatattccaaactaatctaacctcttctcttggacctctatggagttttctttgttaatgttgttagtatgtttacatttagtataaatttatacgaagatgctttgtgtttctcttcttacagctcttattacttaatttaattttaattatattcgtgagtaattttgatattgacgattaattgagttaatcaataagaacagaaaaatgactaatcgaaaacccggaaataaccatttaaaaagaaagaaaaagagcaaagacgtcaatatcaatgccaactagctacttttgatataaatgcaacagttcaggaaaaataagagttatattagtcaaaatcagaatcaccaattatagtttaaatcctattgatcaaagtgacattttatacacgtaattctaaaaactattaaattatttaattaagaggaatttcatacaaatatctaacatttttaaaagttaccaaagtttctaatcgggacacttgcgtttattgattttctgttcgtatttcttcacgatcaagagtccaattatttgccactttaattaatcaaaaaaaacaaaatactttattaaaacaaaagctgaattgcaaacagctgttgttcctcctaaacttagactctcatgtctttttcgaaagtaccaattatatggccactttgtatatcaatttcttttctacccatatttgcttctatgtttaacttttaacaaatacttttatgacataattatattcagacagatggcactttagcatcttatattcacgtcttagcaaatttggtaaataaagatatttatgacttttggtatattccgaagcttaaatatctttaattcattgatataaaaaatctaaacagcatttgcgaatatatcaatagttagctacacgagtaaacaagatattagatctcagtataaaatttgacccaaaaaaaagaaagatctcagtataaaaatactatattgaagtagttttggggattcagacttgcttttgggttactaaaattcaatatatacttattagggatctaatgtatattagtgtaatggaccattacctgaaagtttaaaaagtttgtcaactagtagtacacattaccacgcgagtttattttgtgtttagttttacatgtacaagatactaaaatcattttccaaaagatcacttatttgttattaaattgttgcagttgaatcatgtttagctttgatttatttttaatattgtccaaattaatattatcaagttaagtatgtactattaaatatactactactgaatttgaatcttgagagcttttaattacatggggacaccgtaccttatgatgaaatgatacatgtgaatctttgtgttcacacggttaatgattccctaaacatatacattttttttttttttggcatttaatgacatgaattagatattgagatctctataaatctatttaaatggattgtttgtttctaattgattataaatcaaaaattcaaaccataaaagaattaatctcgttcgatctgctttcaggacaatcgtgcaagttgcaactttgtaaaatggagacacgtaatagatacttagatctatccgtgaacactttaatctaaccaaattaaattttgtcgcagtacccatatgggtttgtactcttttcatactcaaaagttttaactataagcataaattacgaattaaagttaccggtatggacggcagaaataaataaacagcttataatatggaaaatggatgcatgatgcacatgtcattaaatactaaatatatcaccatcatatgttcacatttcaattgtcaacgatatgcatttcacctttttctattctaataaccagtggtgattgataggtagctaatcagggtaattaaatattaaaaattaatacaaaatcattgaaaaatgaaaattatactaaagaaaatttgatcatgctcgtgtttcgcgtggcatcttcaaggaattcgtgctacaagtggagggttcatagacataagtggaagcttcaacaagtaggaagcttcgaggctgcatgcatgcaatgcaacattgaatcgagctggcccatcattattttttcatttttcctattaccaaaaatttctaaaataaatataactaatttcctaggtatatgaatgaaagagtcgattcccccacccaaaatcatcattcaaaaacaattattaaatcttttttgagtaaattgtttttaacgaatttgtggtcttccaatcgttgaaaaaattatcatatgagtagaactgtattgtcattgcactgcgattagttttttttttttttttataaacgattagtttaaattattgttgactactatactactactcttcaaggaattcgtgctccaagtggagggctcataaacataagtggaagcttcaaggctgcatgcatgcatgcaatgcaacaatgaatataatcgagcagctgacctatcattacttttttctttttttctataaacaatatttcaaaccataaatgtaactattttctaatttcctagctaggtatatactcaaaatcatcattccaaaacaattaattaaattatttttgagtaattgtttttcaacgaattatttgtggtcgtccaatagttgcaatatttaccattgcactgcgctttaaattattctttttataaactatttaatataaattattgttgactactacagaaaaattttaaatcatgaaaatagttgatttttccacatactccgaaacatactttggtttttggcatatataataaatcttttctgttattttttcatagtatgttaccaaaagaacgaaacttgggttcatgattaatccaaaaccaagtgcagaacttattttcgacttttgagttagttaccattctcaaaacaatatactttcaaaatatatatctactaaaattgatgaacaaggatacgatttagagacaagaggatctaatagtgtatggatccacggacgaaacaatcgggacgattttcgatacatattgtcacagctactgagattcaaaacaaatagtgacttaatggttaaattccaaattctgagtctctctcaacacatttacttaattaattaagttcttaattaaatggtgtccttgggtctaggaactagacgcaccaaaaaagtcataaggaaaagaagtttaaatgatttttagttcctcaataattggaaccaaagagataggatcggcttttgatcctatcttcttgattaaattattaaacccaataaaccaattattgatggaaaacaaaagaaactttaaatcactcttgcttcgtacaaatattattgtataatataatacgtattattaagtattttgttatgtatataacttcgtgtcccaactttctataagtttatcatatatatatgatgctaatcagtaatcaacttggtatgttaccaaaacaaatcaaattggtctgttacagtttttagacttggcaaccgatattgaattcagattacacgatcggaattccaaataaagtattactcacgcagccaaattattggacccaaaaaaaatcaaaagaacattcgtagactaaataaaaactaaaagcaaattatatttgaatatgatagacgaaactagctggctaatcgattctaaaaaagagaggaaatgttattatcagtcccatagattcgcggtatatcatggatacacacaagcttgggtttgagaaataactagtgtttctccaaaattatatttcctattcgagaaaaataaaatcatgtatcaaatcatgaaacaaatcatttgataatcctgtaaaactgatcatgtattagcacgaaaataaagaattagaaagcatagcgtagtcaccttcttaatttgacttgtacgttagaacttagaaacacgcggattttaattaaaaaagtagttaggagaagaaacacaattaattaattttaaaagcaaatatatataattaaaacaaatgaaatatattgcaaaatagcttttaatgatcgaaaagagccagagagactttgctataaaaacccctcctctgcctctctcaatccctcccccacaccttctctttctcttagcatactctgctcttcctctctctgttgttctctgttccaaaggctttgaggtaaataaagaaaactactagtcttctttttcaacgcctttccgtttccttgttctgtttatcaacatttcgtcggttctatgttttccttacgaacttcatgccgtttggattcttgcgtcttagattttttcttttggtccaccattttcaccgtgaacatcgtcgtcaattcactaattttacgtacatttatctaaatttatttgtgatagttttttatttttatttttatagttaaacttgatttcgttaaaactatttttttttggaggcttgttacttaaaaatagaactattaccaagttgaaatatttctcatgccaaacattgaaccggatccataaccgatcagagctaaggttttttaaattaaataaaaattaagtcaaacgggtcaaataatggtcataactcggttaataccggtttaattttgaatactccttcagtaatacaaccattttacaaccttctatttttgagagaccaattcatcattgtagtgacatagtacacaattaaatttttgttgtccatacacgtgttatatgcatacaagatacatacgtacgtatataaattcgtatatgattcatcttttgtctgtacatgcatgattgcatgtagtactaaaaattattaggagccaattagtggttgaaattcgctgaatctctcagttcacgtttaacaaaaatcttatccccagtttttttgggacatagcaactttgtgtccattcattacacgaaactatttctgtttttttttttacaaatctaatctgaaaacaaaaaacaaatcggtccttattatccatgcaaaatctctgtgaaatatcagaactaaaaccctaaaaaagaaacacaaatatttaagattttcttccctgatccaatcaattgtttcagaaaaaatggagttcgagaaccggtacggacttgcaacgtcgcagaagtacgactgtctcttgttcggtacgcacctaaccggaataaaccaattacttttgattaatttacacgaatattttcttgaccggtttggtaaatttctctttagatttggacgatactctttatcctcttagctccggaatcgcaagagaatgtgggaacaacatcaaaggtaatattttttttttcccgcaatcgattatcgattaacaattcattcttaaattggttttttgtctttccggtttaatagattacatgaccgagaaactcggtatacctaaggacaaaatcgtcgaattgtctgatcttctatacaagaactatggaacaacaatggctggtcttagggtacgtgatcaatatcatctctaaacttccattatttattcttacaaattatttttgtaacattttatcgttctctaggcgatcggatatgaatttgactacgatgagtaccacagcttcgtccacggtcgtttaccctatgacaacataaaacccgaccttgttcttcgcagcctcttgcttagcctccctctccgcaaagtcgtacgtgtcataatcacatttttatttaattaaataccatacgctatataatatagtttgaatagaaaattaatcaacattgtttattcccgtaatcagatctttaccaacgcggacagagttcacgcggccaaggcgttgaagaagttgggattagaggattgtttcgaaggaatcatatgtttcgaaacgctaaacctcatgcacacaaacgctgcgtctaacaattccgagatttttgatatcgttggacattttaaccggtctgaaccggtcggttcacttcccaaaacgcctgttgtgtgtaaaccatctgaatctgctatcgagaaagctcttgaaatcgccaatattgatcctaaccgaacggtatagcaaaccggatactttcatttttttcgtttttttaaatacatggacaacaaaactaaaatttatattatttctcatcgcagctgttctttgaggacagtgtccgaaacgtacaagctggaaaacgcgttggtctttacacggttctggtacgattatcttagtttaattaaccaaacataatcaagtttaattaaacaaaacaggatagtttaataatattgactttggagtttgttattgttgttttcaggttggtaaatcgaccaaagtcaaaggagcggattacgcgttggaaaacattcacaacatgaaagaggcgataccggagttatgggaatccgacaggaaatcgtcggatgttggatattccggcaaggtcgccgttgagacttctgttagagcttaggaggagtactgtttcgccgttgtacctaattttccaccactgtcattttcattttcttttttcaaatgacgtaatgtcatttttgttttttttttcgacttgtgtttataaaagattaataaaaaatgagaaaataatttccatctagtttgtaggagaaataaataattaaatatcctctaggtatcttctagaatcaatcaaatataataaacatactttaaaaatgcataagaaatcaacaagatctcaccatacacatttttcttttttgccacccatagatttctttataaaaaaattaaagatatatgctatatacttttcaccatatgctacaaaatgttgatacggtcgtatctaatctaatatagtaattttgttaaactaatttaaagattagatttttgttttatcgtaataagtctacaatgtgatcagttgaaatggctaagtaattttatttcaagtagttgatactaatattcttcttcaatatttgctcatgagtcatgaatcatgatggatgttgacaaaaaaaacaaagcttgtgagtctgtgacagacgacagttcaattatacagttgtttcggaatatgtacagaaccaacaaaaaaagtcaataatttcgtagtttaattatggaagcttttgataaaaaaaaaaacaaattatggaagcatgtcgtttttgtggcgacgagttcatgaaaaacgtcacgtagttagatattcaaaatgatcaattgccataaataacagttatggcccataagtaacagagatagtaagggctgggcccaaaaattcaattaagaaattagtaagagtgtcagtaatttttaccactaagaagatgacatgtgtaatcacaacgactaaccttcaaatcagacggtcatcaatgctcacaccaatcggtccgttcccatactctcctttaatggcttctgagagatatttaagtttagcaaaaaaatcctaagcttctacaatggcgaatcttcccaccgttctcgtcaccggcgctagtggcagaacaggtaatcacttcttcaatttcgttgccgccgattttgattttagctatctttcgttctgttagggctagtggtgatgttatggtttatgcatgtgatgatctggaatgaatctttcttttgatattgtaattgtggttgttttcatggaatcgataggccagattgtgtataagaagctgaaggaggggtcagacaagtttgtagcaaagggtttagttagaagtgctcaaggaaaagagaaaattggaggagaagctgatgttttcattggggatataacagatgctgatagcattaaccctgcgtttcaaggaatcgatgcgcttgtgattctcactagtgctgtgcctaaaatgaaacctggttttgatcccactaaaggtggaagacctgagttcattttcgaagatggacagtatcctgaacaagtaattaccatgaacatctatacattttcctttgagtttcagcttaagtatttgttcattctagtgtaacatgaattggttttgtgtaggttgattggattggacagaagaatcaaattgatgcaggtatgtgtactttcttccatttgtcttttgtttaaggttaaattgcctaatttggttgagcttctatgaacagccaaggttgctggtgttaagcatattgtcgtggtcgggtcaatgggtggtaccaatccggatcatcctttgaacaaactgggaaatgggaatatactggttggtggaaatttctgtgtgtttgtctttcccaaatgagtttagtttcttacactgcgatcaatatttggctacctaatatgtgttcaggtttggaagagaaaggctgaacagtaccttgctgattctggaactccttacacaattatcaggttaaataaattctttagagtgcttctattacaataccctttttatattaccacatcaaaattcatcccaaattctgtagtttcaaaaacttctagatacattgtgtcttggtaattggttaagctttttattctgtggatcaaggagtgttattctctatatttgcgagcctgttcttacttgttttcaccatactttttctgttgatgaacttagagctggaggacttctagataaggaaggcggtgtacgagagctgctagttggtaaagacgatgagctacttcagacagacacgaaaaccgtccccagggctgatgttgcagaagtctgcattcaggtctactcatctgcttttattttgttaacaaaattttcatatcctctccttggtttattattttcagatcttgatatttcttctttgcaagtacaggcattgctgttcgaggaggccaagaacaaagctttcgatctcggctcaaagccagagggaaccagtaccccaaccaaagacttcaaggctctcttctctcaagtcacctctcgtttttaaatcattatctttgttgccaataagaacatttgggatcaaaccttctaaaataaattctgtagtgtctatttgaaaggatacgttctttcaattcaatgagaatattggggttgaatgttcaaaatttaaaattttgatcatacagtaacttctccagagctattcattgaggtgaaacacttattttcatttagtctaacacatcaatcttatagccaacccctttaacaaattaaagaatctactttgttaacgttttggaattaaaaatagaaatttcagttgaaaggagacgatgaaccctttaagagacgtcatgaagatcgaattaaatctgcagttgaaatcgctagacgggatactttggatgattcgttatcaatttggtgttataggagcgtgaagaacgaaagaaacgaatgagatttgacaggcactctcgaaactctcagctggtttttcgtgatcagtcttatcagaacagagacattagagtttatgatcaaagcaagctccctcagggtaagtaaattatatgctttggcacttgttcaaatgttaggttcattggtttgttaaagtatgttttcttcttataataggtcggctagattgtcctggttttggtctggagataggattgtatgcttccttgtttatcttgtatgtgatgttttttattggtgcgtatgattttggtcttgaatacgacattgaatctgaacactgctgtgtatcttactttgacatggctagtaagagtgttactccaagagcaatatcaatctttattgttcatagctaatttttacatgtctctctgctgcagactgattgggaaggtggattctttccattaacgatgcacttcagtgaggattatccgagcaaacctccgaaatgcaaattcccaccctaatgtctatccatctggaactgtctgtctctctatccttaacgaggattacgtaagtactcttctgtttctttcttttcatttctccatcagaaaagccaaatgtatcctcaagctctcttttcttatgttgtatattgaccagccattaccgtgaagcagattcttgttggtattcaggatttacttgacacacctaatcccgctgaccctgcacagaccgatggttatcatcatttctgtcaggtacacttccaacgaaaactctaaacactttgataggttatgaaacataataggaaggaactaagtcgagtacatgattttgcatgatccagttgagtacaagaaaagggtgaagctgcagtccaagcagtatcctgctcttgtctaaaacctcaaaaaagagaacgcaccaaaactgatgacaagctctgaatatattctcgtcatgtgtgtcattgtgtttaaatgtcattgggtgattgaaaactcctcattttggcaccttaagacactggaatctatttattttcggaaaaaaactcttctttctctatataactgttaatattcttggtactgattcagttggtactgattcagttggtgttgcttctatattattataaagaaggaatgcaaaacatgacttgaaatagtgtttgtctctagtatccatgtatacgtatatctctttcaaatgatctcttaggaacatttgggaggtaatgtatcaagccttttaaaataaaatctccggggtcaatttgaaaggagcccataacattaagtagggcgttcatttcattaattgggtttgaatgttaaacataaagcatggggaacatttagtgatttagtaaaaataaggggccaaagatagaatttctcgtttttatcacccgcttcatttgcctttctatcgccacaagaacacagagagagaacgattagcccagttccgatatcgttcggtggcttcttcatctgaagctacgatgatgtcggtgagagcaatcaatggttgctccatcattcgcaccgccacttccgccggcggtcctcccgtctctctattccgccaccgtattcagcgcctcagagcttctcatctccgtgaattctcgaaattacgtttaaattttccactaatccgcgcggataggcggtttctcggaaatagtgatgctccgagctgttcgacttgcatacatagtctggtcgaaagtgtttccgaagagctcgaatccatcagcagacgcaagggaagccgaatgagagttcgcgccagtgtaaagtacgtcgcagtatccttctcttactgattattagcaaaattaagtgaatcattgtgtaattaggtgaatttgtagggtgaaattaacaagctacggagaggttctagaggataagctagtaaaccaggagctagaggctggtttgcttctggagtttaagaaggacgcagacagagtgttgttggcagttcttcatagacgtgatggcaagaagaattggatggtgtttgatcaggtttcaatcaaaacttactactcatttacttgctctagcgtcggtggagtgtttgcagattgttagacttatagaaagtttaatgttgcagaatggtgttagttgttccatcaaaccacagcaaattacatacatcgtcccgaatgtttataattttgatcatacaggacttactgattttctccaaagggctcaagataacttggtacgtaatgacattttaaaaggtttacaagtcttttttttctgtgagttgtagtctaagatgaggttgtcatgttgttacccatgaatgagcttattgttattgtttcgatgcaggatccccaactgcttgagtttgcttggatggagttacttgagaagaacaaacctgtgaccccagaagagttagcagaggtactatatatttgagttaatgtaccggttgaacccgtgggttgttaatgcttttaatttgcagatgatatatggtcgcgcagatcctcttgaaagctattgtgctcattttttgctatcacaagacgagatatacttttctatcttggagtcaaaaggttctcgatcaatatatagccctcggcctactgaacaggtatttcttgtgcattttttcctgagttatcttttggattaggtcatctatgtcactagaatggtttttttctgtagcttttttcctttcttggtagtgtaaatcctataatattaggattttttccatctatctagtacagctgagctgcatttgctccataagtttgtgaaatcaagaaagaattctatgttgataaaatttctaacgatacttgctgtgatgtaacttggcttgttaggtgatgatacgtgattaatgctaagagatctagattgtgaaagtttggactcttctattgctttacatgatttgtcctgaagaccttctttctctgatgatctcacttccgttttttttgtaggtggaagagcttttacgaaggcaacgcgtgaaggaggcagaagataaagagtttcaggagtttattcaattgctgaagtctgccaagaaggcacctagtcacgccaagccccctaaatcttcatggctagctgatgataaagtccaagataggattggctcacttgaagctt

SEQ ID NO: 1396 - DNA, 96575 bp, Arabidopsis thaliana
aagcttgtgagtctgtgacagacgacagttcaattatacagttgtttcggaatatgtacagaaccaacaaaaaaagtcaataatttcgtagtttaattatggaagcttttgataaaaaaaaaaacaaattatggaagcatgtcgtttttgtggcgacgagttcatgaaaaacgtcacgtagttagatattcaaaatgatcaattgccataaataacagttatggcccataagtaacagagatagtaagggctgggcccaaaaattcaattaagaaattagtaagagtgtcagtaatttttaccactaagaagatgacatgtgtaatcacaacgactaaccttcaaatcagacggtcatcaatgctcacaccaatcggtccgttcccatactctcctttaatggcttctgagagatatttaagtttagcaaaaaaatcctaagcttctacaatggcgaatcttcccaccgttctcgtcaccggcgctagtggcagaacaggtaatcacttcttcaatttcgttgccgccgattttgattttagctatctttcgttctgttagggctagtggtgatgttatggtttatgcatgtgatgatctggaatgaatctttcttttgatattgtaattgtggttgttttcatggaatcgataggccagattgtgtataagaagctgaaggaggggtcagacaagtttgtagcaaagggtttagttagaagtgctcaaggaaaagagaaaattggaggagaagctgatgttttcattggggatataacagatgctgatagcattaaccctgcgtttcaaggaatcgatgcgcttgtgattctcactagtgctgtgcctaaaatgaaacctggttttgatcccactaaaggtggaagacctgagttcattttcgaagatggacagtatcctgaacaagtaattaccatgaacatctatacattttcctttgagtttcagcttaagtatttgttcattctagtgtaacatgaattggttttgtgtaggttgattggattggacagaagaatcaaattgatgcaggtatgtgtactttcttccatttgtcttttgtttaaggttaaattgcctaatttggttgagcttctatgaacagccaaggttgctggtgttaagcatattgtcgtggtcgggtcaatgggtggtaccaatccggatcatcctttgaacaaactgggaaatgggaatatactggttggtggaaatttctgtgtgtttgtctttcccaaatgagtttagtttcttacactgcgatcaatatttggctacctaatatgtgttcaggtttggaagagaaaggctgaacagtaccttgctgattctggaactccttacacaattatcaggttaaataaattctttagagtgcttctattacaataccctttttatattaccacatcaaaattcatcccaaattctgtagtttcaaaaacttctagatacattgtgtcttggtaattggttaagctttttattctgtggatcaaggagtgttattctctatatttgcgagcctgttcttacttgttttcaccatactttttctgttgatgaacttagagctggaggacttctagataaggaaggcggtgtacgagagctgctagttggtaaagacgatgagctacttcagacagacacgaaaaccgtccccagggctgatgttgcagaagtctgcattcaggtctactcatctgcttttattttgttaacaaaattttcatatcctctccttggtttattattttcagatcttgatatttcttctttgcaagtacaggcattgctgttcgaggaggccaagaacaaagctttcgatctcggctcaaagccagagggaaccagtaccccaaccaaagacttcaaggctctcttctctcaagtcacctctcgtttttaaatcattatctttgttgccaataagaacatttgggatcaaaccttctaaaataaattctgtagtgtctatttgaaaggatacgttctttcaattcaatgagaatattggggttgaatgttcaaaatttaaaattttgatcatacagtaacttctccagagctattcattgaggtgaaacacttattttcatttagtctaacacatcaatcttatagccaacccctttaacaaattaaagaatctactttgttaacgttttggaattaaaaatagaaatttcagttgaaaggagacgatgaaccctttaagagacgtcatgaagatcgaattaaatctgcagttgaaatcgctagacgggatactttggatgattcgttatcaatttggtgttataggagcgtgaagaacgaaagaaacgaatgagatttgacaggcactctcgaaactctcagctggtttttcgtgatcagtcttatcagaacagagacattagagtttatgatcaaagcaagctccctcagggtaagtaaattatatgctttggcacttgttcaaatgttaggttcattggtttgttaaagtatgttttcttcttataataggtcggctagattgtcctggttttggtctggagataggattgtatgcttccttgtttatcttgtatgtgatgttttttattggtgcgtatgattttggtcttgaatacgacattgaatctgaacactgctgtgtatcttactttgacatggctagtaagagtgttactccaagagcaatatcaatctttattgttcatagctaatttttacatgtctctctgctgcagactgattgggaaggtggattctttccattaacgatgcacttcagtgaggattatccgagcaaacctccgaaatgcaaattcccaccctaatgtctatccatctggaactgtctgtctctctatccttaacgaggattacgtaagtactcttctgtttctttcttttcatttctccatcagaaaagccaaatgtatcctcaagctctcttttcttatgttgtatattgaccagccattaccgtgaagcagattcttgttggtattcaggatttacttgacacacctaatcccgctgaccctgcacagaccgatggttatcatcatttctgtcaggtacacttccaacgaaaactctaaacactttgataggttatgaaacataataggaaggaactaagtcgagtacatgattttgcatgatccagttgagtacaagaaaagggtgaagctgcagtccaagcagtatcctgctcttgtctaaaacctcaaaaaagagaacgcaccaaaactgatgacaagctctgaatatattctcgtcatgtgtgtcattgtgtttaaatgtcattgggtgattgaaaactcctcattttggcaccttaagacactggaatctatttattttcggaaaaaaactcttctttctctatataactgttaatattcttggtactgattcagttggtactgattcagttggtgttgcttctatattattataaagaaggaatgcaaaacatgacttgaaatagtgtttgtctctagtatccatgtatacgtatatctctttcaaatgatctcttaggaacatttgggaggtaatgtatcaagccttttaaaataaaatctccggggtcaatttgaaaggagcccataacattaagtagggcgttcatttcattaattgggtttgaatgttaaacataaagcatggggaacatttagtgatttagtaaaaataaggggccaaagatagaatttctcgtttttatcacccgcttcatttgcctttctatcgccacaagaacacagagagagaacgattagcccagttccgatatcgttcggtggcttcttcatctgaagctacgatgatgtcggtgagagcaatcaatggttgctccatcattcgcaccgccacttccgccggcggtcctcccgtctctctattccgccaccgtattcagcgcctcagagcttctcatctccgtgaattctcgaaattacgtttaaattttccactaatccgcgcggataggcggtttctcggaaatagtgatgctccgagctgttcgacttgcatacatagtctggtcgaaagtgtttccgaagagctcgaatccatcagcagacgcaagggaagccgaatgagagttcgcgccagtgtaaagtacgtcgcagtatccttctcttactgattattagcaaaattaagtgaatcattgtgtaattaggtgaatttgtagggtgaaattaacaagctacggagaggttctagaggataagctagtaaaccaggagctagaggctggtttgcttctggagtttaagaaggacgcagacagagtgttgttggcagttcttcatagacgtgatggcaagaagaattggatggtgtttgatcaggtttcaatcaaaacttactactcatttacttgctctagcgtcggtggagtgtttgcagattgttagacttatagaaagtttaatgttgcagaatggtgttagttgttccatcaaaccacagcaaattacatacatcgtcccgaatgtttataattttgatcatacaggacttactgattttctccaaagggctcaagataacttggtacgtaatgacattttaaaaggtttacaagtcttttttttctgtgagttgtagtctaagatgaggttgtcatgttgttacccatgaatgagcttattgttattgtttcgatgcaggatccccaactgcttgagtttgcttggatggagttacttgagaagaacaaacctgtgaccccagaagagttagcagaggtactatatatttgagttaatgtaccggttgaacccgtgggttgttaatgcttttaatttgcagatgatatatggtcgcgcagatcctcttgaaagctattgtgctcattttttgctatcacaagacgagatatacttttctatcttggagtcaaaaggttctcgatcaatatatagccctcggcctactgaacaggtatttcttgtgcattttttcctgagttatcttttggattaggtcatctatgtcactagaatggtttttttctgtagcttttttcctttcttggtagtgtaaatcctataatattaggattttttccatctatctagtacagctgagctgcatttgctccataagtttgtgaaatcaagaaagaattctatgttgataaaatttctaacgatacttgctgtgatgtaacttggcttgttaggtgatgatacgtgattaatgctaagagatctagattgtgaaagtttggactcttctattgctttacatgatttgtcctgaagaccttctttctctgatgatctcacttccgttttttttgtaggtggaagagcttttacgaaggcaacgcgtgaaggaggcagaagataaagagtttcaggagtttattcaattgctgaagtctgccaagaaggcacctagtcacgccaagccccctaaatcttcatggctagctgatgataaagtccaagataggattggctcacttgaagcttatgccattgatgcatgggcaagcactgaccagcagaaattggctggaacggtaagtcaaccttatatttcttctgtggtaatatctcttcagttttttctatgtgattgcgaagcgacatctctgaaagaatattctcttcgaatgtcttgtgatcgttttttcactgtttggttattgaagcaaactgtcaattgtaatcatgtgtatttttgtggttgcttccttacagatattaaaatccatggggttacagaaaacgtctgtatcagcactaaaccttctcatagatattggatattttcctgtacatgtcaatcttgaactgcttaagctgaatcttccaacccaccactcagaagctatcactgaagctgctgaagctcttctttcagaatcgtctgatattgatgcggtgagcactttaccctgccttggatatttgtgttatatgaaaatatttattctcgtgtttgtggcgctttaggaaagtcttgccgcaatctttccctgtggttcaaaattcttactttctcagactttgtttaggttaggaggattgatctcacacacttgaaggtttatgcaattgatgttgatgaggctgatgaggtaaattcgtacaagtctcctataattattctgcaatgtctagggttcaaaaatcaattcttattgctatctcatctaactgtcagcattcttttcggttttgtggaatttctgcagcttgatgatgccctcagtgcaacgagattgcaggatggacggataaagatctggatacatgttgctgatcctgctagatatgttacacctgggagtaaagtggacaggtatgttcgacgcatgtctctgatcactataagagctaactttttggaccctctaatttattaatatgtgcttcagagaggcaaggagaaggggaacttctgtctttctgccaacggctacttatccaatgtttccagagaaacttgccatggaaggaatgagcttaagacaaggagaaaactgtaatgctgtctctgtgtctgttgtcctgcgttctgatggctggtaactcaataatcatagctcttttctggagttctaatctaccaaatgctgagaactaaaaaagtaccttcaacttcttgtaacagtattacagaatattcagtagataattcaatcatcagaccgacctatatgttgacgtatgaaagtgcttctgagctgcttcacttgaacctagaagaagaagctgaactgaaattgctgtctgaggcagcattcattcgctctcagtggcgccgtgaacaggttggcttgagttttgtgttgtctgttatcaaaatcttatcatagaaacatagttttgctaatggttttatcttgtctaaaattttcaacgtgaaaggttcattagtcttctttgggcattaggttcttgctggatgcttttttcatatgtcttttatttaatttgaaacacctgtttttcctgggcttacgcagggtgcagtggacacaactacactagaaactcgtatcaaagtggtgaatcctgaggatccagaacctttgataaatctctatgtagaaaatcaggcagatctagcgatgagacttgtctttgaaatgatgattctttgtggggaggttgtagcaacgtttgggtctcagcataatattccattgccatatagaggacagccacagtcaaatattgatgtatctgcatttgcgcatcttccagaaggaccagtacgttcctcatccattgtcaaagtaatgcgtgctgcagaaatgaatttcagatgtcctgttcgacatggagtgcttggaattcctggttacgttcagttcacgtctcccattcgtcgatacatggatcttactgcacactatcaggtaaacatttttcaccatcttgcgatttagatttgactctttttgttattgtcttaattgattgatctatttggatatcgatggggtacatacttgtgctttctgccttatccttcatttgaacattcaccatatcaataagttggcaaagcgtgttgtttgaattacagattaaagcttttcttcgaggaggtgacaattttccattctctgctggtgagttagaaggtatagcagcatccgtaaacatgcagagcaaagtggtgagaaaactctcaaacaccggtctccgctattgggtaatagagtttctcagaagacaggaaaagggtaaaaagtacaccgcattggtcttgagatttgtcaaagaccggatcgcatcccttttgttggttgaggtaagtgtttaattccacatgaatcttttctcataataagcggtttagatcatgttcaatcacttgtaaaatgtttccaggtgggttttcaagcaacggcgtgggtgtcagaaggaaaacaagtgggagatgaaatcgaagttcgagtagaagaagctcatccccgcgacgatcttattctcttcaaagaggttatctagagctttaaaaacacacagttcaggaaaattcattaaagtcggtttctctaaacatggagatgcctgaaactgatagaaagcttgtgtttacaaaagaggtaactaatttccactaatgttttaactaagcctgatatatatcaatgaattgaatacaatattttgctcttttggtgttaaagaaacttgctgatggacgcagccattggtggcttgagctatgatctgctataaaagttgaacacatggtaatatggtacgcacttaatagggttcatacaattttacatcatcttgttattctaagtatttatggaaacttgcgtttgttctgtagagcaaaggatgaaaaaggaatgtatatatatactatttcaatgttgaattttattgatctaaagtcttgaacagagctcgaaggccttagaaaaatatcaacttgatataattaagctcttaagattctttgtttcttcaaattctgtggcttggagtttaagttaggtcagatataaatcatatggacttcacattattgagcccttagctctaggcttaaggtatctatggattatgtaatatcttacctcctgaaatgtaatccttaataattagaggttaagcttgttgtcgattagtttttggtttcgatttttgtcttttcttatttaaaatggtctttgttattataaataagattgatcgtcgattttttttttttaaaaagacagattaagtgcccgtaaaccccataacaccacatggctgtccaaatctaaaatcatttgacatttttaccaataacaaattgcgttaaattacttattgataaatcagaaacttgcaaatactatcgaatatctcgattagtcggttgtacagttgtatatgctaatgattaaaactgaaaccagatgaaatggtagcttctctttctccacgcctattatctaattcaatttccaacacaagaaaatatttacttgtaagctaatgataagttgggtgggattatgacaaagaaatacaattcgtacgttatttaaaatagtcaaaatcgtaccgagtggtgggaagaaagaaaaagtcaaatgctgaaagtgtacgtcgtagtagataagcgtatcataaaaaaattaatgtgaagcaacaacaattaaaagaatattttcatgttactatgttatctaaccattaatacaagtcaccgactaggtgataatttggtatttacgtaagaatagttatgcatgtatcgacttatagacttttttttttttaaaaaaagggcaaccctatcagctcatactttatttcattgcattttcaacgacggctaaggctaatttgacagaataaaaacatatcaaaagtgaatctagaaccaatgatatttaagcaaatatatttgttttttggtttttatatcttataagtagaagttaagaacaaaatagcatcttttaaactgactatgatgtattgtcaaaaaaaaaaatgactatgatgattaatgaaatgtatatacccaactaggaaccaataaacaaagaaaaggtaatttgacggtttctgttttatacattgggaaatactaacagatgtcaagtggtacggacggcgtaagatctaaggatctgtttgcttctaaaactcaaccctaacatgcatctttactaatttctcataaagctattgcgtaaaacatattgatgactaataacatcggtaaaaaatattaattcacatgtagtaaaatgaataacttgtcgtctaatgccataaatgatttgttctaggtgaacaatattcttggaaacaatctcatgtgcttcttggaattttacttcaaataaatctctgacttttgttgacttcttgtttaattacattaacatacgatctatgtgtaaacaatgtgattataatacattttgtaaaatccgacaaaacccaaaaaaaagtgtggaaacatttatggtgtacgtaacgtagtaatataaatatgaaagccctagggtaatggcttacgtaccttgaaaccaattatttatagaattaaagtaattataaagtagtggcaataaatgaagccacatggatatagtggtcgaatatttctataaacaaatcatagtattatatataccattatgtgaaatatatatacaaaatatgtacgtaaatgtaaaatctgtttttgaattcgagtctacggtataaaatgatgattacgtttttgcaaatattgtttttaggttgttgattgtggattaggtatatttatataatgtgatcttctgtattttttctgtatgtttcgtattttactatttttgtaaaagaatgaatatacattatacgtaacatttattcaagtggggtttaaaccagtcatatttatatatgcataggtaatgtatgtggcaaaacgtgaggttggccccggaatcagttgaggcccaactgcatcgacgcacggctttttaattgtgatgccgtattttccgtgttcttatacggacggacggacactctcgtacacaaatagaatcgtttcacaaataaaatatcatacactttgttagcaattaattatagaatcgtttaaactataagaattagtgtgtacttgtgttgtcactaaaagatggaagaagaaagggaatgaaattcccgttatcaaatatttgtaatcatttatctttgttctatttctatataaacacaataatttcaagattatgtataaaatatgaattggattggatcggagggttttggttcatgtgggatttctgattagagacacaactcgcaaattgaccaaagaaaaatgcatgaggtgcccatgtgcggtccacgtgcatttgctatctttttggcttatatacaaaatttaattattaactcgactaacagtgagtgaataaacaatgctgcatttctctgtttgaagaaaaaaaacaatgtagcatttttctgacaaaaaagtaataatgtgagttttatattggtgcttcttatttttcgtaagtagatttttttttttctataagtagaattttcttaaaattgagtataaatgcttcttttttaaaaaaattcaacgcgagtgtaaatgcattttaagagaacgaatttgatgagctttttgaaagaaagttgatataatttaaataaatgacattcttacaatagtaaaactcttaacagttatttttgtttacgtcaaccaaattaagtaaaaagttgacaaaaaagttttaagtaagaagagttctcaaagaaattatctaattaatgacgttctataaattctccaacaatcatttaatatataattgcaaatcatcgtaatataatcacttttagttaataagttagttattagttaaggtcactgtgacgcagatctcagactcgacgcgctacaactctcgacaactacaattttcgccgcgaattatgatcgcgtgaatatgacatgcatgacttgcgcgtggtatagatgactttaagcaccaaagccacgtaagccgccggaaatgtttagttactgggccaagacgtattttattttgggccgattaatcaattccatatctattatctttgacctatagtttatcgcgtttactatttttacctattgtttagttactaggccgacttttgcatgtacgtaaatttttgatgtattctttattctttttagatattcactttttgctttagagaaagtttgaaacaagtgttcatttttttttggggaataagtaccaaagattggatatttatcatcttatactcataaaacataattttcgtattttttgtggggtcaaatttaatatttaaaaaacaatttaaatagtgattgaacactttggtaagtatgcattctcgtgaattcggtggaataaatttatattagatccacgagggaaaaaatacggaattacaatatagttttttttatttgataatttttattaataaaagaatacttaaattagaaaaataattaaaaaaaggcgtaaagtcatttgaagcctccataagtagccttcctagcttcccctctccctctcacattcctctcttctctctctcttttcccaaaaaccaaaaccttttttccgtaccaaggtcaacaaatggcggcgaaagtaattacatttatggcggttatggtggttactgcctttacggccaacgccaaaatccccggagtttacaccggtggtccttggatcaatgctcacgccaccttctacggtgaagctgacgcttccggcactatgggtacacacacacacactctctcccacctcctctgtttttttttcattatagacataaatgtttctattattcactaatgatacgactttgtaggtggtgcgtgtgggtacgggaatttgtatagccaaggttacggagtgaacacggcggctttaagcactgccttattcaacaatggtttgagttgtggctcttgctttgagcttaagtgtatcaatgatccaggatggtgtcttcctggaaacccatcaattcttatcaccgccactaatttctgccctcctaactttaatcaagctagcgacaatggtggttggtgtaatcctcctcgtgagcactttgatctcgctatgcctatgtttctttccatcgctaagtataaggctggtatcgtccccgtctcttaccgcaggtaaactcatctccctctcttactctatgctctgttttcactaagtttctcttaatatactctgtttgtctagagaaaatcccatttttttggttagcttattttcgagatcgatcctaggaaatcgcctaatgttgcttagtcaaagatgttaagttatttcttaactttttttagtaattaggatccgaatgtaagaatctgtgagcctgaagattttcgcatgttcactctattctttattccattttgtcttaatttcccgagaaagttgcttccttttcttttatttttctcgggaaccaaacatgaaaagtgtttataaaaaaaataaaaataaaatcgagacatgaaaagtttttctgtaaacgtacttttttagttgagccctatgcaatcaccttttctgtcttttagtccctttaaagccataacctttttaagtctttaactttaactaacgaacctaaatccttttcaatgtaaaattacgaaaacacccttaagccccgggtcagttattaaaccatggatccgcgttaaaaatcccaaggttgattgagtcatgtacacatatctccatcccttagaataagcaaacattattttgccttgaactcagccaagagcaaaggaccgacacttcctcactccaccacatacatttgccgggtcaaattttttattagcaacattaatatttcgtacataactaacaatacagtattattttttgtgtgattgtaggatcccatgtaggaagaagggaggaatcagattcacaatcaatggattcaagtacttcaacttggtgctggtcactaacgtagccggagctggagacgtcattaaggtgagtgtgaaaggatccaacacacaatggttagatctgagccggaactggggacaaaactggcaatccaacgcacttcttgtcggccaatctctttctttccgagtcaaaacctctgatggccgaagctccacctccaacaacattgctcccagtaactggcaatttggccagacctactccggcaagaacttccgcgtctgatttctagaatatgaaaaagagtcgtgtggcggaagatactaaagcttttttttatatcaaatatatatatttacgtgtctttgatttagtttacgatttggaattggggttttaccatttttcccttattttctcagggaaagtattgggattgcttggtttgcaagttagggtttactttaaagattagggctatattgttttttttgttttttttggtgtgttgtgtcttgtttggtatgtagtcttgtagagaggctgaagcggctgcagaaagaaagggttgggataaagattcatgtagcccgcagctctcttttacgttatgattgtattaaagtatatatatatcatgaagaaattaaacatggtttcttcgatttatataaataaataattggattttttgtttcaagacaaatagctcgctcggactacgtttgtatttaaaattatctatatacattttgaaaataaatcaaacgtcatgtttagtttttaaaatttgagtatcgtccatatataaatatttgcgtctttaaacaccgttccgaaaactcgaattgaatcgatgcacggtagtcgctatacattgagatgagtcaaaactatacgcacggaatctaaagatttatacggtccagaattccgggatatacggtgtaccatacatattttagtatgtacttaacttatgcgagaggtgatgtatcaaggagaatagaattcatgtgatgtgatgtaaatgcattacaccatcgtcatgtgcaaccagcgatcacaaatttattagaaaaaaatgaaagagtaatataagatattgaataagattttaccgaatctcatctcatattctgataatttggtaggtggaccaaccaatgtatgatgctttttttaatctttagatattagaatattattgtttattttagcccatgaaaatgtttcatatgctaacatctagatgcaacttgtttggatagcatcagtccatgatgtactaacagaggcgttagttattttttttctttgtaaatgtatacatgcatgcaaataattatttttagctagttagcctagtttcgtatgttttatgaatgaatgttgtaaagttttgtctttaaatcacctttttattaatctaaatacatcaattagatctgatgaatcataaacacataacaaaaagtaaaagacaaatacctctaaataccacaaaaacaagtttcacatggcaaaaaaatatcattccatttcttaacaatataagaagtaccgtatataatctaggtaccaaaataatcttttgccttcactcaatcaaaaataattaagaagatagatacgtaaaatatatgtagtctctttcaatgtttcatacgaatcacaaaaaatcacgaccgaactattagcgtcattgtctactgcgaataacaaaaccgaaaaaagtgtgaccgtgtgggttgagtatgtggctggtcgagattgataattttcatctcaagttgtcgtcaacaatatgaagccgaataatatttgaaatcttttttttttcagtttagttttaatgtaaagatataacattttttagataaaaaaaaaacagaaagtaaagatataacatttttaagaaagaagattgaaaatatcataaattaatgtaaaaaaaaacgaaataagatgaaagtgggaataatagaaaatatgtacaattatgttgggctatctgtttggtcggagtaactaaatgaatgttttagaaaaagaacacgaaatcaatggatgctttttgcagaaaggaaaaaagagatataaagattaaagatggtggagagcataaatcctaatattatctcatcgttaaagcatcaattttttcggcacaacagaacaaaaaacaatagacgaacgtaaaaaaactacagatgatttcaattgtgacatcttatatgtctgttgggtcaattcccatctttaacaaagaaagatactggttacttatgataggacatgttatgactcgtgagcaatatgaataaaaaagatgtaataaaatttacatactcgtccagaaattagatgtaataacttattaaattctgatttagtaaaagaactagagttctgatatgtagaaagtttagctttggttaaaaatcgattgtcacttgtcttcatgtgtatatttctcttggtattttctcgtttttaggatccaagcatttgagaaaataacagaaaaataacataacaatgtaaaatttacttttgtgaaaaaaatcaactaaaatataaattataaaaaatcatatttcagagtaacaaatagttcaaaaaaagaaaaagaaatattattcgtggttaaaaacaaataacgtaaaaatattactattccacttttgctccaacgtctctcttgcttaatttatcttagaactctgtttgagcttaagacgaaattatcctcaccacctgcaaccgtagagtgaagtctcccggcagcccagccattgttcagcatccgtgctggatcaccagtcacacggctttcttcagtccgtgtttcaaactctggaagcccattagctttcctctctttccttctctttctctcttcatctctttctttcctcagccaactctcaactgttctcatcaatgacttcttgcttgtctccttcactttctccattggcaatgctaactgcaattttccgtttgctacatacacctaacaatggcagatgtgatgttattatgtgttgtttgtaggtagttttagtagaggagcaaaacagagaaatgagattgtgtggttatattacaatgtgtgttggccagtcctctaagccatcgaatatatgagtagcgtagattatggttgctcctcgttcttcacattcctttctcagaaacttcaaaaggtctgctctagcgagaacgtcaagatcaacagttatttcatccaaaaggagaacctatagatgattcaagaaagtaggattcagataaattgttgaagcaagtttcatgattagatactataatgatcttagtccattgttttaagcatcaaaccatttcatcttctgaagcatcaggtttggctaaaacctgtatacttttggttggagataagggtttaccttgaatggcttcaggagtcccatacagatctgtacacgtcttctttggccatcggataccttgtgcagtctccatgagatgtcgatatccaacacctgaaccaaacacaattagaacaaaacagtaaggtggagaatcacattgatttgatgtaaaaaaacagagtaataatactccagacaatgaagtgctcgtaagtttggtatgtgacaaagatcaaagatcagaccatgctctagctgattttttgttttaacattggaattcagaatgaacaaatgagttaagactatagcaaatacttaaaaagtaaatttgaatccttcccaaaacttcaaagaatctcatgtaaagatgcattaacagaacctaacccatcaaatcaaagtcagatttttgaattatctactcaccttgatcaactcatctcttctctgaggatcaataccagccactccaaatatcatcttctccgccgaaatgtccatttgtatcggaacttcaaatcctgcaaatgcaacatcacgcctccactggaaagaagaattgacaatcccaattactttcaattccaaatcaatactcagaattcacactaaatttgttatccaatcacatccacagaaacacaaagaattgaaaattcatcacgaacctcgccaccgagataacagagatcaccagaagaggtcaatccagtatcatgaaacgccgagcgacccagaaccctaaccatatgcggctccaccatgtgtttccctcccaatatcttcagaatcgtcgttttccctgatgattcaaatcactcatctaatcaaattgagatctcatacagacacatttcgagctaaatagataacgaatttcaaataccagcgccattagatccgacgaggagacaccgatcgctggaattaagcgtgattgagaaatcttcaataagtggtttcgatcccggtggtggatgaccgtcgattccaggatacgtgaaacgtaatccggagatctcaaccgttgaattccgcttcttctcctcctccgtcaccgccatttttagtacctctcccttgctcttctctctgctttacttatacttttttcttcttcagacgtttttggtagttggtgaagaaaagttattgaaacgacaccatttttggtgaagttttttaaacattagctcacgtggcgctttaagagacgctagttctttaaaagacgacgtcgttaaattaattaggcgacgtggcgcgagtagagaccatcgatataataacgacgccgttttgagaaaaagaaaaatcattaataagatctgtactgttgttcttcatcgtctcgctgatttctcggatttggatctttgaagattatcgggggaaaaaaatggcagcgatttacagtctttacataattaacaaatctggtggtttgatattctacaaggtacgatctctccatcttcctcttgttctcgatctcgcagcttgtggactttccatgtctagagaatgacgagctaattgatgttaatttcgagggatagaccaaaagatgaaatttttgagatcactaggtttagtagaaggagtgttttcggtattaatctaggggttgtgaatagctactaaagaaattggatttgaattttgatctgttctgtgtgtgtttggatttgggaaaaattcaggattgtggaacaaagggaagaatggatacgaatgatagcttgagagtagctagtttatggcattcaatgcacgccatttctcagcagctttcacctgtcaatggctgttctggcatcgagcttctcgaagccgacactttcgatctccattgtttccagtctctcccaggtaatcatacatcgccatttgcaagaagataccgtcacattctcttgattactgacttggctcaataactgatcatatctcaggaacaaagttctttgtggtttgtgaacctgggactcctcacatggagagcctccttagatacatttatgaactctacactgattacgtcttgaagaatcctttctatgagattgaaatgcctatccgttgcgagcttttcgacatcaaccttactcaagctgtacagtcagatcgtgttgctttgttaggacgatgaactagagattgattctctgctaggatcatctcacttctttgcctcttttttttgtggttttcttatcctgataacattttgtatgtgagataacatgtgaacgttgtaagagaacctaagtttacaactagtaagtttccttctctcccttacattgccagctcttttgttactaccaaacaacataatatctaaacagacagaaggtaaagagtctatacatctctaaaacccggtaaatagctcgcctaggattgttacataattgaaggcctaggataattcacagcttgtggagatttgttgatgatgttgtcaatgctgatttgaggattctgctgctcttttgatgcttccttctggatatgaagttcttccattgtcttgacgatttcgttcatggtcggtctactcttggcatctatagatatgcaatcgagtgcaagaactgcaattttcaaagctcgggttagtgagtattgaccttggagacgaggatccatcactcgcagaagtcttctcttgtttgttaagtagggtcttgcccaatccacgagattgtgttctcctactggttgattcttgtcaattgctcgtcttcctgataacaactccagtaacacaaccccaaaactgtatacatcgctcttcaccgataaatgacctttcaaatttgacagaaacataagtgttggaggtctcttcattgatcataataacagagaatgcatgttcatatatacctgtagctagatattctggagcagcgtatccctgagttcccatgactctggtagaaacatggctgttgtcacccattggaccatctctagccaaaccgaaatccgaaagctttgcgttgtagttctgcagatgcagagaaacattaagataaacttctctgactgcatccaaaaccaaagctacaaaaagtatcaatcatgtcataccgaatctagcaagatgttagatgctttgaagtctcggtatataacttgcggttgagcattgtgaagaaaagcaagtcctctagctgcaccaagagccatacgaacccgcgtgttccatgaaagtggctgatagaatgttcctcctattatgagaaaaaagaaagaaagattaaccattgtgtataacaagttcttccatgagcttctttatctttgaagatttgaacttacttctgaataagtgattctcaagactaccacgagtcataaactcgtaaacaagaagcctgtgctcctcttccaagcagtatccaatcagtttcacaaggttaggatgatccagctggcctaaataattgatctcagcctgttgttttcaaaatgaaaaaaaaaacgaaaaaagatgatcactccctgaaaccacaaaaccaggctctgcgacaatcttgaaataacaaaaaaagtagcttgaggagaaaaagtgagaagaaatgtgactaaccagccactctcgatgaccttgaaacccttcttggttaagtcttttcacagcaatgacaatcccggtccccggtttagaaggagcgagagaggactcatcgatccagcctttgaaaacgcaaccaaatccaccttcaccaaccacactatcaggccggaaattcctagttgcagatttcagttcactgagactaaagttcttgagattagcattttgcaagatctcgccttctgttcgaggcatataagagaaggaagcggtcgacgagcccttgctcccatctctactcaagaatttcgaacttagccctacaagaattcttctttcagaaacagaacattcaaaacacaaaactttcacaagccattgcatttagattctaattctagaaagaaaggttgatgaatctggttttagccttttaaggtacttcaaatctggctataactaaaaccacataatgactgaaacaactcaaaaaccatactttagattatgaaaagacaagcttttttgagagagaataaagtgacagtcaattctacttagccgacactctgatttgatttccatggattcagctcttcttaccaataatggaaacatattgtctgaacaagaactgaaatctaaaaactttctactacaggactaagcaagtgtgaaagaataacaataattgaaatctttctacaagatatcaatcaccttcatcaaattaataaataagagaaagacaagaaaattgaccaaaggagactcacatgtactggaagcaatatctgttttaatccgattgctgaaacaacctcccattaaaactccaagaaaccaccaatcagtcactcagctctataatcttctcgattgaaagaagaaaaaagataagagctttatgtgtgtaaacacaaacccagttctatgcgtacaaaatggagcgagaattgaaaaagacccttaagaaaatcccaaactcccagagaaagaaagaaagaaagaaagaaaattgagctggctagtaatcaataaagcctaaccttttgttctctcggagaagaaaagtcttttgtgataataatgaaactaattgaaaatgaaaagaaaagatgtttttttttgagctctttcctctctctttctctctcagttttgggtacgccctattggactttgtcttcttcctcatcttcctctgttcatcgttgacttgttgactttttctaataagactttgagtctttgtggagattttttttcagttccttttcaagtttttttttttttgtttgacatcatctttgtggagatttatctttagaaaaccgttatcaattagtttgtttagtgatataaagttggtttgtggaccttgtgaatgaagtttctttgtgggttgtaatgaaggctgaatgaaacgaaattagtaggaggaacatgatttgagcatatgtgaataaaacaaattggctagtatatctatgggcccatttaggaaataggtattaacaggcttcactttcatccatggacttgggcccttggccattaatatagttgatgaagtgtatactttttaaacttcaaaagttcaaatgtaatggcatattgataatttttgtctatcaataaatttgcagaattatatatatatatatatatatatatatgcttgaaaattttaatttatttttgggacacaattgtttttaagttagtgcattattcattttacaatagttgtattcagtatatcatcacttactatactacatcaaacagtttctatttagtttattatatcatttactatttctgaaattgactttttgttttcatctctgtctaatgactatatatatatatatatcttattttttaattttatttatcaacaagacattatatttatatagaaaaagacttttgatttcttgaccaagaaaaaaaagacttgatttacaaaggccatttacctttcatgtttctcattactcatatcttggtaattacaaaattgtaaatgaagtaactaattttcaaaatatgcatttattataacttatataaaaaagtagaaaacaaatttcaccaaaataaaaacagaaaaaattaaaattaaaatttaatgtcattaaaataatatgatccaaagattctacatttctactagtaatggagctagtgaattgatgacaaaaaggaatttattttagtaattgaaaatgtcaactactaaatcaacaaaaaaaaaaattatttagcaaagagaaaaaaaaaattacaagagtgacttattcttcgttcgtatcacaattggtaaagagacttgccgagctccgcaaaccgccatgcctttaaccaatcttcacctataaactctttcgtatttggtgcaatcggagaaattagggtttttttctgagacaattggaggtatttcttcttcgatttttggaacctaagccgattctattgctgtaatataatcattgtaatttgaacaatttaggttttactttaaagttcttctggctctggtgtgaagacgatcacttgttggttctatctaagtttcatcgtcttcgttgtactccgaaattgaggaacaaaccctggagagtcacagttccgtgttagtgtttctgcagcgttgtgtcagtggtggttttgtatatccgccgctcgttaattgtggagatggagaccaactcttctctttttggtttagtttctcctagctcgcatgatttggtcattgaggtattatttttttagcttgtatgaactttgttttagtagtcgtgatatgtagtatcttgtaagatgcgtgttgatgtagttgtgattggtttgttttattgttttgtgactgtttggagtgaaagtttagattttttttgttttgttttgtagaggcttgcttctgtgggggttcctaagaaataccgctctaaacgtggcctagtggaattcgttagagctaacccggccaagatttcagagttagtctctgctctcttacctacagatgacgatgttaaactaggattgaaagaagctagggaacggcctcgaaagtctgctgtgagtcctaccatgaaaaagaggttcagggagagcatgaatatgctgcagtggttgatgttccaggatgagcctgatgtttctttgaggaatctagcaaaactgaatcttgatcagcgaggtgtttgtggctctgtctggggacagaatgatatagcatataggtgtaggacatgcgagaatgacccaacttgtgcaatctgcgtgccttgtttccagaatggggatcacaactcccacgattattcaatcatctacacaggtggtggttgttgtgattgtggggatgaaacagcatggaaacctgatggtttctgttcaaatcataaaggttctgaacagattcgacccctctcagaaaatctagcaaattcagttgggcctatacttgatgccctttttacttgttggaataacaagctcttatctgcagaaagtagtggtcagaaaggtgctagatccaacgatactcttgtgatactccaaaagatgtcaaacgagctgacatttatagtggttgaaatgcttctggagttttctatgtccagtgagagtttgctcagttttgtttctagaaggattatctcttcaagtggtttattgagcattctcttaaaggctgagaggttcttggaccaagatgttatgaagaaactacatgacttgttcctcaaattaataggagatccagtcttcaagtgtgaatttgctaaagcatttgtgagttattatccagttgtgataagcgaagtggttaagcagggtactgataatgcattcaagaaatatcctctactgtccacattttctgtgcaaatcctcacggtgccaactctaacaccatttctggtgaaggaaatgaatttgctagctatgcttttgggatgcctcagtgatatctttgtttcttgttctggggaggatggtttgctacaggtaaacagatgtcttcgtttctcattttttggtttggtgatactttctactcacaattgtaacattttaatggtgatgagttttatttccgctttcattgtgctcctagtgaaatatatttgacggttttcttttgtaggctacaaagttggaacggttgtgtgagacaagtgaacgtgtcattggagacttgaaatttgttatgagccatgctatagtttctaagtatgcaacacatgaacaccgggagttatcaagatcatggttgacactcttgacctttgctcaaggaatgaatcctttaaaaagagagactggaatccctattgacgaagaaaatgattacatgcatctgttctttgttttgggtcattctatagctgttattcactctctattggttaatggtacatattctgctgccagtgatgaagaaatagaaaatgatagaaacgccaaggaagaatttgacaagtgtgatggagatggagaaaggtatgcaaaagttggaagattgtctcatgaagattctgtatgtactgcgattgtaagcagcagctcctttgatagctcaatggcctctgaagtccacaaaattgatcctttccatgccctgcttccttcttctgccatatatttgatacgcgaatgtttgaaagttttggagacatgcttaggaaatgatgaaggtatatcaaagtttctttgcaagttgtcctcttctagcggcagaaacatccctgaaagtaagatgtcgtggccaaggagagatttgttaaatgttgaaactggaggaagtgtatctagtaatcttgccagttctagtagagatccgagtactggcttatcacctctatgcggcgatattcaaacaaatcttagcttggataatgtttgtggaccgtatggggtggttcagacagatgttacagctgactctaaaagagtatcttgcaactctgctgatttgacaaagaatgcatcaggattacgtatacttggtctgtgtgattggccggacattcactatgatgtgagttctcaggccatatcagttcatcttcctttgcaccggttactttctctgctaatacaaaaagcattaaggatatgttatggagaatctgcatcatacaatggagtcagtattagtcatgagatcccacatgcagacttcttcagctccgtgataggagatttccatccttgtggattttctgcactcgttatggaacatgttctacagattagggtgttttgtgcccaggttatcgctggaatgtggaagaagaatggggattctgcattagtatcttgtgagtggtatcggtcagttcgttggtatgtgagaatactattgtttttataaactgctataattcatcatttactcgcatgtttaactagatgcagctttgaaaactggtagattggttgtgaagagattactcgtttctcattctagtaatttctatttacaggtcagaacagggacttgagcttgatctatttcttctccagtgttgtgctgcgttagctcccgcagattcttatgttgataagcttctcagtcgatttgggctctcaagctatctttcacttaatccggatataacaaatgagtatgtacctattgtcctcttactggtaattgatctcattatatggttttatagttctactacattcgatatgactgtctcttcatttcattgttcaatctgcattagaggagaacaggtattttatattattctgtgaattttctgaatcgtgaatttatttattactagatggtcagtcctattttactataatcagtctgtcttacctccttctgacatgattcttatcataaatttattttcaggtatgaaccagttttggtccaggaaatgcttggtcttctgatacagattctgcaagaaagacgattttgtggtctttctactgctgaaagtttgagaagagagatcatcttcaagttagccactggagatttcactcatagtcaattggtcaaatctttaccccgtgacctgtccaagtcggacgagctccaggaggtcttagatgacgtttcagtctattgcaatccatccggcatgaaccaggtcttgattcttacccatatgctgggatcacctttaagttgacacataatgtaaaaaatcacttgacattagttcgttggcagggaaagtattcactacagtcatcttgttggaaggaattggatctctaccaccctcgttggcagtcgagagacttgcaatctgcagaagaaagattttcgcgttattgtggagtgtctgcgttgaccactcagcttccgaggtggagaatgatctatccacctctaaaggggcttgctagaataggcacttgcaaagccacatttcaaataatttcatctgctttatactacgcactacagagtggtacatcagttaaatcacgtgctcctgatggtgttctcataactgcactgcagttactctcgttatcattggatatttgcactcagcagaggcaatctaatagtcaggattgttgcttagaaaattcaattccaattctcgaattagctggtctggaaataattggtatagctcaagggactgaaaaagaaagtttattgtctcttcttgtttcgttaatgaagactcgtatgggagatggccgccatcaatttccagagccaggcagttgcaatatttcgtcctggattggaaatctgctgaagaagttcagtgcaattgattctgtttgtatgaacctattgcaaagtcttgcccccgaggtggttggtcaatctggcttcgataaagtcatgtcaggttctacttctgatgagaagcgcaaggctaaagctaaagagaggcaggctgctattatggtaagatccttttatttcaaatctagtgcaaaagtttgacatggaaccggtagccattgatgtctgatcatgcacttgaacatatgatggctgctgttcgctccctgacttgtctgggtcctgcatgctccctgttaatgtatctccttgttgataagcatcaacaaggagcatgcagaacgtagacatagttacctctgtggtaatagaagatttttgtataagactgtctaaattgtttttatgctcattattcaagttgttatctgtagttagaattaataagttccaggatatggtagttatgcttatatataacttgcatgcaggcaaaaatgaaagctgaacagtcaaagttcttgtctaccttgagttccagcatggatgatgatgatccgagatctgaatttgaaacaagtgattctgtgatggaacatgattcagaaatagctgtccgtgaagtttgctccctctgccatgacccagattccaaagaccccgtttctttcttgatttttctccaggttggtagcatgactgatgctataatatgcgactgttaaggttaaataaacatatactccgaggaaattttgttctgcatcattcttaatgatgtcatttttcctgcagaaatctaaactattgagttttgtggatagaggccctccatcttgggatcaatgtccacaatccgaaaagaagatatctgtggatggagctcctgatcttttgagaatgaatgcttcttcagatagtttaagaataagttctcctctcatgctgcaattgtcagatgatactatctctgagtctgctaatatgattgaatctataaaagcccggcttatagggaatggtcagacagagaagaggtctagcgatgggaggggaaaagatgaatctaacatggaatcattggagatagccatgtatcaaactgttcgcaacaaaattgaaaacatgataaatcaaagccttacacgtgtagatcatcaaccccatgaagctgaaaattgttcggagaaaaattctgttggtggtccatctactttgcaaggtagatttcctgatattcgatcaagacaaacttccaggcgtcctgatgctggttcagatgggtttcaccctatcgactgtgatggggtttatctttcatcatgtggacatgctgtacatcaaagctgccttgaacgatatttaaaatccttaaaggaaaggtgagccatgtttgacttcctttggtttcgtatgtgaaacaaaaatcttaattactcagcgtgtagataggtgaatatatttttcttttaagttgatacttccttcctacctgttgggcataggttaatcaggcgtgttgaattgattttccttccttgatttacagctgtgatattcacgtttaaaagctttttttggtttgttgggatggtgtaggtctggcagaagaactgtctttgaaggtgcacatattgtggatctaaaaaaggtatttgtgtgaccaatttagagatatttttctggtgctttaacgtactccttctgaagcttaaacattgtttcttctgtcagaaagaattcctgtgtcctgtatgccgccgactagccaattctgtattgcctgaatgtcctggagatttatgttctgtctcaaagctacaagatagtccacgtactaagttacgtagaaaagatgcactgcagccttctctttggctctctgaagcgttgtgtctactacgatctgctgctgaagtgatcgaagatggtgatagaggtaaaacagttactccacagggagatggaccaagaaggaaagatcttaaatctgtctctaaaatgctctgggatttctattttcccaagccagaggataaaactctaaaacgtctgtggctaccaccacaatcaatcgtcatgtgggacacccttaagtactctctcatttcaatggaaattggtactcgttttgccaagaattcaatgctgcctgtctattgtattgactccttgtatgaagagttgaaaacctctaaggggactattttgtcagttttattacgagtggtacagagctccagaacaaagaatactattcatgttcgtcagagatttgtgggtatgaagcatcttgcagagtctatatgctatggagtttcaagtagttcttcgagcagcatatttggaagtgaaggtactttttctccaacactcaagaggaaataaaggacatggaaatgtctgtctacatggcctccgtaattgcaaatattaatgaaatagttgctgactgtagttgtttctcgataacatctgagaatatttgccatcttttcaggcacaacaggttcattgaagaatatagacctgctctggaatcgagcatccgatccagttcttgcccatgacccattttcatcactgatgtgggctctcttttgtcttccttttccttttctcacgtgcgaggaatctctattgtcacttgtgcatattttccacagtgtctcgcttgttcaggtatgccacattgttctctaagtatatacaaatttacctctttagacgtacgtctcctaatctcattgtctttggtgcagactgtaattgcttattgtgcatgtcgcccaagtgaattgagtgaattaaattttggggaaaacctgcttaatgacatctccaacgctttgagagaatcaggtggttgggagtatttcaggtcgaacaatatggatttgtcatgtgatataaaagacacaatccgtaaatatagtcttcctttcttgaggagatgtgcgttgttgtggaagctactgaaatctactcctaggaagcttcatgaagagtcagatatgtttgatttgccatctgaccccaccaccgacaatatggatttcatatacagtccccagtctgagctgaatcatgtgcaagaattggagaaaatgtttaacattccacctatagatatcattcttaatgatgaacttctccgttcttcaacccaaatatggctccagcattttcagcgggaatatagagtcaacagagttaaaaggtccctttgcatcacccctgtagttcctttccagctaatgaaattacccaatctataccaggacctactacaaaggtttgcagcaacgtctctctctggtttttgcacaagttgtttcccattcgaagactttttctctaatcaaaaagccttgttttcttttcttttataggtgtataaaaaaacgttgcgtcaactgcaccaaagttatcgaagaacctgtattatgtcttctgtgtggaagtttgtgttctcccatatggagcccttgttgcaggtattgcctttacttccactagtctccaaacatcgttttggttgacactgttattgttctagaaaaccaaacaatgacgttctaacatacttttacagagaaagtggttgtcctaatcatgcaattacctgtggtgctggtactggtgtatttcttctgatacgggtatcacctctcgtcttctctctctctctctctctcttgtggatataactctcctttactttatatattgctcgtgtatgtatggagtttgcatcatttgtgggctttctaattgattactgctctacatttttcgatagcggaccacaattttgctacaaaggtttgcaagacaatcaccttggccatctccttacctggatacgtttggagaagaggtaaacctagaaagatttttttctttcttttccttttaactttgatgggtacgatcttgttgattcggatgtttccatgctgttggtcattgaatattgtttcaggatatcgatatgatcagaggaaaacgactatacctgaatgaagaacgttatgctgctttaacttacttggtaaatgtttgtctcaacaatcaaaagaagaaacttttgtttgtatggtaaaatatataattgttttgcttggtgaaatccttttcaggttggttctcatggacttgatcgcagttcaaaagttctcggccaaaccacaattggagccgtcttacattaaacgatctgcgtgctatttctcagacattgatctctatgagatggtattcatatgttgctttgaaatcatcagttaagattctaaagatttgagagcttttctgatgatttttttttatttgatttctgtcactttggttgatttctttatttgtggatatatgcgatcatgtttgtaaatagagtattatttcttggcagttgcataatgtttatttttaacaatactatcattggttagtctctgtgcgcagatttgcattgtttcttttattttattcaggcttactacctgaaaatggtcgataaacatcccaatgattaaaaaaaaagtgttgattttgagaaggtttatttgtaaaatttttgatatatgtacagattgatccagagaaaggatagtatcaaaacgaatgtgttgtgttctgatatcacttcgatgtccgaaaatggaagaattttcagtgtcttcgtcaactatgtaacatcatatactcaaaagccctaaaaataaaaaagaattaaccaaaattctaatcctttaaaactagtttctgcacaattatcattttaaacgtaaacaggacaccatgtatgtgaacgatgaaattaaactacttgtgagtgtacctacctacctatttcattttagttcgggtgttagaccaaagccgtagattcatagctcaaggctgtgaggaagagaatgagaattgtttttcttcacggttctcttcccagcaaagcttcaattcttctggaaccatactggtttcttcacacgatctctgtgtcaacaaggatggaattattttagatttgttactcagattagtgacattaaataaaagatttgaaattttcactcacagttttctaagggaagaagggttctacacaggcttgtcttcctcagacgttttaatttcattatcaggctgcttctcttttgcagatgtaaactcaatctcattatctggctgcttctccttttcagatgtaaactcaagctgtcttgatttgattacagctgttcttttagctcttaaccgatatggtggagacaaattgaaagcatttccatttaacccgagttcttcatcatcactgcaattatcagttgtctccagcaacaaactttttctcatatctttactttcttcttttcgatcaacttccttaactacaccattaacaacaacaacagcatctgttttcgctgccaaaacaacctttcgccttttcctaaaaatagaaggtgtgtttggaaaagtcctagcagcttctctcaagaaagattcaggacttctcgttgcagttaaaccactgtctttattacagggtgtagtcattaagctgactggtgatgcagcaccgggactgcaaccacattcatatccgtacatatgttgcagatccgcttctgatggaaagtaatagtcaagtggagacttatagtataaattcccatgctttggagttccaaacccgttttctactttcctctggattgatctctcaaaataagcttttgagttgattctgacttcctctgaaattggttccagattaggcaactgaggcttgtactcaacaggagagcaagcatactcattgacaccgattcttcgtgaagcagctacttcttcaagcagagcggaagaagagtcaaaatggtctcttccaacttcatttgaatctgtatttcctgaagaggtttgggtaagcgaatcagaatccttgaaaggtttagttgcactagactgcttggaatctctgtctccatcagcaatatctttcagaacgatgaatttgcttgctggcggtggcaagttaccagttgctaagtagaactctaattttttcttcagtgaactattccaatggttctttatggcgttatcagtcctgcaaaaagtacaggtagacatcagaagcaaaaactgtatgagatgttcaaaaatgtccattaactttatttttcacaaggcctttttcaactacaagtaagtataccttcctggtaaaaccttagcaatttccgcccatttgtttccgtacattcgatgagaattcatgagagctgattcttcttctacggtccaagcatcctttctaataccaggatttaaatggttgtgccacctgtaatcgtaaactcgttgaggcttccaaactcaacggaggtacaggctctattcttcagatagtcaatattctaatctttgttacctttctcgacattgtttcccaatacgacctggtaaggacttggcgatgacagaccatttggcaggtccatatttttttacaagttcaacgattttatcatcctcctacaattcacgaaagaaagagaattttagagctaccaaatttttacgtaaaatgaaaaccaaaaaaagtttcagaacatgaaaatgataagagaacctcttgagtccaaggtcctttaacaagctctggattaagaactttctgccacctgtgcaagcattggacttctgttctctctgggaaaaattccgctgtaagatgaaatacaaaaaaatcaaacaaacagaacattgaccgaaaccagctactttaacatttaagagacaaaaaagaaatcatggttctcttgcaaagtgcacagcagagatcatgtttactgaatgagaaaaattcacaaaattctcagcagatttaagatacgagttcagttttaaaaatgtataaattatacattcaagtatacatcaagacaagagtgtgattagaagacctataatctcattctaatgtattgcaatactacttttacattcaagaaaagaaatttacctattttcttccacctcttccccttatacttttcaactgctcgtctaagtgtctcatcctgaatagtgataaaaaccaattacagaccacaataaggctagtctcgtctttcattcaagtaaacactaatccttatacatataagatacatagtcgaatgaggttgctccacacaccaacaaaattatgaaacaaaagcaaccactaacctcctctggagtccaaccaccttttgctcgtctcataggtccactagtcctcctgcagatcaacattaaaacattgcagaaacccaaaatgagttcggtgtaagtcatcaaagcacagtctttccaatcaatcaatttcataataagttgtataaacacacagatagaagatgaaatgtaaaagatagtaaaagtaccgaggaaatgaagatactgtggcaggagttgcgatttcaggtgacttgaggaagaaacagccactaccttcggatgcagaagagcaagaagcagctaatggttgcttattctccatacattgaatctcaattttcatttcacttctttcctcctaaaaaacccatataaatcaccaaatccagaattttcgttaaaaacatgggattgagcacaaaatgaacaagaacgtatctttatcaaacaaataatcaaaaatcacaaaaccctaaaaactcaacggccgcaaaatagaagccagatctcacaaaaaaacaagtcgatttctttcaagcacaagatggatgtttagggtttatacaattctaatcattagaaaccaattcagacccttttccaagacctgttaaaacgtgttccgattcagacctaaaaccccatgaactcacaccaaagtagacgaagataacaatctgatcacaaaaaatgaaaagccctaatcagatttcagggaaaaatctgaccttttccggtgaacaaaccggtggattcgaacttgagctcatcgtgatcgccagataagcgaattcgcgaggaagaagaagaagggaacgttaaaaaacaaaccaaaacttatattcgaaaaaaactttgcccgttgaacgagagagaagagagaaaggagaaggagactaattgggattaaaacaaatattgtaacgaatacttcttccgccgacgtaactgctaactgccgttaacctggaaccggccggtttattccaaaccgactcaaaagaattggaagaagccggttaattgaattgagaaaatgaatgtttttttacgaaacttattaatgtgactgggctaattaattaattataatattctttcggataaaaacgaaaacaacgagtttaattcgtggttggataaaaccggttatctaaaatcaaactataaccgaaaatggtgacaagaaaccacagggggacttaacggacgttaaaagtagaagaaaggttgacgttggaaataaaagtttcaacctcaaacggcactctttagctgatgcgttgaccattgtacacgtcggcaaatcagaggtcctcaatgattatggaccgtcggatcattaagataactcattctggtttttttttttactgtagtttcttaagcgagaacagtccgaattggcccataatttaaagcccaaaggccgagatataattaatcagtcgaggtttttgggtaagaagaagatatagaaaattacaattcgttttagtaaaagaaaagattacacaaaaacgtaaacaaccagacaacaagaagattgagcaaatggggaactagaagaagttaagaatccaaaagtattacaatacgttttaatagaagaaacatattacaaaacgtagacaagcaaatggggagtgaaatatagcgaataagggacgacgaagcaccggcgatgatgacatctaatccatcgaacaactgtaagagcaaaatgtcatgtcatgccaattgaaaattactttgtgtggacaacgatcttctttatgaagttggcagaatggtcgagtcatggtattgttgggaagaatataaatgtttgacctataagccattacagtatgaccaggattcaacatatacatctcttttccaagcaaacaatcaacatggagagtggtgcagcagtcatcacacgcatagaacccaccttctcttgagtattctaatttcttttcgcatacctcacaccagtctaactgatcacttccctcttccccttcccgaaatgtgaggaaatgtttgtcaagcttatactttgccttgtatggtaaagtagcacaactgaaacatataatataattgcattcgatgcaatttagttttcgaccatacttttttcggcaaatttgacaaattgcctccctttcttcttttcggtctaaagcttggaataagggatgctcatggccttgataatcaaatggttcagaaacagaggcacaccgtatgtctatgctgtattgatcctcctcatagatgaagccacaactttcacgatcacaagcggaacacctgaagtaacctttaaagtattcattctgtatatcagagacaacttttagcgtaagtgggtgactgtgtaaggcatgatctttcttgcgagaagcatttgcacatgcttcgtggaggatgaagttgcattgatccatacacgagtaataattaccctcatagattggaaggatgcacgcttgacaaataatgttttcgttgtaaactccactggtcttgagtttcagatgatggccatgagaaaaatggagtattattccatcagctatcgtctcaaatggctcgagaattatttcaggttcttcaggtactccctcgagatcctttccatcccacaagtcttcccgtaacgcacatcttgtatgaacaaaatagtggctacacttgttgcaagtgtatgcaccacaattgttgtcaacctttttacgacatactccacaagaccattttccagatggaagagaagaggtaaaagagatacggtgttggtgacgacatattttaatgacatacgggaaatagatacaatctcgatgggctacaaagatacatcgaagacacacataggtggggaaagcttctttaatgaggctacaaacatcgcaaagtaaggaagcttgtttgggaaaaaaggtgagaaggtggggatgcctttttgggtggtctataaaaatggatattggcttcatcgcacaatcgggatgcaaactcaatttgtaggtgggacaataataaaaaataagattggaagggtgtttacagcacatgcaactcatgagctgctcgtgacgagtgtaaagtttgagtgaaagaaagggataggaagggtgtttgatctcaaggggagactccacgcattctttgtggaacattagatcacacgtgagacagatataatagtctgtgccaatctttgatcgttcacatgcaccgcaattgaattgatcgaactcaatttctttactgttacaccaatagatagggacaactgggagcttacagatttcatcaccatcatcatcatggctgttgtcggaatgaagcaaatcatggacttgttggctgtcggaatcaagcaaatgctggacttgttgatcagcgcctcttatgctggggaagtacggggaaatattgaacggtagaatttcactataagaatagtttatctcgtcagctttaagacgtaaagaaggacagaggaaaagaggttgttgaagagagagatggtcgtcgccatcaatggctgtttcaccggaagaagaaggggttgtggtgtctgtttgagatgataaagtgtatgtgtggaatggtttcccatcgatttccttctcacgaaatacaccgactgaatttgaattcatggctgcttgctagctagcctacaaagatgattttgggtagttgtgatatttctcgtctccttctcacccttccatttatatacaataatattaaagacacgtaagatacacagctaattttgatcgatatgtttaatattttttcaattattatttcgtttgttaatctttttatattctttgttatagaaaagtctttcatttttttgtttttgaatctcagtgagactagtctttgttattacttattaacacttgattttaatggtttacatttttaatcgttatcactttaacaattcggttgacaaaaaagtaaaaattgttccatcatctaaaatgtacttttttaaactgaagttttaaaagtctgtgcatagcacgtccccatttcctatttttttgctatagaataatcgtcaataatagtcaattattgtttcgaaacactgaaacgatgagaatatgaattattgtttgacaattaattagcaattggacccttctagttttctcaattaatttttgtatatcctctgaggttctgactatctcacacgttatttgtgcttttttaatatggatgttatttgtgatttttttctgattactctttatcaatttttttatcttttattttatctcctgaatcttcaaataaaaatactcatcaatgtaaaattgtgtatgcattatgtatatttgatttcaaaataacgaaacaaaagcaaccactaacctcctctggagtccaactaccttttgctcgtctcataggtccacgagtcctcctccaagatcatcttctcataggtccactagtcctcctgcaagatcaacattaaaactaggggtattaaaattggtcaaaattcatggatcaattcaactcaactcaacctatgaatcttaataagttgaaaattttgactcaaatgagttgatgggtcaaacgagttattgggtcaattggtttgatgagtaaaatgagttggattgtaatggttaatgatttcaatggtttacccaattaaaccatcaagttttgtaaaattgaatcaaaccaaccaaaatctctaaacaaataccaatttaagtttaaccaacacatctaaaccaatttaacaaaattaatatttttccaaatttcttaaatatacaagcgatgaaattgagaaaaagtaaactcgtgattttcccgcaaaaaacgtaaacccgtgatttttccagccaaaaacgaaaactcaagattttcccaacaaaaaatataaactcgtgatttttccgccaaaaacgtaaacccgtgatttttccgccaaaaacgaaaacccgtgattttcccgccaaaatacgtaaacccgtgattttcccgtcaaaaacgaaaacacttgattttcccgtcgaaaacgtaaagttgtaattttcccgccaaaaacgaaaacccgtgattttcccgccaaaaacgtaaacccgtgattttcccgccgaaaacgtaaacttgtgattttcccgccaaaaacgtaaacccgtaattttctcgttgaatacgtaaacccgtaaaaagtggaatccgtaaatatcctatgtttgatgataatgaattaataattattaataatgataattatttattattattttataataataattaattaaattattacttaaatgagttaattcatttaacaactcaacccatcaaattaaatgagttatggggttacccaacccatttaacaaaatgagttgggtcaactcataactcatttaaccataaactcatttgattataagttgagttgagttgggttacccaatttaaaacataacaaaaaccaaaatgagttcggtgtaagtcatcaaaggacaatctttccaatcaatcaatttcataataagttgtataaacacacagatagaagatgaaatgtaaaagatagtaaaagtaccgaggaaatgaagatactgtggcaagagttgcgatttcaggtgacttgaggaagaaacagccactgccttcggatgcagaggagcaagaagcagctaatggttgcttattctccataaattgtatctctatcttcattaagaagggaacgttaaaaaacaaaccaaaacttatattcgaaaaaaactttgcccgttgaacgagagagaagagagaaaggagaaggagactaattgggattaaaacaaatattgtaacgaatacttcttccgccgacgtaactgctaaccgccgttaatttggcaccggccggtttattccaaaccgactcaaatgtttttcttatacttcttttgagtcggtttggaataaaccggttaaatgaattgagaaaatatgtgtttttttacgaaatttattcatgtgactgggctaattataatattctttcgaataaaaacgaaaacagcgagtttaatgcgtggtttgatagaaccggttatctgaaatcaaactataaccgtaaatggtgacaagaaacccacagggggatttaacggacgttaaaagtagaagaaaggttgacgttgcaaacaaaagtttcaacctcaaacgacactctttagctgatgcgttgaccattgtacacatcggcaaatcagaggtcctcaatgattatggaccgtcggatcactaagataactcattctggtttttttttgttaactgtagtttcttaagcgagagccgtccgaattggcccataatttaaagtccaaaggccgagatataatcaatcagtcgaggtatttgggtaagaagatatagaaaattacaatgcgttttagtaaaagaaaagattacacaaaaacgtaaacaaccagacaaacaagaagatgaagcaaatggggaactagaaaagtagagatctagaagaagttaagaatccaaaagtattacaatacgttttaatagaagaaacatattacaaaacgtagacaagcaaatggggagtgaaatatagcgaataagagacgacgaagcactggcgatgatgacatctaatgcatcgaacaactgtaagagcaaaatgtcatgtcatgccatttgaaaactactttgtgtggacaacgatcttctttatgaccatggcagaatggtcgagtcatggtattgttgggaagaatatgaatgtttgacctataattcattacagtatgaccaggtttcagcatatactcatctctcccaagcaaacgattaacatggagagtggcgcagcagtcatcacacgcatagaacccaccttttcttgagtatactaacttcttttcgcatacctcacaccagtctaattgatcacttccctctttcccttcccgaaatgtgaggaaatgtttgtcatgcttgtactttgccttgtatggcaaggtagcacacctgaaacatataatgtacttgcattccatgcaatttagttttctaatatagttatttccatcaccatcttcttggcagatttgacatatcaccgctttttcttcatctggctctaaggctaggaataagggattctcgtggccttgatattcaaatggttcgaaaaccgaggcacagcgcaaatcaagtgagaaacccagactatcataaacaaaaccacaactttgacgcctacaagcacgacattcgaagtaattccctcttcttctgtaatgatcgtatccaatactgacgaccttaagcgtaagcgggtgaggatgcaacggatggtgtttctttcgaggggcattagcgcatgcttcgtgtagaatgaagtcacatgtatccatacatgaatagtaagtaccctcatagattggaaggatgcacgcttgacaaaacttgttttcatcgtaaactctattgatctcgagttttagatgatggtcatgagaaaaatggagtataattgcatcggttatcgtctcgtatggctcaacatccatctcaggctcttccggtattccctcgagatcttctccattccacacgtcttttctcaatgcacatcttgtatgaacaaaataatcaccacacttgttgcaagagtaggcaccataatgattgtcaacctctccacgacagactccgcaagaccattttgcagatggaagagaagaggtaaaaatgatacggtggtggtgacgagaaatttttatgatatgcgggaaatagatacaatcttgatggactacaaagtcacatggaacacaaacataggtgagaatagattctttaatcaggccgcaaacattgcaaggtaagaaagctttgctaggggaaaaagtgagagggtggggatgtctttttgtgtggtctataaaagagggtactggtttcatcgcacaaacaggatgcatactcagtttgtaagtagaagaatgataaatcatgtcttggaaacttatatcacaacaaatgcaattcacaagggcaaagggagaactataaagttggagagattgaaaaggataggaaggatgtttgatttcaagtggagactccacacattctttgtggaactttttacgacatgtggtacaaaaatagtaggctgtgccaagatttgtgattttgcatgcactacaacagaagtcggcaccattaggttctttattgttgcaccaaaagagagggagaacagggagcttacagataagaccgcggttgtgagaatcaagcatatagtggacttgtggatcagcgcttgggaagtgaggggaaatatcgaacaggacaaagccttggtcatcataattagcctccggatctttttggctgtgagttttgacacgtaagagaggacaaaggaaaagaggttggagagggatgtcttcaccggaggaggttgaagaattgtataagaaaaacgtttttccatcaatttcttcctcacgaaattcaccgactgggttcatggttgcttctaaaaacgattttgggcagttgtgatattctttttctgtctccttctcccctctttcgtatattcaacttgaaacacacagctaaccttgattaatgtgtataaatctttgtgattttctcaattaaaaaagtttcacaatctctgactctctcacacattctccttagacataataattgttttaaaacagaaaaataatatagttaatgctctccactcaccaaaatactgtaattgcaacttaaaaatcagtgagttcatctctttattcccttccttccaacgtgaaaatacagctattttataaatcggcaatgcagatgtcccagtcccagtcccagatgaatttaaaccatcagatcatttacaactttttttcccctgtggactttactgtaatttgttgggccctaaataagcccataggcggaggaagaattgaacaacataaagaaaaaggctttaaacaaatttgaacaccgtaaattcaaacggctctctcttggtgactgtggattgtgcgtttaccataatttgatgcgatgatggagttgctagtctaccgagcttggcttattgagctaccagaagctgtaagatatttacaatgtaagtcggttagccataaatttcacaaaattggattacttaatttatgttggaaactgaagaatggtgaaaattgttgtttgctgatagttagagaagagaggattgagaagtgtctatcaatggtcttttgggccggctcaagtaattgtgagcccttgcgcaaaaataaatacttcgattaataaatgaaaattttatgggcccacgcctattaaggatatataatattttttgggcccctttaattgatgataattttagctgaaattttatgggcccacgccccattgccctccctcttaagccggcctcactctatctttaccttctcttctactacaaatttttcacatgcttgttctctgcttccttagaatttagaaacataaccatcacaagcacctttccaaattttaaaacagatttggaagaagacaagaaagtcacagtagatgtagataattacaaagcgttatcgataaaagaaaaagattacaaaatgtagacaaggaatgaagattacaaagcgaagacattttactttatcaaacaacggtaagaacaaaatgtcatgtcctgccatttgaaaattactttgtatggacaacggtcttcatcatgatgatggcagaatggtcgagaccgggtattgttgggaagaatatgaacctccctcttattattcattatggtgtgaccaggtttcgacatatacatgtcttctccaagcaaacaacgaacatgaagagtggtgcagcagtcatcacacgcatagaagccatcttttcttgagtatactatgtttctttcgcagacctcacaccagtctaattgatcacttccttttttcccttctcggaatgtgaggaaatgtttgtcgtgcttatactttgcctcgtatggtaaagtagcacaaataaaacatagaacataatcacattcgatgcaatttagttttcgaagaaaagcaattttccgttggcagatttgacaagttgccttacgttcttgttgtcggtctaaagctaggaataaaggatgttcatggccttgatattcaaatggttcagaaaccgaggcacaccggaagtctatttggtaagatccaactccataggcgtagccacaactttgacgacaacaagcagaacagaaaaaggaatcttcaccttggacttttagcgtaagtgggtgaccgtgcaaggcatgatctttcttgcgagaagcatttgcacatgcctcatggaggacgaaatcgcattgatccatacacgaataataattaccctcatagattggaaggatgcacgcttgacaaataatgttttcgtcgtaaactctactgttctcgagtttgagatgatggccatgagaaaaatgaagtattattccatcagctattgtctcaaatggctcgagaattatttcaggttcttcaggtactccctcgagatcctttccattccacacgtcttcccgcaacgcacatcttgtatgaacaaaatagtgtctacacttgttacaggtgtacgcaccacaattgttgttaaccttttgacgacagactccgcaagaccatttgccggatggaagagaagagataaaagaaatacggtgttggtgacggcatattttaatgacgtacgggaaataaatacaatctcgatgggctacaaagatacatcgaacacaaacataggtgggaaaagattctttaacgaggccacaaacatcgcaaagtaaggaagcttgtttagggaaaaaggtgagaaggtgggggtgcctttttgggtggtctattaaaatgggtattggcttcatcgcacaaacaggatgcatactaagtttgtaggtggaagaatgataaagcatgctaaagagagctaaatcacagcagatgcaattcacgttttcgctaaaattatggtaaagtttgagggaaagaaagggataggaagggtgtttgatctcaagcggagactccacgcattctttgtggaacatttgatcagatctgagacagatataatagtctgtgccaattttcgatagttgacatgcaccgcaagtgaattgtaaatactcatcttttttactgttacaccaatagatagggacaacagggagcttacagatttcatcaccatcatcatcatggctgttgtcggaatgaagcaaatcatggacttgttggctgtcggaatcaagcaaatgctggacttgttgatcaacgcctgttatgctggggaagtgaggggaagtattgtacgggagaaattcagtataagaattgttttccccgtaaactctaagacgtaaagaaggacagaggaaaagaggttgttgaagagagaggtggtcgtcgccatcaatggctgtttcaccgtaggaagaaggagttgtggtgtctgtttgagatgataaagtgtatgtgtggaatggtttcccatcgatttccctctcacgaaatacacccactaaatttgaattcatggctgcttgctagctagcctacaaagatgattttgggtagttgtgatatttgtcgtctccttctcatccttccatatatacaacattaaagacacacacacagctaatctttaccgatatgtttaatattttttcaattattatttcgtttgttgaactctttttatattctttgttaaagaaaagtctttgttattacttattcacacttgattttaataatgatttacatttttaatcgttcatcactttaataattcggttgacaaaaaaagaaaaatcgttctatcatctaatatgtacttatttaactgaagttttaaaattctgtccatagcacgtctccatttcctaattttttgctttagaataatcgtcaataatcgtcaattattgtttcgaatcactgaaacgatgtgaatatgaatatttttggatttttagcaattggaccattctagttttatcaattaattttgtatatcctctgactctctgaggctctgactatctcacacgttacaaattaattgtcaaacaaaaataaacgtggcagttaatgctttccactacaccatattaatttcggattttttgtaaattataaacaaatcacactcggaaattcaaaatattaaaagtactttctgttttatattatactcagagattacaactttgttttaaataaaagttgttttgtaattaacattaaaaaaccaatggattcttaaatagcctttttttccgtctcttctaataacacctccaatgagaagttctctgataaaatttatggatttttctggtttaacttaaaaaaaacaaatgtaaactgattaaaaataagagaggtgattggttttctggagagagtttagtataggagagagtcggacacatggcaacttgtgattggatatttagtttcaacaaaagaaaaaagaatatcggactttaatttttttttcccgccaaactctctctctcgacgaagccacgaaggtgacgaaaccggtgattacgaacaatttaccaattctgaataattgggtaaaaacctgaaattccccttgacctattgctcaatcttgcaatcgtttgcggggaatctcttttctagttaagttttatgagcttatttttgttggaattggtcaaaattgaataattcgtctccgagtttttagtatcacgtttagctgaataagttacatggtcgagtcttatgcttgtgataatttgtaggagtatcacgttttgctacctttgatctatgttgttaatcaaggcaattcttttaacatgaaagtttagtgccactggttttttcctctcgtttatgtgattgacttgttcttttgggctctatgaccatagagttccaatgaagtaccaaggaccgaggaaggcagatttgcttgtccgttacttaaagaagtttgttgctccgatccaaatattgcttgccttatgtgttatgttatagacatggaacataggaatgtggttcttttgttttaataggacttgtagcaaagggatgaccatatattgaatgattgtacatcttgtttcaaacaaaactaaatcgggtattgttgggaagaacacacagccacatgccacagctaaccttgatcgctgtgttgatatttttcaattatttcattggttgaagtcttttttaaattctttgttattgaaaagtctttcatttatttttctttgtttatgaatctcatgagtttagtctttgttatgaacagtttctgtgtagaacatggattctctgcttctgcatttgttgcatattataattgcaacttgtaacaatagtataaataactcgcacttgcaaaatcatagtattaaatctccggtgagagggaaatcgatggaaaagtaattagaaaattatgacgtgtaatacagagatagtttttaagttttaacaaaggttctatagctaaatccatgagaattttttcgattttaaatccgtaatataattgtctagtcgataactataccagattaatatttcaattaaaaaataaagtttagttctacgttactctctaacatgttctcttagacatgacataatagtcgtttagtattattatctctacagattgtcaaacaaaaaagttgtaatgttgttaaacaagcatacgaattaaagatacccaacttgaaaaatcatattaccaaaaacatggttagtgggatttaacggacgttagatgcagatggtcaacgttgaggacaaatgcttgaacctcaaatggcagttttgattgatgcgttgactatctgatagtttacatacgcaatgaaccgtcggatcatgaagatagctcatcctacggtaatttcttaagctattagcgaaactgcgagagggatattgattaccggtgaaaaccaaagtgttgggttcatcttcgatttccaagatcatggtcgccttaataagcctctcctttgtctcagagaaggcttttcttttttttgtcatcagaaaaggcttttctctttgtgagattttgagccccaaaatggtttttttttttaacagataatgatagatttccatcatgaattaatggactcttaaatgactcgtctatacagatttctttgaatgagaactagattcatccttactcatagaatctttaacaagacatcatcatagagtccaagaccttttaatagacaaaactgcaaaaccatctttttttttcaaattcgtattatctgtatatgcctatgaattctaaccaaaccaaaggcagcaaattttggaagttctccaaatttcgaaacagatgagaaacattataaaattatataacagaaatcaacaatggtcttcttaaagaacaaaaagtgaaaacagagcacatgtaacatcgatcaaaaaacataacaaacttacatataggaagaggataagaaacaagattacaatgcgttttaatgaagaaatatggagagattaaaaaattacaaagcgtctggctatgagtaatgaattatatgcttctggcaagatatagcacaaaatatataaccatttttgtatttgaaaactattttctgacgacaacgctgcctgcacgtattgcaaaatggccgagacaaagtattgttgcgaagaatacgaagcttcttctcataatgttcgccgaaacccgtcatattatacattatggtgtgaccaggcttcatatacatgtcttccccaagcaaacaatcaatatgaagagtggtgcagcagtcgtcgcatgaatagaaccctttcgttcttaaatctgcgttgcatgaataggtccctctcgttcttaaatctaatattcttccttcgcatgcatcacaccactctgaatgatcatttgcctctttcgtctcataaaatttgaggaaatgcttgtcatgttgataccttgccttgtatggtaaggtagcacacctaaagcatatcaaaaatcactttcaatgcaatttagttttctacaatgagtagactcatcttccctttgttggcagatttgacatattgctgacttttcttcttctggattcaaagctaggtataagagatgctcatgacctagatattcaaatggttcagaaactgaggcacatcgtaaatctagttggaatttatttcttctagaattaccaatctttgctccgagatcctcgtagacgaaaccacaactttcacgctgacaagcattacaacaaaaacgtcctacgttgccttcatattcactagtgatgaccgttagtgtaagtgggtgaggacgcaaagcatgatgtttcttgcaaggtgcatttgcacatgcttcgtgaaggatgaagtcacattcatccatacatgaataatagctaccctcatagatcggaaggatgcacgcttgacaaacctttttttcgtcgtagactctactgatcttgagtttcagatgatggccatgagaaaaatggagtattataccatcagaaatcgtgataaatggctcaacaacaatctcaggttcttcaggtactccctcgagttctatcccatcccataagtcactccgcagcgcgcatcttgaatgaacaaaatagtcatcacacttgttgcaagagtaggcaccatagtcgttgtcaaccatttgacgacagactccgcaagaccattttccggatggaagagaggaggtataagatatacggtggtggtgacgggatatttttatgacatacgggaaatagatacaatcttgatgaactacaaagacacatcgaacacaaacataggtgggaataagtcctttaatgaggctacaaacatggcaaggtaaaaaagattgttttgggaaaaaggtgagaggatggggatgcctttttgggtgatctataacaaagggtattggtttgaatgcacacaatatatgcagagtgaagttgttggtaggactataataattcatgccatcgatacgtttttgacaacatgagcataatacgcggtcggagggaggactgtaaagttggagagaaagagaaggataaaaagggtgtttgaactcaagtggagaaccaatacattctttgtggaactggtcaccacatgtgacacaaacgtaatagcttctgccatgttcttgggttgtgcatgcacggcaaataaattcgaaaatagaacgttttttattgttgcaccaaaagagagggagtaaagggagcttacagctgtcggaatgaagcatatactcgggttgttcatgaccgctttgtatggtagggaagtgaggggaaacaaccatcgggaaaaagctacgatttgaatctctcgtgtatggtttcaactttttaactttgagacgtaaagtaggacagaggatccgaggctcaagagagaggcggccgtccccaccatcggaatcaaccgctgcttcaccggaagaagggctctctgtttgagataacaaagtgtatatgagaaatggttttccatcgatttctccctcacgaaactcacccactgaatttgaatacatggctactactaaacgattttttggatagttgtgaacttgtgatattcttcttctccttcctctccctcttacatatagatgtatacaggatacagctaagcttgatctatatgtttatcatttttaatttagttataattgacttattgtaattatcatttttttatggatcgtctatttattatttagaaagtttgatagagaaacattataagaacaaaagaagaaaagaaaaaaacttcaataacagtactatttgttgatgtgttaacgtgttagagcatactaaattatgattgatatactaatttatcttaaaaatttgaatttagaaaaaaaaaaactgaaaaaatgtgaatattaccttttctaaaaacaaactactctctctaagagcatcttttgtgggtaaaatcgaagagaatgtctacaaatgatttactttaactatttatttgatttttatttctttaaattatttaaactaattaataatactagttgatacgtggagatacccattaaagatcgtgttttcagtgtctccttagaaatttatctgttttgtgcaattaattttgaatttcctttagttaaagatacctccattatttgtccaatgggagtgttctaacatggtctattaattagaaatgatagtcgtttagtatatagacaaattgtcaaacaaaaaaagttgtgaagttaaacaaaactatataaaatcaacatttggaaaatcatattaaaaaaatggttagtggtaagatattgaaacccgggaaagtcaacaaagcacatgggatttttagcgaacgtgaactgccgttgagggcgattgtttcgaagtttagacctcaaagtaacaaacgacagttttggctccccagtgtgaaccgtcggatcatggagataactcatctaacggtaattacatagttttttagcgagagccgtccgatctaaaagtattaatcaccctgagcataaatgggcccaaaaaaggccttctaaatttttttttaacataagccaattcaaaaatataatatcaacggatcactcaaattttgaaactaatcatctctctccttttttcaaacatacacagagaatggtggattcgaaaacccctgcgaaaaccaaattgttagattcgtcttcgatttctaatgtcagagtcgtccttagggttcgtccttttcttccccgggagatttcggacgagagttgtgacgggagatcgtgcgtttccgtaatcggcggcgatggaggagataccagcgaagtggcggtttacctcaaagatccagatagctggtaatcgtctttttggttttcccttgttcaattttgattctttattactagaaatttgaatatggatttggtgattcggtgtaatttggagcagtcgtaacgaaagctatcagctggatgcgttttacgggagagaggatgataatgtgaagcatatattcgatagagaagtaagccctttgattcctgggatctttcatggtttcaatgctactgtgcttgcttatggagccaccggaagcggaaagacttttacgatgcaggtctgttaaaagctattaactttcacaatttagaatttacggttagaatcttaattggattctcttcggtctgtgcttccttgtaatggtttcagctctctttgcatttgattatcagggaatcgatgagctaccaggtctgatgccattgaccatgtccaccattctgtctatgtgcgagaagacaaggagtagggctgagatttcatattatgaagtttacatggacagatgttgggatcttctagaagttaaagacaacgagattgctgtttgggatgataaagatggacaagttcatcttaagggactttctagtgtccctgttaagtccatgtctgagtttcaagaggcgtatttgtgtggcgttcagaggaggaaagttgcacacactggtttaaatgatgtctctagtagaagccatggagtgcttgtgatctcagtaacctcacaagggcttgtcactggtaaaatcaatctgattgatcttgcaggttggtttttaccattttccaagcatttgctagagtaagaggagcatctacatgttcttttatctgcaacattaacaaaaaactctatggcttgagcaggtaacgaagacaatagaaggacaggcaatgaagggatccgtttacaagagagtgccaagattaatcagtcattatttgcattgtccaatgtggtttatgcactgaataataacctccctagagtgccatacagggaaaccaaattgactagaatactgcaggattcacttggtggaacaagtagggctctcatggtcgcatgtctggtaagaagattagctattgttgttagttgggttcattgctttgatcaggatatatcctaagtggctaatgtgatgaatctatttgcttcttttggttgtcatagaatcctggagaataccaagaatctcttcgcaccgttagcctggctgcaaggtcaaggcacatctcaaacaatgtttctctgaatcccaaggtagagacccccaaggttaagatagacatggaagcaaaactgcaagcttggcttgaatcaaaaggcaagatgaagagcgcgcatagaatgatggcaatacggtctccattgatgggtacaaaccagacttcaatttctcaaagctcagtcaagaaattactctgtcatagatcagccattgcagaaagtgctaagcttgccggcacaggacagaggtatccctttgaatggtctggtctagtttttaagtgttctacatcttaaaaccacttccctcatactttactcatgcacagggacgcatttgtgaccgcaagaaacttatttggtgtggaaactcttgctgcttcacatttatgggtatgctcttctgcattcattgtgaataacatcgatatagctagtttctctatgtatattatattctactccacatttggatttatactttcatacaacataagaatctttttaagtgatggagttctctgaacatccaggaacctatacggaatctgcagttagcttctccaaccaaagaagatgagagagacacatctggcgaagagaatctattggtatcagaagcaagcttgagaggtttgctttcttgagccacttattgatgaagaatctggacatttcgtttctctccttacttttgtgtgcgtttattctagataacacattggatgtcgagaagaaatatactgaactgagtcctcttcgagaagctctatctccaatagactccaatgcaaaaccaaattcagcacacggaagctctccttttctgaagccaatgaccccaaaaacaccttttctttctacaaaccctgaaattatgcagatggaaggcacttgccagaagttcaatgcatggagcaataatttaaaggtatcaacattcccaaaatcatggtatatttgacaagaacactagaaatctgattctctatgcaatttactttcttatcacagacctctctcataaaagagtacattcacttcttgaacacagccaacaggtaataatagcctccagtttcatctgcctacctttgattcttcattacccttaggatcacacaagaactaacttcattcatatattaatttatgaacacacagagaggagctaagggaattaaaggtaaccttacttccatagtctctattgatttcactgcatgtagctctgtttcatttttttgttttcagggaattgggcagaagatggctgagtacatcattgaactcagagaaacaagccctttaaaatcggtaacacactcaatatctctccccaaatttgagcgtttagtgctaaactatctgtcatctactaaccaaatgtatggattctcaacagcttaccgacttagaaaagatcggtttcacctcaagacaggtacataacctattcaaaaaagccactgaaggagtcctcgagaagccagtttctgcttcaacaacaccttagttgttgtctctagcaaacaacaacacttgtgtattatatcagttctatctcgtgtaatttcattattgtctgttcttgtatgtttaagctttataaccagagagacaatgggcttgaatcttaattgtgtagtgagcaagaaagaagcaaactttaatacaaacccataatagtcttaggattaataaagtcacaaagataaaactttgcagagatatcttaatgaccaaaccataaaaacacacacagaagaagagaaagaccaacgtcgccggcaaaactaccggaaaaatcagccaattattacatataagcaaacctaacataacattagggttattacagacttagggtttatgaagttcttcatttgcaggtacaagggttgcacttgcagtcagatccgcatttgcaagcatcattctcggcaacgaaagtctcgccggaagcctcgtactgagagttcatcgccggagcaacaccgaggacaagagtctcggtggcggtgttctccaagtcagggtaccttttgcaactgtacaaagccccaaaaaaaataaagatcatgggttaaaaatgatgaataattaaaaccagaaagatttgattaaaattgtattataatctcatcgagaaattagggtttttgattcagaaaatcacaagaaacaccagaagaatcagaattatgagagatcgagaaacgcgtaccctccgcaaccattgccgcacttgcaggcagatccacaaccacagcttccaccacagcaagacatgttttttctagaaaattggaagagatctgagaagatttatgaagatgatcttaatttgccttaaacgataatcagtgaatgaaacttacatattcaggagctttgatatttataggcaaaattagaatttgtagaccgtccacgtgtcaacgatctttgtccactcttatcacctaaataatcgttcctcaagtaaataattttagtttacagcccttttccaataaacagaaaaataaaatattgaggattagagttggaaacaaaagctttttacatgtataaagatttacaagaaaaaaagaagtaacaaaatcatagactttacttctttataactaggagagcaaagtaacaattaatacaaataaaagtgtaaagtatatttccatttgacaatttaaacataaattttttttcaatattttctatgttctaacatgttaacatgttagcgaataaagcttatcgaaaggaaaaatcgttaaattcactttttcagtttcgtaattttcagtatatgacacataattttgcttatgtaataagttggtttccgaagttttgtattagcttcgtagttgtcattgtaataccaattgtctaataaaaaattttagaaggaaaaaaaaaaattcctttgttcattaatcctcgcgaaaattttcatatttttcattagttatctctttgatttacatatattgagattagtttagactttagctatcacttctttgttttattgtcctacaggttttccctttagatatgtctttggtttccaatttgaaaaaggtattcaacaaaacaagatgttggcaaagtaaagtagtgttccaaagtttggcttccatgactttttgtcaaaaggtgaagtgagagtacacaaaaaagatgattcaacttgttgagatgggctctcaaaagaatagtgggcccattattgaccttgtccgttctatgtgggtatttgaatcgaatctctcctcttttttcgatacatttccaaaaattcgatctatgtaaaaagtaatgttaaaaatatgagaaccatccatatgggaatcatcatggagtgtcgataagtctaattctataaaaaagtaaaagagtatctatatgaaaaaaggaaaggatctcgtgatttgatttgtgtagtttcgaggtttacacgttcacaagaattgaaatgaacagttgcgtagttaatattatcacgattacattttaagacacaaatctcaaaatcgcataaaaagtatcgcccaccgtggggctcgaacccacgaccacaaggttaagagccttgcgctctaccaactgagctagacgggcttttgttaaaatcttgtagcacaatgttattataccatagtataccatattatataaactatgaatgtatcaatcacctgaaaatatttttgtatattccaaaaatttatcctctacaatttcttttaaacaaagttttatcataaacaacaacaaaaactcatacaaacaccatattttctcttttatgtaccttaaactccaagcaaagcaacaaagtagaagaaaaatgaagaaatgattcgagttcttgaatgcctattaacatgatataagcaattcttccagaagctcctcgaagatcaaatcctcaacttcaatcccaacacattcactctcgaactgcaaatccatccatccatcgtctctcgacaaatccctactcataaccttatcaaacgattgttgttcgtcgtatggcttgtaacgcaagtaacagcttattctaacccaaacctctttcaaaacactataccccaccggcattggatggatcttacatagggatgataacggtttaggataataatggtaagacctttcgtagatttcgattagtacctcgttgattagatcgaaaagaagcaagtggttgcagttaccgccttcttcttcatttcttgaacattctggatcttggaacatacatcctgttgttgtcgttgtcacttcttcgtagactaatggatccagtggctggtaatctaattgccacattgagagagattctggtgcattgaaaccggagatctcgagaatgtctcttacatagttgaatttcactttatcttgtgcatctatgttgaggacttcttcatctaattgtttgcttgttgagacagtctctgtatctaaatctgagcaacaaaaaaaaaataactttctcaatttgatggaaaactttgatatggagaaatgattgaatgttaaagatatatacatacctcgagagatatcaaatacagaagcattttcgtcaatatcaactgtagaaacgttattaggactttcttctgatgattcttttaacgatcttgtttcatgttcaacgtcaagcgtagagatctctctgtcttgttctgtttctgcatcaacgggtgaatcctcagaagcatccattgtttggtcaagtgtttcatgttctgaagactgagagtgatcttctgagatctctgaaatgttgtccaagccatcttgttcttcctctattgattggacagtaaggtcatcaatcttcaaagcatgaaatttcatttgaggtaacgaaagaatcctccccaagaatttaggagctctcttagaaggcaacgctgattcctctaactccatctttgatttctctgaattactactgttcttcgcttctctttggaagctacactcatagagctgaagatatctatccagcgaaccacacagcgacgaagctcttgttatttgcttcagttttgtaccttctgctttgttgttgttcttagctgcagagtttcctttcaagtgttcgaaaatatcgtctctcaaatctttcgaaaaaccgtacttccgaggtactttgtccaacacagcatccatagtgatacggtgtttctcgttcttgttctcattaatcacatgctttatcttctgtcttagatccttgaaacgtttgatcacaacttggttctttcctcgcttccttgcataaccagaaccagatgaatcttcatcacccaatttcaacactgtttcattcatcttctgaatcccatcagctctgtgctctgcagctatggaaggaggagacatcggtattttatcgacatctcccaccgggtcaaacgctttattatgatcctctctattgataccatgagtaggaaaggatccagctttagtcatagttttggagctaaaagattgttggctctggaaatgccgggctagaggagaacccggatcctgcaatacctttaacaagaagtttctattcatgtgtatcaagttaagagcatcaagacatgcttttgaccttctaggtgatgtatcatcatcattttctgagaagcccttggtgtgtctcatctttgggtcaaaccaagcttcctcatcatcactcttctcttttttcttaaactctttttcatcaaaatctgatttgcttccatcagtgttatcatcaacttgaatgttgttatctactctaaactcttcactgtcactgttgcttgattcctcagacatgagataaagcgggttcaacgaaccaaccgcgggtgaaatgccaaccttcttgttaaagacacggttacgttcatcaccatttgaggaattcttatctgaagatccaacctcactcaatgaatccttctcttttgagtttgactggacaggataagtacagctacggtggtgacggcctttcttcttagacttgtcctctattacaagtgccttgatcaaagctttcacagaccttttgatttcagaatgtgtttttcttgacctctcttctgaattaagtttcttggacttctcctctggattatgcttcttttttgttttctctcctgagttggaagactctttggactttactgcagaactaggcttctttggtctttgcacagattcctaaagcaatgagtcccattggtgagagagttaataagaatataccataccgctgtaagataataagtttgcatcaacttactacatctgttttatcttccagcttgatcttgggtactggaataccatctggtgatgatggtatagtgttgtttacttcgttttttgttccttaaagcagaaaatagaaaatgttacaaaagataaacaattatggtcatgagcttcctttattaatataggagctgagaacattaaacagaaccagggtataaacttatctattactaaacttggcttcaagcacatatatccaaccaaaccaaaacatttgagattatgaagtgtgctatcttttgaagtactaaaacggaacgaggacatggcaaaaacaccaaactaaggtacgagagagcagaagaatcaacaaaactgtcttaccaggagcggttcttctacaaacgggtcttttgtgaggaagtcgtttcttgatgtaacgccaatggttgtgtttaagaatgtcaaatagaccccacatgaatccagggtggttttggattggggagcaagtaactttgtgacgcaagttcttccccattggttacttgtggtaaaaaaaaaaaaactcactcaagctataactttatcaaacctgaaaaacaaaacataagccataaaacacatcaatctccagcaaaatttataacgaaaacagaataagaattttgcagaagcagaacattttaatggtcagagaattgaactttggatcaatcttttacattacccagattgtgaaggttgaagagcatgaaaccgttcacatatatctaaatttcaaataatgaagacactaagtaataacataaaacgtacttatacgcattctacaacgtacaaggtcatcaatggtgatcccaaatccaaaacggtaatcgtgattttggcaatttacccaatcatatatacacgaaatggacacaatttggaaacggaattaatgtggttacctttgtgggaaaggtgaaatgtttatggatttgtgtggaacatcgtcttctcggttgccatatccatggcgaaagaaagaaagagagaagacagagcggaaccatgcgtgcgtgcgtaacatgaactttcagaaatttgccgttttcacgaattttggatttatttatcttgttttgtatattaaaatgaataaatgggccttataacaacatgggctaactataataatcttgatttttcatgggttccttaatgggctgacgattgaccaattggcccagctcaggacaatttttagcccctttttcaatatctggcacaataatattaacctcccttttctttttaaaatgtgaaactggtagtgcgtatatatcaattcttcaataacctccctgtagaaccaaataaaaattaacaaatatagaaaaagtttttagtttttattttgtgtaattgtaaatttgctctgattatctgtctaaagaaaatatatcgttttacgacatttgtgatttattcgcgactaaatgtcacatgcaaattttattgggtgtattgaatatttgaagtttatagagttaatgtggtagtcttgtaaaattcgttcttttttactctccacgtaatgataaaaccataacgtaatttctattttcatttccaagatggtactatatttttatactatttgtatttggctatttgctttcaacccattatcaagtcatttgactttttgccattaatacttaaattactttcttttctgatctcttacaaaaccaccacactcttcctcaaaagtcaactccttcgtataaaaaacatctgttttttaatagaccaaaaacattatatatgttagtataattttgtttttatttcttcgatattgcacgttggtttagtcaaaccgaatcggatagcgcattcccgaatcagaatgttaacaggatttgaattttcttgggttagaaattaaaaaattgtgccaacttcagcccacaaaaaaaaaacaacaataagatcaattataactaaaatctcttaatttggacaattttttttaagaaaaagacgtatatcaataaatatataaataatctgaacttaaatcaaactaatctttaggttcgtaataattaatagaaaagattttggccaaaagtattttgtagtataattttactaattccactaacaattagaataaaccaatccctaaagaataaaacttcacaaagtcaactcttcactttctctctcccacctatgtgactctgtctcttcttcttcatttggttccaacttccaacatatattcaaccaaactcaattctcaagcatctccttttcatgaacaacgccgattcaagtggctagagaaaaacgacatcgttttaaagattctaatctctcacttctcttaaacaaatgggaaatggagtcaccactttgaccggttgctgtacaggaactctcgccggagaaatttcccggcgttacgacgtatctctcgttcacgatggacttggccactctttctgctatattcgaccagatctccccggagtagtattaccttcgccggagtctcctctccgatcagatcatatccaagaaaccactttccgttcaatctccggcgcatcggtcagcgcaaatccttcaacggcgctctccggagctctgtcatcggattctgattgtccgtacagctccgcagtctccgcctccgcattcgagagctccggtaattttgcctctttaccactccagcctgtgccgcgtggctccacgtggcaatcaggtccaattgttaacgagtcgggtctcgggtcagctccgtttgagcgacgatttttatcgggtccgattgaaagcgggttgtattcgggtccgattgaatcaacgaagaagacggagaaagagaaaccgaagaagatcagaaaaaaacctaaatcgaagaagaattttctcacattcaaaacactattcgcgaatctaatctctaacaacaataaacctcgcttgaagaagagtgtgatcgagccgatcaacggctctgattcatcagattctggtcgtcttcatcatgaacctgtgattacttcctcacgaagcaacgagaaccctaaatctgatcttgaagaagaagatgaaaaacagagcatgaactctgttttagatgttcaatgggctcaggggaaagcaggggaggatcgtgtacacgtggttgtatctgaagacaacggatgggtctttgtcggaatctatgacggattcagtggtccagatgcgccggattatctcctcaacaatctttacaccgccgtgcaaaaggagctcaatgggttactttggaacgacgaaaagcttagatctttaggagaaaacggcatgaccaaaaccggaaaatgttctgatgaggaagatcccgagtcaggaaaagagaattgtcccgtgataaacaatgatgatgcagttgcttccggtgcaagaaaccaagcgaagagtttgaaatggagatgtgaatgggagaagaagtcaaataacaagaccaaatctgataacaggtgtgatcagaaaggatcaaattcgacgacaacaaaccataaagatgttcttaaagctcttttacaagctttgaggaaaaccgaagacgcgtatttagagctagctgatcaaatggttaaagagaatccagagttagcattgatggggtcttgtgttctcgtgacattgatgaaaggagaagacgtttacgtgatgaatgtcggggatagccgagcggttttaggccggaaacctaatttagcaaccgggagaaagaggcaaaaagagttggagagaataagagaagatagttcattagaagataaagaaattttgatgaatggagcaatgcgtaatactttggttcctctacaacttaacatggaacatagcacaagaattgaagaggtaattaattagtaaacagataagtagagtttttgttgtaattagagtgatatataaattgatataggttttgttttatgaggataggaagtgagaagaatcaagaaggaacatcctgacgatgattgtgccgtagagaatgatagagttaaaggttatcttaaggtcactcgtgcatttggagctggctttctcaaacaggtaataacatcactcaagatctacacgttagattatgtataaatttttttgtattatggggtttgtaatatgaaccaaaccttagactaatgttattgtatttaatgttgagtttttttttgccgcagcctaaatggaacgatgcccttttagagatgttcaggatcgattatatcgggacatcaccatatattacatgttcaccatcattatgtcatcacaagctaacgtcacgtgacaaattcctaatcctatcttctgatggattgtatgaatatttctctaaccaagaagccattttcgaggttgaatctttcatctctgctttccctgaaggcgatccagctcaacacttaatccaagaagtcctccttcgtgctgccaacaagtttggtaagaacataaaatagtgtgtgtttttataaaagaaacgccaaatatctgaatattgttgaaatctgatctttgtttgtttttgtttcattttaggtatggattttcatgaattgttggagataccgcaaggagatcgtaggaggtatcacgatgatgtctctgtgatagtgatctctcttgaaggaagaatatggagatcatcaatgtgaatattattgttttttcatgaatctgaatcatttgaagaataacaataactcgggttgatgattttttccgattaaaagttcttattctcaatttgattttatttttttccataattttttcatatgttgtacttgtatctatgttactatatagtttagtgaaaatacaccaaagtggcatatatatttttcatatgattttatttatgtatttgcttatatcaaatccatttattagtttctacttttctaacatgtataatgtagaagattttaatgtcaatattatttgaaaagatgtaaacagtaaacactatatagctatatagttctgaaattctgaattagtccatcatgagttgtactatcgtcataatttgttttccaacgagattttatacatagaacataaattggcagtccttttcagaaaatatttccccataccaaaaagtctagaattctatttatatattcctcaaaaaaaatattattaagattcaaactattggacactcaaaagcctgtaaatcccaacttctaatggttgtcatttattttcatctgaaaaagtcgaaagacgcgtttggacaatttgtcaatggttagataaaaatcttaacttaaatccaatttttactcacagatttcaatttaaagtcttttttcctccgactaccagttttcagttcacaaacgacaattttggttttgtttttgtttttttcttgtttaggaaatatacaaaatgtgacttttccaagatttctagtatgattttattgtcactttgaggaaatatttttttaatcataatctatcttaaaatgttatcatattcacattttttttacttcagtcacggtatataaaaggaaaactaaacaaatattttttaaagggattttgcgattatcattgtcgacctatattgctgtcttaatttatttgttttagactttcagtaatgaaaagaaactgaagagggttaaataacatttatttcaaaatatcttctcctgtttgtttttctgagtttggtaaaactactaaaacattaggactcaatcaaaagaaaaaacattccactgtaatctacttctaacagatctcaaagactcgttcccatgactgtggaaattctctgctacattgactcgcctaaattctcacataaaccaaccactttccagattaatgtgactattacgtatgttgtttttgccatgtggttatagtattaataacagagacacttatagccacatggcaaatcccgaatcctgcctaactattgtactcgagttgacaaaaagaaaccttaaaacgtatgtttttataacaacagaaaacatcatgaactcttaacagtttctgaggaaccaaacaatagcatcaaaaagagtataataaaccttgtccctaccatataaacctctggacaccatcttcatggctccacttaaacggtctaaacaagaacattgccattgtaaacacattgatagagacaaaaatcgttccgatgagaagccaagtggcgaagctgctgcttctgacacaggagtgaagcatgaagaggtaaaacggaatggtgtaatatctgaactcgatcaatggagtaggaacaagaacaccgcatgtagctaagaaatagaccaatatccaggtctgccttcgagttttcgctatcggatcatgaaagaataagtcaggttcacaatgcaaaatatatgggaaaagtaaataagtatactacagaaaatggttttaacatacctaataaagttaggattgagaaccaggaatagacgtataccgggactaatatgtacttcattaaccaatgcgcattgataatttttctccataggtagaaaggataatggcgattatcagcaagaagatatggatgagccaagctacaaagaattttcagaaagtaaagagaattaagagtctgaagtagaaaagcctttagttgttttaagaagtattcagaaatcaaacctgaaaaagtgtacagagacaaatccggctactagagccacaagagttagtataaggcttaatgaccaatttctatggagctgatggaactgatgtctcagttgatttactgagaagtgtaggggagcagtgaaaagagcagaaacgagactaaaatacattatctgcgcaaaatgcagtgaaactacatgagcctcttttgcacctgtgaatttgaattgatggattagtaaaaaggcaatagacaccaaaaaattacagttcaaggaaatacagagagtagtaaataagtaaattgaatcaacataccgaggactatacccccgttccagaggataaaaataccaaacgccaccacaacaaagataaaagggctaaacttgatcaaaatcctccacttcagattccaagatgttgagattacagtataaatatcatacactaagtctgcatttttaaacgtagatatcgtaagagatgaggaacatttatgcttatccttgagaaatgcaataaattcgccaaactataaacaaaacatgtaaagaagcctacctgaagtatcctctgttgaaggaacagtttgaccgtggttaaaagggtctgaagtgtctgagctgatatcagattttctttttctaagatttgatctcaaagttgctcctttcttattactagactgatgcagttcttgatttacttcttgttttcctttttgcttagacgagtcaagggtgaagtctagaatacctgagcaagcaacgaaaagcatccagactacatttgtttgtcggataaaaactgctaaagtgccaaactgcaaggacaaacccgaaataaatttgcctacatagtcgtaactctaagttcaaacaataacaaaaattcactaattttgcttcaaatcacttaccaatgcactgagcacatatcgtcttttcaaacaagtaaggtacatggcaagaactgcggttagggacgcaacatctgtatagtataggaaagtgaagaaccaatggagagggtaaagcgacatgactaacgccataaaagtcgcttttctatcactaagattcggccccaagaatcttattatctcatacactaaaacaccacacaatactgcagaaacagcatttgtagaccgcaggacagatgtcgaacaagcttctgaaaaggactgagatgtattttccatcaacaacattcctggaaacaaactagcaacatgtgctagtgaaagatagtacctgcaaaagaaaggtttatatcaacattttcaattcaaaagatgtaaaatttcaaactctaagttaatcctctacatagtaacatgaacaagtaacagcttaaagaagcagtaacaacacaaattagcatcaacatacactgaaaaatccagactttacttaaaggtaactacttgagaatctacgtaagaagggatgattcaaaaagagagtattacaatccaggtggggtagtgatcattggatcccagctcctaaaattcccattgcagtattgctgagcttgaggcacatgaaatatctcgtcctgcaaaattcaacagatgcagtaatcaacacaaaatcagagagatagaggaacccaagttctaaaaaggtttttttttaccatgtagggttcaggaacaatgtgattgacgataatcgacatcggaatcacccacaagctcgtgatcgctgcaacggctaatttccccattttttccctctaatttcccacaaaaggaaccaatcggatccgaatcacattcgcggatcaatcatgggttttcgttgcctgacgaataattcacaacggaaatcggattttcccggaaaattgagtgagctgaagaagacggtgagattacatcggagaaaacttacgaggagtcaaatcgaagtcaacgtatcaagattgatgttgggcttttactaaagcccaagtaagttgtaacaagaaagccctgtatttatatatatttgtaattctcataccttaaaaagtcgatatttcgattagtcctcaatattttcatttaactactgttagacccaaaacttttgtagtgatcaaaattttcctatgtaaagtgatttcttcgctttattatcttgtcaatttcactagtcatgctaaccagatcaattatcactctataattgataacaactgcacagatgtgtgtgtctttcttgttttggtaataatgcctagctgatattgatatgactacgaatgaatttgaattattgtcaaacggaaaaggttttctaaaattatccccatattattatttctcacatattctatcattttttaagtttaatgaaaatgtatattaaaagttttctatatatattgttctttttttaatggtcctccttgataattattagaggaaaaagactaagcatgtcctacacaaatagacaacaaagctgtctcgtgtccttaagaatatacactgcaaagcgattttcattaaaagatgtgggaatcacaaataaagctttataagataatgaaagcattcaattagaatctctggacccagatcccaacctttatctaatttactactatatgttttgactttagtttatactattagtactttgttttaaggtaaactccattaataagctgttttctcttttgtttacaaagggacaaataaattataaaactgcataaaattaacgtgaaaaacatatataatcgttgattctgaaaatatgatggttcataacgtgtaaaagaattaaaagatttgacgacttgattatcaatttatgaacatcaaagcacaatttgtttttttcagactttctcagtttagtttcctgatgatgatcattagatagtttccggatgtgattatttagagggtgaggtgaataatagttgttactgatcatgatcattagatagagtgggtaaaaaccaagcaaaagaaatggtcccaaaatttgcatgtgggatttgattcatatatgtctaagcagcatcggttgatgtcataaagtatctcatttttcttttctctccatgtgtaaaaagcacaccacctttgctatataaaaagagagaaaccactctctttgaattctatatacatatatcaatatatatacacacacatagataattttattgacgacgttaacactctagttggatattttgtaacttgaaaacagaaaaaaaaatctgtattaatataattttgtaatcactggaatcaattaattggaaacctgatcaaaaatttcttaatgatactacaaaactttggaaattataccaagatatatttatttttagaatataagctgataaagctcaaaaagtcttattttaacttgttattgtatatgctttgtaagaggttgagaatttcgattgtacgatcttgttatctttttcattaaattggctaatgcataaacatgttatttgatcatgtttgcaactttctctcgcgacttttaattgtactatatacatttatgaaaatataaattttgtacttgagagatattttttctcctaatttttgacccaatcataagtataatttattaagctaaaaaaagtaaataacaaaacgtgaaagatggaggacatgatgagcacccatgtgcgtagtcatcgcaccacatgcctagtcgccaatctttcattatcctttgctacaccttttaatccatacttaatcccctaatttacttacatctatatatttcacaatttgttaatttggactttggatggtggttctggtagtcgtcgtttagcgtatagcaagtttaccaaatctaaagtggttcacattttacggctgaggaatccaaagttataattttccacgagtatcactcatatattaatttatactaaagaacatcgatatttcaaatgtttatgttaataataacaagtaaaactacaacagtaatgatggataaaacaaatattcaaaatggaaagaaaaaaatagacattttagaacagtcttgtgtggattgttattggttttgaacatgaaaggttgcgtctgcaatttggagatctcaatcttaggggtatgattagtaagtagtcatagtcataccccaaattattgctgcatttaatggtaatcttatgttttgttttctactcctatcacaaaacagtaaaatagttatcaagaaatctaatttaaaatagtaaattaaaaataatttgatacatgtacaagtttagcttacaaagattattttattatctaaatatacagaaatcctctaaagtagtatcattagcttgtgaaaattactatcattaattcagtttacattttaaatctataagtaacatctaaaagttttttttatggtaaattaaacatcactttctttagagaggccgttatataggcaataatgttttcgagaaatatataagaaataaaaagataatttttcgtgtttgataaggaaagaaacgatgagaacacaaattaattagtgcgaagtcaattattagttggtgattcattacttgcgtgcacgataaaggaagcatctgagaaaattattctttcacgatattgggaaatttttaccatatacgacattgtatatctgaagattgaagaaacataagaaactaaaacatagagaagtttcaaaaaaatatcgcgaggaccccatgcaaagcaaaggcacgtgcgtctgatttgcatcaaagtttgtgtacaaaattttttaccttttcgtttgtttttcgatattttccgtttaattaaacaaaaatccgtaattgttacaaatatcaacaagtggtaaagaaagccggatgttttttttttatcaccaagatcattattcttaaagtcaacaagactaatcaaatcatcgagaaaaattagtttatatcatctaaaataaaacactattgtgtttctgcaaatacttttagcgctttgaaaaactgcagtattttaaattacgatttcaaaatcttgaatttattcgttataaaagagaaaaaaaacttcaatttatttttcttcttatcagagcttctggaacgggacatccaaaactagtcatgatatgtgttttataaatatacatttctttgcatgcatgcatattcagattgtggtttgtaaacagtgttaagtcatatatttgtaagtgtttaaaaaaaataatttgtaactgtaaagtatgttttgtatatagttttagatcatatatttgattttcattagacaggtctttttctagtttactgctaaatattaatttacatagataatttattttacttttttttggacatcaatttagatagatatagcatacattttttgtcaacaacaataagtatacatatacaatgtatatattgaacctataatagaaaaaaatcaaataaataaacattttatgtaatcccgccacttgggagacagatcactagttagttgaaatggaggctttcaagcttcggatccaacgcacgtaatctctctctctttcttctctcttttttctttctctcttctttctctctgtaaaacttgtctaatggcagagatctgctgcgtcaaagagatccaagaagaagacgtggagaagatccgattaccgacccgacccgaattagacattcctgactctgatcacgaagatccaacggtcaacgaagaagaagggtgcaagactccaacatcgtccgatcacaagattccggaggtgaagtatacgttatgtccaccggctccgagaaaaccaaaaccgaatcgatcttccggtacgaaacggaaattaacgccggttaatgttgttaaccgcataccgattgatctgagccgtgagatcgagatgttcttcgaggatttggaccgtaggatcaagaagtcacggaaacaataagaagattattgccttaattggtaatgatcgttcatttctaattcatgactgtgtggtggtaatttgatcctttgaatttttcttcattttttttctttttttttcgttttctgtataattaattagctaataacaataagaaaatttatgtatcatttaatttggatttatacaactgatgaaacaaagtcaaagctcacattataatttcttcttttcaatttcaacattaacttacgttttcaatgcgtttatattaattgttattttctgcttttgatgtgtttgatttttggagtaaaccaaacttgtaaatgtaattaggataattaggaggacaactaatcatatcaaatttctttataaaaagacaaataatcaaatctaaattttattttgtatttactaccaaatctaattgcatgtctctatttttgatataaatttaaaattttaataagaaaatttaatctattaatgtataaccactagctttgaaatatgatttttgcatagaattagtttcttcaagctaagtagttctaattagttatattaatacagtaagaacatatactacaaggggctcgtcaaaaatagcttgagtagaaatatagtttgaatcataaaattatactccttttgggtcttaagtttactatcgagaaggtagtcttagtattacacaaatgtatttcatatagaagaaattatatatttttacctgattcgtgttaatatacactgaaggctcattttcccattaacacacaaatctatgctaccatatcactagataattatacctgaatgagcagtgacaaaaatagatgtaacaaacctaattaaattttgacaagaaaaaataaactagaaagatttttaagtggaaacaaacatccttcgtaatggatcatgcttcctgctttgggtacaccttgtttatgatcgatggatgaattaatattttataccttttattatgtgtgtgccattgtgatgtatacaaggttaaaattgcacatcaatcaaggagaatatcgttaccataaattttcagaattagttagatacatatattcttctactttcatgtgtgatatactgactgatagtggtattaaactatttctgtaacggagctgaccgctataataattaattaacattactaaaatatagaaatgaataatgatctcttttgttagttcttaatccagaaaaaatggtcaaagttttccgatatatcttatctaataaaacacaagtaatagtaaattactctatatttggcagttgacacttatacaaaaacctacatgtcaatagtagtagtgctatacaaaaaactctaaagtcctatatgatcatggatgtacattacaaattgaggacgatattcatatgtctctttaaagaacggatgacgactcaacagaaattggctaatgacgatgaatataatctcccgctaactttttaaaaaactagctagctagtgtaatattatctcgtatctacggtactcccactatgcaaacacttacaattaaaattttatctatattcatacgaataaaatattacgtacaaacaacattatatatatatatatatagttagttaagacccaattccataagcatagttttttctctcgtaaaaaaagataagtttgaaagcagaggaacacaccatgcagtataatttggagaacgcagaagtgaagaagaccggagattctaactgctggtacaggatgcttgccatgcttggtctggttttcctgattctcctttttatcacaaattaaatttttaattaatcaattttcttaattgtatgaggttaaataatatataatgtgtatgacaaaaagttagatgaataaatatacctgaattttgtgattttggagtagtggatgattgaaagaagttttttttatatatataacgaagattgttcgtaaatatccacaaaatcatatatcatcttctcatgtaactatgaaaataatgtataagatatatcccgatctcataatttacatacaaaaatatcaaaataatgattcttattatatacattttttacttaccttggtagaattttcaaattttagtagtttctcgggactgaacaaaagagaatgagattataagaagtgcaaagagtttgaaatgaaatccatgaattacagatcaatatttttggaagcgtttttagtagtatttttgttttacctatatatttgagattagacccacaccaagtatttataataattagggatttttaatagtagtttttatttatatacataataaaaaggcttttgttaattttttaaattggtaaactttactttttaataaaaacttataactatatactttaattttgttaattgtgttcagatttcatatactacattataaaaatgttttctctttttttattggtctacttgattttttttgttaacacgtagattgatatttggtccacttggatttgacacgtggcgagatataaaccgttagataatgggatatcaaaagtaacacttgattagaatggcagggatcccttgtttctctcctttccactactctccctccaaaacaaaaatcacaacaacaagaaaaaactttgaaatccaaaaaaaaaaaaacccgagaaaatttgaattttattggggaaaaaaagaaagaagatctggaagtttctatgaacagtaatggcgaatcgaggcggcgaaaacgggaaattggatcggaagaagacgatgacgatgaattgggcggggttaggcgagtttgaagacgacgacgatcattttttcgatagctctaatcgtatctccaccgtcgtaccttcggatttagcatcatcttctgacgaagaagaaggtgagtttgatgattgccggatctcgttttcttctaatgtgtcgtcctcctctcgcgctgctcctgcgccggatatgtcgccggattatgatatttggatgtcggcgccgggatctatcacggagcgtcgtcgaaggcttcttaatggaatgggacttgaatctaagaagactaggctcggagctatctcgattcaacgcgtgagtgaacctgtggcggcgacgggtgagtgctcaggttctcgcgttgcggaagtgaaggtggaggagtcagatcacaattctccggtgaatcaaagagttcgtcgatctccgtcgatgtcggttttgcttgtacggtctagatctgattccgatatcgaagcgtcttctgctgagaaacagaggaaagaagagatgttagggaaaacgtcgaaatcgcgattgactagaaccgcgtctgcgattggagctccgtgtgcgaggatttgtccctacttcacccaaacgcaagcctcgccgccggacgcaccaaacggtcatcatcagtctcaaggccaacgtagtggtccgttgctctcttcggtagtttccaatactcgttttagtgcttttttcttgattaagaaccttgacactgggaaagagttcattgtgaaggagtatggtgagaatggaatgtggaatcggcttagcgatttgcaaactggtaagcaattgacaatggaagaatttgagaagagtgttggttattcatctgttgttaaggatcttatgagaagagagaacgcgaattcgacgatggattttaggaaatttaactcgtatgtgtcaaagagtttgagagtaagtaagaagagaggagctgctttgttaaagaacataaaggacgttgctcattctatgagctcttctaaggtttcagagaaagagaaggattcaactggtagtggcacaagtagtccaaaagtagcggagaagaacaatgagcaggcgaatcaatgggtgaaagtgaggcattcagggaagtctcataaagatttaagtgctttgcatatgtgtcaagagattcaagctcatcaaggaggtatttggactatgaaatttagtccagattcacatttattagcaagtgcaggggaggattgtgcaatccatgtgtgggaggttcaagaatgtgaaatcatgtcaatgaatgaagggagcttgacacctattcatccttcaatgtctggttccacagataaatcgtcggaaggtgatgctgcagaagtgtcacaagataagaagaagaaagggaaaacttcaatgagtaaaaaaggaaaccagataccagattatgtccacgcgcctgaaactgtgttctccttgtcagataaaccaatttgctctttcactggtcacttggatgatgttctggacttatcttggtctcggtcacaggttagtttgtgttcctttcttgccaacattaatgcaagcagccatgaatttctattgaaaaaagttaaatcattggttgccgaatatacacagctattgctttcatcttccatggacaaaactgtgcggttgtgggatattgaaactcaaagttgtctaaaactatttgcccacaatgactatggtaagaaaggaaatatatttcaattctcaaattccttaaatttcatatcgttttgggagattcatgtcttcctctatggtttttagttacttgtgtacaattcaatccattggatgaagattacttcattagtggctcccttgatgccaagatccgtatatggaacatatcaaaccgtcaagtagttgagtggaatgatctaaaggaaatggttaccgcggtttgttatactcctgatggtcaggtacgtaattctcttgaactgtcaccagcatatacttgcattaacgagctcgtattgatatctctatgctctttggtaggctgcatttgttggttcaattaatgggcattgccggctttacagtgcagagggtatatatgctaaaggctcattctatttgtaaaccatgtctataaccttaattcttcataaagttaacagactcattttatttgtttttctgtaataattgatcagattgcaagttggaacaaacaaaccagatagatctgcagaacaaaaagaaggctcaagctaaaaagatcacagcttttcaggtttcactctttctttttgaaaacgtttacattgttgttgttttttttgcctctacttaccattgagtttgcttataccagttttcgccaattaatccatcagaagtgcttgtaacttctgctgattcacgcattcgggttcttgacggtactgaacttgttcaaaaattcagaggtatgtaactgaaacaactccatttgcttcgttgttcaatttcacaaactattaattctaaatctcctattcatacataaaccaggcttcaaaaacatgaacagccaaatgacagcatcttacacagtagatgctaagcacattgtctgcgctagcgaagactcacaggtttacgtgtggaaacacgaggagccacgactaggtatcaccggtagaaaaacagtcaccatgtgtacttcttatgaaaccttcccgtgcaaagatgtttccgtggcagtcccatggaacggcgttgtaaaaggtgaaccaccatccacacaacaccaatcgaaaagaaacccgaaaaaaccatcaactactactactacccctgaaaacacgaccacgggtaaaaaatcaggcctcccaccattacctaagaaaaacaatgacggcaccgcggatggagcaacagaacaacatcaagaagatgatccagctacgcatatttcgcataacgaatcagagaacaacacaggcgagtcaataaagcatggggattcaccttctatatcaatctcctctcggatttcttcttggtcgtggtttgatagtagtggcagtcatggaacacattcagttcagccaacagcttggggaatggtgattgttacagccacaatcaagggccaaatccgaacttaccaaaattttggattaccacgcagggtcggtcgtcaaggctctctgttttgacacaacctctctcagttcttgtacatatatacggtgtattatgtatagttctcatgtattcatgcatagtgtattgagtttaatttgtatactgtatagtcacaaaacaagaaggaacttgatatatagagattatatttctgatgcgagagcctctttaccgtttagagagtctcacactctcactttttttttttgacatcatcacagtcactcaagtacgttatcgcatgaagatatatcccaatagtctacgtgctcacaaaatcaaaactcaattaggtttagagtgtgtactagaatgaaattgtatcaaatggagggataaatctatttgatgactagatcagtagtagagttttatttatttctttaagttattatagtttcggacctttcggtgttggactatatagaaaataatcatgcccgtacgagctcatgctagcatgggctttgctgactgacatccctagtttaaaactataagaaacctattacatctgagtttagaaccaactgattattttggaacatttttgtatattgattgttgaacccaatatttaacaagaaagaaatagaaagcttacaaaacagaatgatgtggtccaaaaaggataaagtgttttgtctctcgaggtacactggacgatgcatatggtctttgtccataccatcttcttttctccttttctcaatttcgagcttctaacggtaacggtacttatgctatttttctttttattcaatattccaataaaaatagtattccaacctgaaatatcaagacactaaccagaatttcataccactatagaatcgaaactaataccaaatcaaaaattaaaatccactaaattgataattttagaaacctttgttcccttcaattaacaaccttaaatcaagatgatttggtttccgtacctacattggattcagtattataaatagctatgtttatgaatgaatgtcaaatggtttcgtggtgtagttggttatcacgtcagtctaacacactgaaggtctccggttcgaacccgggcgaagccaatttcttttattttattttaatctcgtcgagttttgattattaccaaataaaataaatcaattattttctctccaaaaagtatgtacaacacatcatttcattagctacatcttttgttcctaagtttattcaaccaaatctctctctccctttgagtctcaaagcttcaatggctcaccaggtactgtttctcctctctttttttctctttctctggctctttaacacaatagcctttatatacacacgcatatatatagtatagaccatgtgtaatggatgtgattatataggaggaaggatggccattgggtctgagaccagtaaatgcaagaatcggaggactcacaagaggaactcatcatcatcatcatcatgaacaagtctctgctggttcaatctccttcagctctcttctctctccttctccctcatctcaatcttcctccgatcttgattctcaggtccgatatatacacttctctacttatactataaatatatgcatatagatatatatagttgcatatatacacactttttatatagactatatatagtatagtaaactattcacgggttagcagattcttttcttggttgaatccttacatatccctccaaattttcatattttgttccatatttggatagatcaatgaattactttaacattatccatatttttgttttatttcagttttatctttgtttttcgttttcttgcatattaattgatgagccgtttgaaactgtctacggttcttttggaaatttagaaggaatacaatgattctactttgactactagtttggatctattgaattcacattctctttcaaattattaaaatgaatatactaaaatagtattgttgttgttggttgagatgacttcagagcgaacgtgaaccaatcgtatgcactttaaagctgtgatggttttgtctgaaaagggcacgtttgtcggaaattgttgattctcaaaataaagttattgtataaaattataatcagaccaatttctcaaatatgttggcaccttttgtcttttgatcacaccgtattgaaaagtgaaatcattgaaaattttaccaatagtccgttgagaataactatgtgattatttcttttggcattcacgtaaatttgaaaactagtgatttgtgttcagttttctgccattcagccaattttatacttttaaaaacaagaggttccgtcattatgcagtttaacaaataaattatgtttttaacctaacgatttcggcattttactctaaatatttggttctacatcagatttttgttcatacttaactttctctttttggtcaccattcaccatcacagttcaaatattgacctcttttgtgaagcaaacatggcaaccactgtgagacttatgttgtctcaatattgtttttcttaaattccgtatatacactaaaaagcattttacacatctattttttgcagtcgatgggatcatttttccgcgataggagctacacactaggaaacctaatcgggatatcaagctttctagaactttcaagaagatcaaaccgaacaaggaatgatcaaacaggcgctgctagaaaccatcaacaccataagaatctcaaaacttactacaagccatggattttctctatatgttcaaaactaagcacaaacgccactgtcatttcccataacaggattataaacgaagaaaatgatggccgtaacaatgtgcagtctcttggacacttcctcattatggagagacgagctgtgggatcaaccataaggtccacaccgacaccgacaccgactatgtgaatgtccgataatttatagccaattgtgtctttaaacgataatggaatgtgtaatatgatttcctcatggtctgacgcaacagattctgattgtatttttattttgtcaatttgagatttggagtttaaaatttgtttttggtttcttatgtatagttcaaaaacagttttctttgcatgagttgcatcaatatatttttattgggcctcgttgaaagaaacaaaatttcgtatctaataaggcccaaaaaattgaaacaattcctgattaaagcccagtttataaactatttcgtttgggcccaacaatctcacaatggcaggggtagatttggaaatatagaaagaaggtctcaaaaatcactaaaccctaatctctttattttggagaagactataaaatcgattttctctcacaaatcttattctctttcgacttcagtggcggcgcattcagagattcaaactcaggtgagtgatcataatcagatcttttcgctttattgatttcatatgtagtctctttcgattagtgtgaaagttttggaatcgacaaatctttacgagttactactactactagagtacatcgcgatttgcttattcaatcgtttttgagaaattgaattgttcgtccgtaaaatcagttttggaattgagctgataatattagaagatagatatagcttatctgaagagaaaatcgcatagaagagtagatctgagattttgttcttgaactaaatatgtcacgattattgaaattggcagagaaaatggtggcgacaggcttattcgtggggctaaacaaaggacacgttgttaccaaacgcgagcaacctcctcgccctaacaacagaaaaggggtaagctctctaatgttacttactctgtttcttctacttagtcctatttgattccattggtcacttttagtttaactatcggtggttggtttaaatatattttgaggttcatagtagaataggtctagatcatgagctttagaagaaaccaatctttgaggataacttgaagttccttgctctgttcattctatttgttgagtctaatagtcagggattaaccagattaagttaattgtcttcatgtctttatcatagtatgtctttgattcttcgtagccttgttgaaaatctgatttgcatattgttacacttgttccgtttgtttttgtttattttttggtaatctgtttacattttcaagttgagtgttatgatttccttctgaaagaagatgcattatagtatttgagggtttttctgataatgagtaatttgttatgtgtagaaaacaagcaaaaggactatttttatcaggaatctcatcaaggaagttgcgggtcaagctccctatgagaagaggatcactgagcttttgaaggttggtaaagacaagagagctcttaaagttgccaagcgaaagttgggaactcacaagagagctaaacgaaagagagaggagatgtccagtgttctccgcaagatgaggtatctcctcttccatcttttttcaacaaatatcattcattatgcatcttactatttgctccttcataatgaaatgtttttcttcttgctgattcctcttgctttttgtttctttgcaggtctggtggtgctggtgcatccgagaagaagaagtgatgcgctgactctggttcagcgctctgtttcttctaaaccagttttctgttttttgaattttttgcagtaccttgtgtttcctttggatattttgtagcagagataattaaatgttaaaacgaaaccattatgacttttgagccagttgtcttcgggtgtggctatgtccggtccaatctggtttgaaacgagtttttcttgaccccattttgtagtctttcataaattggtcctacttcgagatttcaaatattcgttacaatgatgatttgcataatcgatgttgatgtgcttgaaagttgcaaatgttggtgatctttttaagtagtgagctaagcatgatcggccacaaagttatgttattgtgatatatactaatatatgtgatgatttattaggcctcgtgtgttttcttaagggccaagcaactttttatgggcagtcatcatcatccgtcacaatcatctattatcccccaccatggccgttcttttttaatttatgggtgaaaaaattaaactatagactgatctataaggcaggacgaaattatccttataacaaacaaaaaagaaacatatgatcgtttatggatatgtgttggtacacatacgtgtgttaaatgtggttcttagttattggtcaagttaaaaaggaaagcaacttgaggtgcatggcttgtgttattaaaggaaatcaaattgttgtacaaatttgaaaatgattggtgcatgtaccaatcacatatattaatccattgtgacgtgatgacgtcaaatatgtgagaaattgaacgtaaaagtggtgactaacctaaggccccgccttgattgtgggcaacgattgggacaagtgagcaaaaagaaaagaaaccttcttttaccagtaaacagacaaggataaatatatgaatgacctaaggttaaaaataaaatatataatctaagatatataaattgattattcatcaacatcctatatttcagatacactaagctcttcggatagtttggatcaaaaactgtccacaataattttggtttgagtcaacgaaatattaggctggcaaaacaataaggcttgcaagttgcaactttatacttcgaagtaaacacatgaattgcctcgaagctatatttgtatccaagatcaattaaaattcatcggttagttttatttgacgaaaaggaaggacgacccatataaaattttgattagtatgtgaacacgagaatattaatgtaattaactgtctttgttactaattgtttatatctatataatcattagattttttaaaaaacgtatacaatatgatctaattagcgggagattgtcaatcgtaatgataagtgtaggcgtaggagttgcataacgttgttaaggaaatcgtcgacagttttacttagccatatcaaaaaggtcccaaattgagggaccctcattgttttttttttaggtttggccaaaattgatgatggggaataatgtaaataagtttttcggcaaaagactagctagagagagggcacactaatatggaattttcatcttagttaaaatgttttataggacaactaaatatccatcacatgtactatacataggtcatagacacatagtcaagatagacacatacttgattttttttttgtacacccatttcttaaagtattataaattatgaaataaaataatatttcattgattctgtcattccattcctacaacaaatactcttgcacagacttcggtatgtttttatattaccaattagagccttaactccaagtaccacaacactacactgtcacactataaaatgagtaaatgagatcagtcaagcgaaggacctagtctcagaaaagtaaaagctgcgaagttactgtaaagagagaatgatcttcgcagaaaactatacatggaggcatctttttccgagtgtaaaaaatgtaaatatatgatactataatgtaaagatccggctcggtttttgagccaagaaggttccatgctctaggcttctagtgacaagtaattttcattgttaattcttccagagtacatatattgttcttattatgaatatcaccaaacaagactcgtaaatatgtgtgtatcatctttttccacgtgacgttagctagtatgcaatatttttatcctcaagaaacagttacctataataacccaatttggcaaaacattattcagattcgctggtacgttttcaaggaccggtttgaaccaaattttactacctatgttatgactaggagtcatagcctatgaccgaatctaagacttcgatacgaataaaatatttatgatacgatcgagtatacgaccatgaagataaaacggatataatttcaaccgttcgttttcttatcctatgattggctgtactaagaacttgttgaatttaaagatcgaagcaaatatttttttgaaaaaaatcattagtcttgcaactaaagacaaaataagttgtatacatttactgatatttaatttaacgatttaacaaaacaaaaaattaataaatagtattggtattttagatgttggtaaaatgtaaatttttgttaaaaacaaatacagtaatagaaaaaaaatggtgatgtgtaaaaacagagagtttggttgtctgtcagtcacatgtaagcgaaaaacagaagtacagagtttgggattttgttttgggctcaaattctcacgcgtgcatcgaagcgcgtgtaatttcaagatcgaatctctcggttcttgcgcgtgggttcccacctccctgacgcaccgttacttttgtcgcctagtggtccgtgacggtcacgagcctcttgctctctcccaaggcgcgtcgtttatcttgctcattgtcccgacattgattcggtcgtcgtttactacgttagatttcagtctcttttacttcagtttttatctgaaattctttcaagaaatatcatattttatgttcgtcgtctattattatttgttgttcgaactttcacaactgatattgtaaaacaattggagtcattttaattactagaccaagtcagataaattcatttgacgtctaatataaatacggtatacttaaaaaattcatagatgtatgattttgtatttttcctcatttcttatttttgggtgctaattaagatagtacaaaaatagcatgtatcatagtgcaacttatcgatgttggccaatgacttttatcaataaaactccaagatttgtcttctagttggtaaagcatcattcctctaaaatcattgttgacaaagcaaaattacagtatttgtctagacgagtatctatgtgttaatcaatacttatattccttattaatttaactatggtattaaactaataacaatattttgacttactacaataattcatcatttcatttcttatcctcgctatataagatgaacttttttgtccatcaatattgttttgtcgttttcaaaactatatatatgttttttttttcttttcgaaaactatatacattatcaaagatcattcatgcattgcgcaaaaataatctaatatacttagcgggttggtctccactactcatattacgtatatttatacatacacacactcgaaaacaaatactattactattagtaactttatgaagaaatattaattttgtattataaattaggcagcaagacgatacttctcgggactgacaaagaacgttcctttgcagtgcataacgaaatcattgtcccttaattacttccaataatattttctgcaatatatcattatataatcactatgattcatgcaatagctacaaggtaatactattacaatcattttaatattaatcactatcacatattaatatatatcgttttcctatttcttactacaaaaaatattcaaatataatgctcttccggctttctggatgtgagggttagacgttagttagtttcagcacatgtttaaatgaaatcttgtatatatgtcatgaatatgtatttactaattgttacaaaatcatatgtgatgattaactcatgatatgaggaacaaatctttaacaaagtcaataattgaatttcattgttgcagtaatgcgtgttaaattgaaattttagttcaaattacctacgaatttgagtatacgtagtttagttagatgttcaaatagctagcttgtagataaagtctcaaatagattcttctttgctttacatcaaaatcatcaaaaagtctaattaaagtattccgtaaaagagactataattttaaaaatggaataatcagaaaactatgcggcatttggaccgatatcatcataaactatagtttaaatttgtttatgagatattagactcaaaagctctccacaatatttggtgacatgtagttcagttcatatggcttaaaaagaaacataaagcacgtacaagtcacatgtacgtagtataatcaagtctttaggtgaataatccggaactggtaatgttcttttggtaatgtgcttttgaatgtcatagattaaaatagataattttttgacagaaactaaaggtcaccgatttaaaattccattttagttttcagacattttaattccaagtgttgtcatactttttcatggttaaactaaaaaatgttatctctaaattccaacaaaaaaatggattcttaatattatgccttctcgtagctaatgatatggatcatggttatagctgctgcgacagaaatactttgattaatgtgctgcaagctaagttggttagagatttcaattaaaaaaaaaacaacaacaggagaatatgtatatataacctcattcaaaattttgaataaataaaaatatgttatataatagaacacattacacgcatgtatgatgatatcttcatactgaaaaatgaaaaataaattctgcaacagaaaaaaaaccctaattttaatagaaaatccaaaaaagaaaacccaaaactagtaacgaaaatttaatagaaaaaacaaaaacctagtatagatcgatcgatgtactaacttcaaactaagtacataagatcataccacacccaataagaaactaataaaagcataattgcatcatcacatatattgatcacttagagagatgattgtttatatattgctagtagaagaagaactgaaattattagagacttcactccacgaacttgttgcagctgcggtggatgctgcagcagcgccatgaatattccagagctgttgttcgtctccaaaaagttgtctagacaagttgagctgattgttactatcttccattttcactgaagctaattgcgacgcggtggctgtaaccatagctgatgaagcagacgaagaagaggagataaggttatggaaaatgttcttaggtcgatactgacccgacccggtaaccaatccgtaacctggattctgctgctccatttgatgttgttgatcaaacgggtctaaaccgcctaaaggaagttggtttgttgccgggaatctccactggtcaaaaccgtttaaaagagccgccgctcctccactgcttccaccgcctatatgataagaaggagctgaaacggcaccgtattgtaaggtgaagttgtctgtgaagtctaaaggaggcataagcttaagaggaggcaaagatgatccaagtccaagtatgttgttgttattgctgttatgatcatgtccggggattaaccctgcgttgtaagaagacagcaacgagcttagagacgatgacgaagaaggtggtcccatctgattgttagccatggctcggtggtggtattggtcgttgctcgtggcgctgtcttgtgacttgctgttaccgctactggtgctaccgccacctccaccgctgctgtttttggttcttttgtttctacggcaaccgccaccgacgggaacgctccttagagcaccgccacgtgtccagtaacgacggcatgctttgcagaagtggcgaggttgagtgagactgtagttgttgaagtaacagaatttggtgttagttgagtcacatcttggacacttcaaggctgtttcaggtaatggtatgttggctagccttgctctttccgccatcgaacctggtcggattaacccgccaggtccaccgggaacagcgactccgccgttaccgttgttgtggtgaagctgcggaggcgtttgttgctgttgcggtgggaggggatggtgaggaagaaactgttggttgatgttatttcccgtgaatccaacggtggttgtgattggttgatgctaaagagaggaagaaatgattcaaaaacaacacaaaaagtttttagaatatgtgaaaattttgataaagaaggaaagaaagaattaattttatgagtatattcaaattcaaccacagatatacaaagattaaaagtgacaaaaggaacaagaatattattatccttttttcttgtttgtttaatctctctttatgtttttttttcttcttctttaaattggttcttgagtactcataaattataaaaccaaagaaagccaacaaaagccatttagagtaaaagaagagataatcggatcatgaacttacttgttgttgccagtttgatgaatgatcaggataagtaggaaatgaagaaaaaaccatctttgatctttcttctttgatgatatcttctctctttagttttctgtttttttttgagcaaataaaggatttaaagctgattttttttttggtgaaggcttatatgaagaagtggagaattacatcaataaaaacaaagggaagagctttagagagaggaaagaagaggagatgagagcttagcgaaagatagagagagaaggcaaaggtaaaggaagaacctttattcatttatatacatacccacacatatacacatatatatatatatatagaatatgtttgaatatcatattaattatatatatagatgaataaaataagaattgagtgtgtccacagtgttattgcgaggctctttttgttttatatattatatacatatttgcttagggttttgggaaggtggaggagagtgagtgtgtccgattgcttaacccataagtttctttctgattctctctttctggcaatactgctacttctgtactatgtgtgcaaattatacatatacacagttttagaaaataaaagaaaaaagcacttagcttgactggttgtatggtttaaactttaaagtcagtaaaaatcagaaaacattgatgtacgtcaagatatttagaaacgttttaattagcatgcaaaaaatcgaaaaataaaataaaagatgataaacgttaggattggatctaggtgacgttagtacttagtggtattcaagagaaaactgcaattgtgatatatcttagttgttctataagaaaattagggctgatatgatatctactgcttttgtggactatatcagctacaaatctaattatacagaagagaaattggttgtgcttgaattttagtacgtctatatacctcaactttaactaaacaagtaactaatagattggactaaaatgggccaacactaattactaaataatattagatgatattgatttaaaatgtattgagaatgagtagattaagttgatgaaaagaatagtatatagtatttattttgacggcaattgaaaaacagtccaacattcttccgaagtgtccccaaccaatttcgcttttctttccctcgaaccgccgcgatgtctctttttttccttttccagacaaaaaacattatttttgcatgggaattgcaaattttgaactttcctagcacacgcgccatttaagcgcgtaaattgaatctaactagcttcggtaaaccaacctaaccggagactaaatttgttagaccaatcaaacagaaggaaaatagccaatagattcaacacggttagttttggtttaaaacaatagtttctgtttccgttgaaatatcgcatcaagttcgaataaaaaggaaaattggataaacaaacatttgttggcctatgaattgattttacagtctctctcaattgaacactaaaccagatgtataattttttagtataccaattagatcattacttcttcttcttgaagaatttgggaatagaagctcggtcagcgagtatcaatggatcccgagttccagcaaaccgggcctgaggttccagaagcaatgcaagaactggatgaagaatgagcggagctatgttgagattggtgatgtgtagatgaagaagaagatactctgttctgttcttgcttctgttcttgcatcagtttcaaaatgtaagcatcatcatggaccgagaaaggtgtgctgctcacaacaaaatttacgaagatttcaattccgatttaagagatagcagaactgattttgattttgagaagaaatgttgtttatttttacctattgaagtcgaggtgtacaagttgcatatcttcagaaatctcgatttcgactactgcgtgagggtttgtctatagagatggaaatagattaggatatcgaaaaacatgaaatagaaactacggacgagaaagagatttttgaagtacctcaagtagaatgaatggtaaggtaaatccttctgctgggccttgagtcttcacaaccatctcttgatttctcgacataagactctcaagacttgagacctgatgataacaacatttgagtaacattataagcaaaacgtagaaagacggtttaacatttcattaagacaacataaaatgattcaatacacgacgtatctatggattctagaaaacctgcaatatcaataacttttgtcatctattgacatgcataacaagatctcaaattctaagagagtcttgtatttaaattttccatcaaacagaaagaagatcaccttttctctcaactctttaagaaaagcagccttcttttgcacactgctcataactttattacgatccatctgcaaatagaggtagagagattagtagagaagacgaagagagagagcaattacatagatgagataactgaaaggaaaagcttggaagctaaaccttgacttcttccacatcctttttgcaggtaataggaagtcctttccaccggatttcctttttatcccttgcaataatatccaacgccatgaacacattgagcgcatcgtagactctccgccttatgttcttctcattgtactgattgaacataagagaatgttgttatagctttttttttttccaaataactcaagacagatgatatgagctttccatctcgctatacctcattttcattcaaaggcttctctgcgttttgcttaattgtggcaaaatctgaaataatttcgtctgcaacctggaatcacaagagccacagtctcaaacgtagattttcacattttctgatacaatgcctctatataagggcaagactcctgattagaagaagaatttgagacaatgctcaacaactaacttagaggattgcttcttgaagtgaatacttgttcatataaagatcaattctaatgcgtcttaaactgaaaactcattgattacatcaccaattccttaatggaacaaagagagtaatacctccttgtaagtagttatcttcttggcttccaacttctgacaaactgtgtgaagttaaatcaaaatcagcaaaacaacaatactttcacttcaggcatgtttgagctaagagagatatatcactgacccataacactgaattgacgaagcccgcctccagaagttcttgattgccctttcttctctgatcttttaaacacaaattcaatacagacattttagctccaagtaaaaaaaccagagactttgtgagtaagaagaataattaacactgacccaatttcagaatcatcatcaacaatcaatttccttctcactggagttttctcaacgctcactgaaggatgttgcctctgcttctctggagtgacaaacaactccatctccatactcatccttctctacacaatttaccaattaacaaagttagctacacgaaatcaaatcaattagttgttcatgtctcaaatccatcgttgactaaaaccgatgaatcaatagacacaatctaaaaaaccctaaattgttgacagctccaatttcaattttttaacaaaagctaaacaaaatttatgaaatgggaatcatcaaccagttggattagatctaacgatggtgaagaaaaccctagttcagagaaataaaggctaaagctcgaatccgtttcaaaagatcaaagaacgaaccagtgatcgatcttccaatggcggaataaaaaaagatggagattttttttctagggttttggttttactctttttattacacagagatgcgaacaacaaccaaaaaaaaaaaatcggagatgaaattactttgggtgagagttcccgctataaacaaacaaacaaactgtaacaacaaacaaacacagaattctccatagcccatcaaaagcctcaacaaaaacaaaacacacgcactctctgtgttcgaacccaaccgctacggtgtcgtttttcaactttggcgggggatttaaatgggccttttgtaactctttgtaattttaagcccgttgggctaattatatgtctaaaatcgatcacgtattaaactctttgataatcgataacgttaccaaataaataatgaaaatttggctgtctctattacatatgttgacagttgtgtttgtattcgatccaattgtttaaaaaataataatattaagttcactgaatcttgaaaaaatgtttggtacgtatgcatttaagttattgaaaacattatcgctagcttataaagtttatgattttttcgtcttatatataagacatggtccgtatcatcaacttgtaactattaaaaaaaaaaactcactattctcatatactttttatttcttttctaagatgcttatagttttacacgttagtgctttaagcctgcaacgtgtgagaaggttgcgttgcactttcactagatcgaaagaatatatgcatagttgcttgatcctttttctttttcttctttatacgatgatcgtactcgtatagtactgaaaactatatgataaatttcagcataactgtttgttcaagttgttaaccgattaaaagctttaaagtttgaaaaaggatatgtttatgataattgcaaccacttggtacttgccacttgttctccatgattgttttttttctctccatatgaagattaaattaaattattttgtttgtagttttaactagttcgagttgataagaaagtttggagcatggccatgagaaccaaagctgttcctagttcctacgctgcttgattgcggagagtcattctcttactcattgcttcatcatcatttccaaccgtttagagtttcactagccatgtttctcttcttcacctctttttttgtttaacctttatgtataccttccttctcgtataccttaatcagaccggtatggactaatcaattcctcatgctattcatagctatgcactatcataagattttgaaacaatataacttcaaatttgatttgtttactttgatgtttctatgtgttgtcagaatatataaatatatgttttgtcattacaaaaaaaagaaatagtgtgatctatttaaatgtttgtttgctgtttgtatatctgtcgttgttttgggagatgagaggtggcaactcccaatatctttttggggtcatcttcaatgtcttctcagatctcaattattgagtttttaaagtcatgtttgattctttcttctcttttttttggttcactaattctactctttaattagtcttctttttttgtcaactttcgtttatatcacataaacaattatatctattgcagtaaatatattattcataatgttcaagtgtcccttgaggaactgaacatacaataaacaaaataatgttaccgtatcatatggtatgcgtatttattccagtagctttttctttcttaacatctgaaatctagtagagtaatagactatttatttaattttggaaatttaatatgttttttatatttttcctatgtttgcccaaaattgtttttacacaatcattactcgccttcataaattaaaaactgacatggtgaaatacatcaacaagctaatatgatactcataaaactgactcaaaatgcattttttttttttaaagtaaaaaatatgttgtcctcgtagttatcctcaaactctttgattcgattgttttagaatttataatacacttagatagtcaacaaagctggattagttaattaaattcgtaggccgatgtatactaaacactgatgatgacgcataatcctacttcaatggataaataactatacataaaaaatagtattaattttgttacactcactgggggcacaataatgcaattcgtcactacaattgatttaaataatattttaggattagtaatcatatcactcaactaatcaccaacaatgtctccacatagaccacaactatctagcaagattataacaacacctatcacaaacaagagttttcgctacatatacaatacatacaaaaaaatcatatacacatcggtaacgagaaatcatacatatatcatacacataaaattcaattactcacatcaaactcaagacacatcataattctattcttgatatataaaaagttgttgcttgtaacaagatagatgcgaaattcggtttattacaagatgattaaatattactttttttttttgaaaagacaaaagttaaccggtttatttcccttaattatttttggcatttgaatgatatgaagctttttattttgtttatctaattaaaaaattccgcaaaccggttttaattatcaaatttattggttgataagcacatgtaacaccacgataagcaaagcataaaatcgtaagagagaaaaagaaacattgtttaatttgtctagatggaacctataaaaataagactagttaataagagatagagagagagagtggggatcaggtggtatctagttcaggctccttctctctttttctctttcactcagccacgaacgaaccttccccttaatccaatcttcttcttacataaacacctctcctcccccaccgtttccaaaagagagaagctt

SEQ ID NO: 1397 - DNA, 96424 bp, Arabidopsis thaliana
aagcttctgaaaaggactgagatgtattttccatcaacaacattcctggaaacaaactagcaacatgtgctagtgaaagatagtacctgcaaaagaaaggtttatatcaacattttcaattcaaaagatgtaaaatttcaaactctaagttaatcctctacatagtaacatgaacaagtaacagcttaaagaagcagtaacaacacaaattagcatcaacatacactgaaaaatccagactttacttaaaggtaactacttgagaatctacgtaagaagggatgattcaaaaagagagtattacaatccaggtggggtagtgatcattggatcccagctcctaaaattcccattgcagtattgctgagcttgaggcacatgaaatatctcgtcctgcaaaattcaacagatgcagtaatcaacacaaaatcagagagatagaggaacccaagttctaaaaaggtttttttttaccatgtagggttcaggaacaatgtgattgacgataatcgacatcggaatcacccacaagctcgtgatcgctgcaacggctaatttccccattttttccctctaatttcccacaaaaggaaccaatcggatccgaatcacattcgcggatcaatcatgggttttcgttgcctgacgaataattcacaacggaaatcggattttcccggaaaattgagtgagctgaagaagacggtgagattacatcggagaaaacttacgaggagtcaaatcgaagtcaacgtatcaagattgatgttgggcttttactaaagcccaagtaagttgtaacaagaaagccctgtatttatatatatttgtaattctcataccttaaaaagtcgatatttcgattagtcctcaatattttcatttaactactgttagacccaaaacttttgtagtgatcaaaattttcctatgtaaagtgatttcttcgctttattatcttgtcaatttcactagtcatgctaaccagatcaattatcactctataattgataacaactgcacagatgtgtgtgtctttcttgttttggtaataatgcctagctgatattgatatgactacgaatgaatttgaattattgtcaaacggaaaaggttttctaaaattatccccatattattatttctcacatattctatcattttttaagtttaatgaaaatgtatattaaaagttttctatatatattgttctttttttaatggtcctccttgataattattagaggaaaaagactaagcatgtcctacacaaatagacaacaaagctgtctcgtgtccttaagaatatacactgcaaagcgattttcattaaaagatgtgggaatcacaaataaagctttataagataatgaaagcattcaattagaatctctggacccagatcccaacctttatctaatttactactatatgttttgactttagtttatactattagtactttgttttaaggtaaactccattaataagctgttttctcttttgtttacaaagggacaaataaattataaaactgcataaaattaacgtgaaaaacatatataatcgttgattctgaaaatatgatggttcataacgtgtaaaagaattaaaagatttgacgacttgattatcaatttatgaacatcaaagcacaatttgtttttttcagactttctcagtttagtttcctgatgatgatcattagatagtttccggatgtgattatttagagggtgaggtgaataatagttgttactgatcatgatcattagatagagtgggtaaaaaccaagcaaaagaaatggtcccaaaatttgcatgtgggatttgattcatatatgtctaagcagcatcggttgatgtcataaagtatctcatttttcttttctctccatgtgtaaaaagcacaccacctttgctatataaaaagagagaaaccactctctttgaattctatatacatatatcaatatatatacacacacatagataattttattgacgacgttaacactctagttggatattttgtaacttgaaaacagaaaaaaaaatctgtattaatataattttgtaatcactggaatcaattaattggaaacctgatcaaaaatttcttaatgatactacaaaactttggaaattataccaagatatatttatttttagaatataagctgataaagctcaaaaagtcttattttaacttgttattgtatatgctttgtaagaggttgagaatttcgattgtacgatcttgttatctttttcattaaattggctaatgcataaacatgttatttgatcatgtttgcaactttctctcgcgacttttaattgtactatatacatttatgaaaatataaattttgtacttgagagatattttttctcctaatttttgacccaatcataagtataatttattaagctaaaaaaagtaaataacaaaacgtgaaagatggaggacatgatgagcacccatgtgcgtagtcatcgcaccacatgcctagtcgccaatctttcattatcctttgctacaccttttaatccatacttaatcccctaatttacttacatctatatatttcacaatttgttaatttggactttggatggtggttctggtagtcgtcgtttagcgtatagcaagtttaccaaatctaaagtggttcacattttacggctgaggaatccaaagttataattttccacgagtatcactcatatattaatttatactaaagaacatcgatatttcaaatgtttatgttaataataacaagtaaaactacaacagtaatgatggataaaacaaatattcaaaatggaaagaaaaaaatagacattttagaacagtcttgtgtggattgttattggttttgaacatgaaaggttgcgtctgcaatttggagatctcaatcttaggggtatgattagtaagtagtcatagtcataccccaaattattgctgcatttaatggtaatcttatgttttgttttctactcctatcacaaaacagtaaaatagttatcaagaaatctaatttaaaatagtaaattaaaaataatttgatacatgtacaagtttagcttacaaagattattttattatctaaatatacagaaatcctctaaagtagtatcattagcttgtgaaaattactatcattaattcagtttacattttaaatctataagtaacatctaaaagttttttttatggtaaattaaacatcactttctttagagaggccgttatataggcaataatgttttcgagaaatatataagaaataaaaagataatttttcgtgtttgataaggaaagaaacgatgagaacacaaattaattagtgcgaagtcaattattagttggtgattcattacttgcgtgcacgataaaggaagcatctgagaaaattattctttcacgatattgggaaatttttaccatatacgacattgtatatctgaagattgaagaaacataagaaactaaaacatagagaagtttcaaaaaaatatcgcgaggaccccatgcaaagcaaaggcacgtgcgtctgatttgcatcaaagtttgtgtacaaaattttttaccttttcgtttgtttttcgatattttccgtttaattaaacaaaaatccgtaattgttacaaatatcaacaagtggtaaagaaagccggatgttttttttttatcaccaagatcattattcttaaagtcaacaagactaatcaaatcatcgagaaaaattagtttatatcatctaaaataaaacactattgtgtttctgcaaatacttttagcgctttgaaaaactgcagtattttaaattacgatttcaaaatcttgaatttattcgttataaaagagaaaaaaaacttcaatttatttttcttcttatcagagcttctggaacgggacatccaaaactagtcatgatatgtgttttataaatatacatttctttgcatgcatgcatattcagattgtggtttgtaaacagtgttaagtcatatatttgtaagtgtttaaaaaaaataatttgtaactgtaaagtatgttttgtatatagttttagatcatatatttgattttcattagacaggtctttttctagtttactgctaaatattaatttacatagataatttattttacttttttttggacatcaatttagatagatatagcatacattttttgtcaacaacaataagtatacatatacaatgtatatattgaacctataatagaaaaaaatcaaataaataaacattttatgtaatcccgccacttgggagacagatcactagttagttgaaatggaggctttcaagcttcggatccaacgcacgtaatctctctctctttcttctctcttttttctttctctcttctttctctctgtaaaacttgtctaatggcagagatctgctgcgtcaaagagatccaagaagaagacgtggagaagatccgattaccgacccgacccgaattagacattcctgactctgatcacgaagatccaacggtcaacgaagaagaagggtgcaagactccaacatcgtccgatcacaagattccggaggtgaagtatacgttatgtccaccggctccgagaaaaccaaaaccgaatcgatcttccggtacgaaacggaaattaacgccggttaatgttgttaaccgcataccgattgatctgagccgtgagatcgagatgttcttcgaggatttggaccgtaggatcaagaagtcacggaaacaataagaagattattgccttaattggtaatgatcgttcatttctaattcatgactgtgtggtggtaatttgatcctttgaatttttcttcattttttttctttttttttcgttttctgtataattaattagctaataacaataagaaaatttatgtatcatttaatttggatttatacaactgatgaaacaaagtcaaagctcacattataatttcttcttttcaatttcaacattaacttacgttttcaatgcgtttatattaattgttattttctgcttttgatgtgtttgatttttggagtaaaccaaacttgtaaatgtaattaggataattaggaggacaactaatcatatcaaatttctttataaaaagacaaataatcaaatctaaattttattttgtatttactaccaaatctaattgcatgtctctatttttgatataaatttaaaattttaataagaaaatttaatctattaatgtataaccactagctttgaaatatgatttttgcatagaattagtttcttcaagctaagtagttctaattagttatattaatacagtaagaacatatactacaaggggctcgtcaaaaatagcttgagtagaaatatagtttgaatcataaaattatactccttttgggtcttaagtttactatcgagaaggtagtcttagtattacacaaatgtatttcatatagaagaaattatatatttttacctgattcgtgttaatatacactgaaggctcattttcccattaacacacaaatctatgctaccatatcactagataattatacctgaatgagcagtgacaaaaatagatgtaacaaacctaattaaattttgacaagaaaaaataaactagaaagatttttaagtggaaacaaacatccttcgtaatggatcatgcttcctgctttgggtacaccttgtttatgatcgatggatgaattaatattttataccttttattatgtgtgtgccattgtgatgtatacaaggttaaaattgcacatcaatcaaggagaatatcgttaccataaattttcagaattagttagatacatatattcttctactttcatgtgtgatatactgactgatagtggtattaaactatttctgtaacggagctgaccgctataataattaattaacattactaaaatatagaaatgaataatgatctcttttgttagttcttaatccagaaaaaatggtcaaagttttccgatatatcttatctaataaaacacaagtaatagtaaattactctatatttggcagttgacacttatacaaaaacctacatgtcaatagtagtagtgctatacaaaaaactctaaagtcctatatgatcatggatgtacattacaaattgaggacgatattcatatgtctctttaaagaacggatgacgactcaacagaaattggctaatgacgatgaatataatctcccgctaactttttaaaaaactagctagctagtgtaatattatctcgtatctacggtactcccactatgcaaacacttacaattaaaattttatctatattcatacgaataaaatattacgtacaaacaacattatatatatatatatatagttagttaagacccaattccataagcatagttttttctctcgtaaaaaaagataagtttgaaagcagaggaacacaccatgcagtataatttggagaacgcagaagtgaagaagaccggagattctaactgctggtacaggatgcttgccatgcttggtctggttttcctgattctcctttttatcacaaattaaatttttaattaatcaattttcttaattgtatgaggttaaataatatataatgtgtatgacaaaaagttagatgaataaatatacctgaattttgtgattttggagtagtggatgattgaaagaagttttttttatatatataacgaagattgttcgtaaatatccacaaaatcatatatcatcttctcatgtaactatgaaaataatgtataagatatatcccgatctcataatttacatacaaaaatatcaaaataatgattcttattatatacattttttacttaccttggtagaattttcaaattttagtagtttctcgggactgaacaaaagagaatgagattataagaagtgcaaagagtttgaaatgaaatccatgaattacagatcaatatttttggaagcgtttttagtagtatttttgttttacctatatatttgagattagacccacaccaagtatttataataattagggatttttaatagtagtttttatttatatacataataaaaaggcttttgttaattttttaaattggtaaactttactttttaataaaaacttataactatatactttaattttgttaattgtgttcagatttcatatactacattataaaaatgttttctctttttttattggtctacttgattttttttgttaacacgtagattgatatttggtccacttggatttgacacgtggcgagatataaaccgttagataatgggatatcaaaagtaacacttgattagaatggcagggatcccttgtttctctcctttccactactctccctccaaaacaaaaatcacaacaacaagaaaaaactttgaaatccaaaaaaaaaaaaacccgagaaaatttgaattttattggggaaaaaaagaaagaagatctggaagtttctatgaacagtaatggcgaatcgaggcggcgaaaacgggaaattggatcggaagaagacgatgacgatgaattgggcggggttaggcgagtttgaagacgacgacgatcattttttcgatagctctaatcgtatctccaccgtcgtaccttcggatttagcatcatcttctgacgaagaagaaggtgagtttgatgattgccggatctcgttttcttctaatgtgtcgtcctcctctcgcgctgctcctgcgccggatatgtcgccggattatgatatttggatgtcggcgccgggatctatcacggagcgtcgtcgaaggcttcttaatggaatgggacttgaatctaagaagactaggctcggagctatctcgattcaacgcgtgagtgaacctgtggcggcgacgggtgagtgctcaggttctcgcgttgcggaagtgaaggtggaggagtcagatcacaattctccggtgaatcaaagagttcgtcgatctccgtcgatgtcggttttgcttgtacggtctagatctgattccgatatcgaagcgtcttctgctgagaaacagaggaaagaagagatgttagggaaaacgtcgaaatcgcgattgactagaaccgcgtctgcgattggagctccgtgtgcgaggatttgtccctacttcacccaaacgcaagcctcgccgccggacgcaccaaacggtcatcatcagtctcaaggccaacgtagtggtccgttgctctcttcggtagtttccaatactcgttttagtgcttttttcttgattaagaaccttgacactgggaaagagttcattgtgaaggagtatggtgagaatggaatgtggaatcggcttagcgatttgcaaactggtaagcaattgacaatggaagaatttgagaagagtgttggttattcatctgttgttaaggatcttatgagaagagagaacgcgaattcgacgatggattttaggaaatttaactcgtatgtgtcaaagagtttgagagtaagtaagaagagaggagctgctttgttaaagaacataaaggacgttgctcattctatgagctcttctaaggtttcagagaaagagaaggattcaactggtagtggcacaagtagtccaaaagtagcggagaagaacaatgagcaggcgaatcaatgggtgaaagtgaggcattcagggaagtctcataaagatttaagtgctttgcatatgtgtcaagagattcaagctcatcaaggaggtatttggactatgaaatttagtccagattcacatttattagcaagtgcaggggaggattgtgcaatccatgtgtgggaggttcaagaatgtgaaatcatgtcaatgaatgaagggagcttgacacctattcatccttcaatgtctggttccacagataaatcgtcggaaggtgatgctgcagaagtgtcacaagataagaagaagaaagggaaaacttcaatgagtaaaaaaggaaaccagataccagattatgtccacgcgcctgaaactgtgttctccttgtcagataaaccaatttgctctttcactggtcacttggatgatgttctggacttatcttggtctcggtcacaggttagtttgtgttcctttcttgccaacattaatgcaagcagccatgaatttctattgaaaaaagttaaatcattggttgccgaatatacacagctattgctttcatcttccatggacaaaactgtgcggttgtgggatattgaaactcaaagttgtctaaaactatttgcccacaatgactatggtaagaaaggaaatatatttcaattctcaaattccttaaatttcatatcgttttgggagattcatgtcttcctctatggtttttagttacttgtgtacaattcaatccattggatgaagattacttcattagtggctcccttgatgccaagatccgtatatggaacatatcaaaccgtcaagtagttgagtggaatgatctaaaggaaatggttaccgcggtttgttatactcctgatggtcaggtacgtaattctcttgaactgtcaccagcatatacttgcattaacgagctcgtattgatatctctatgctctttggtaggctgcatttgttggttcaattaatgggcattgccggctttacagtgcagagggtatatatgctaaaggctcattctatttgtaaaccatgtctataaccttaattcttcataaagttaacagactcattttatttgtttttctgtaataattgatcagattgcaagttggaacaaacaaaccagatagatctgcagaacaaaaagaaggctcaagctaaaaagatcacagcttttcaggtttcactctttctttttgaaaacgtttacattgttgttgttttttttgcctctacttaccattgagtttgcttataccagttttcgccaattaatccatcagaagtgcttgtaacttctgctgattcacgcattcgggttcttgacggtactgaacttgttcaaaaattcagaggtatgtaactgaaacaactccatttgcttcgttgttcaatttcacaaactattaattctaaatctcctattcatacataaaccaggcttcaaaaacatgaacagccaaatgacagcatcttacacagtagatgctaagcacattgtctgcgctagcgaagactcacaggtttacgtgtggaaacacgaggagccacgactaggtatcaccggtagaaaaacagtcaccatgtgtacttcttatgaaaccttcccgtgcaaagatgtttccgtggcagtcccatggaacggcgttgtaaaaggtgaaccaccatccacacaacaccaatcgaaaagaaacccgaaaaaaccatcaactactactactacccctgaaaacacgaccacgggtaaaaaatcaggcctcccaccattacctaagaaaaacaatgacggcaccgcggatggagcaacagaacaacatcaagaagatgatccagctacgcatatttcgcataacgaatcagagaacaacacaggcgagtcaataaagcatggggattcaccttctatatcaatctcctctcggatttcttcttggtcgtggtttgatagtagtggcagtcatggaacacattcagttcagccaacagcttggggaatggtgattgttacagccacaatcaagggccaaatccgaacttaccaaaattttggattaccacgcagggtcggtcgtcaaggctctctgttttgacacaacctctctcagttcttgtacatatatacggtgtattatgtatagttctcatgtattcatgcatagtgtattgagtttaatttgtatactgtatagtcacaaaacaagaaggaacttgatatatagagattatatttctgatgcgagagcctctttaccgtttagagagtctcacactctcactttttttttttgacatcatcacagtcactcaagtacgttatcgcatgaagatatatcccaatagtctacgtgctcacaaaatcaaaactcaattaggtttagagtgtgtactagaatgaaattgtatcaaatggagggataaatctatttgatgactagatcagtagtagagttttatttatttctttaagttattatagtttcggacctttcggtgttggactatatagaaaataatcatgcccgtacgagctcatgctagcatgggctttgctgactgacatccctagtttaaaactataagaaacctattacatctgagtttagaaccaactgattattttggaacatttttgtatattgattgttgaacccaatatttaacaagaaagaaatagaaagcttacaaaacagaatgatgtggtccaaaaaggataaagtgttttgtctctcgaggtacactggacgatgcatatggtctttgtccataccatcttcttttctccttttctcaatttcgagcttctaacggtaacggtacttatgctatttttctttttattcaatattccaataaaaatagtattccaacctgaaatatcaagacactaaccagaatttcataccactatagaatcgaaactaataccaaatcaaaaattaaaatccactaaattgataattttagaaacctttgttcccttcaattaacaaccttaaatcaagatgatttggtttccgtacctacattggattcagtattataaatagctatgtttatgaatgaatgtcaaatggtttcgtggtgtagttggttatcacgtcagtctaacacactgaaggtctccggttcgaacccgggcgaagccaatttcttttattttattttaatctcgtcgagttttgattattaccaaataaaataaatcaattattttctctccaaaaagtatgtacaacacatcatttcattagctacatcttttgttcctaagtttattcaaccaaatctctctctccctttgagtctcaaagcttcaatggctcaccaggtactgtttctcctctctttttttctctttctctggctctttaacacaatagcctttatatacacacgcatatatatagtatagaccatgtgtaatggatgtgattatataggaggaaggatggccattgggtctgagaccagtaaatgcaagaatcggaggactcacaagaggaactcatcatcatcatcatcatgaacaagtctctgctggttcaatctccttcagctctcttctctctccttctccctcatctcaatcttcctccgatcttgattctcaggtccgatatatacacttctctacttatactataaatatatgcatatagatatatatagttgcatatatacacactttttatatagactatatatagtatagtaaactattcacgggttagcagattcttttcttggttgaatccttacatatccctccaaattttcatattttgttccatatttggatagatcaatgaattactttaacattatccatatttttgttttatttcagttttatctttgtttttcgttttcttgcatattaattgatgagccgtttgaaactgtctacggttcttttggaaatttagaaggaatacaatgattctactttgactactagtttggatctattgaattcacattctctttcaaattattaaaatgaatatactaaaatagtattgttgttgttggttgagatgacttcagagcgaacgtgaaccaatcgtatgcactttaaagctgtgatggttttgtctgaaaagggcacgtttgtcggaaattgttgattctcaaaataaagttattgtataaaattataatcagaccaatttctcaaatatgttggcaccttttgtcttttgatcacaccgtattgaaaagtgaaatcattgaaaattttaccaatagtccgttgagaataactatgtgattatttcttttggcattcacgtaaatttgaaaactagtgatttgtgttcagttttctgccattcagccaattttatacttttaaaaacaagaggttccgtcattatgcagtttaacaaataaattatgtttttaacctaacgatttcggcattttactctaaatatttggttctacatcagatttttgttcatacttaactttctctttttggtcaccattcaccatcacagttcaaatattgacctcttttgtgaagcaaacatggcaaccactgtgagacttatgttgtctcaatattgtttttcttaaattccgtatatacactaaaaagcattttacacatctattttttgcagtcgatgggatcatttttccgcgataggagctacacactaggaaacctaatcgggatatcaagctttctagaactttcaagaagatcaaaccgaacaaggaatgatcaaacaggcgctgctagaaaccatcaacaccataagaatctcaaaacttactacaagccatggattttctctatatgttcaaaactaagcacaaacgccactgtcatttcccataacaggattataaacgaagaaaatgatggccgtaacaatgtgcagtctcttggacacttcctcattatggagagacgagctgtgggatcaaccataaggtccacaccgacaccgacaccgactatgtgaatgtccgataatttatagccaattgtgtctttaaacgataatggaatgtgtaatatgatttcctcatggtctgacgcaacagattctgattgtatttttattttgtcaatttgagatttggagtttaaaatttgtttttggtttcttatgtatagttcaaaaacagttttctttgcatgagttgcatcaatatatttttattgggcctcgttgaaagaaacaaaatttcgtatctaataaggcccaaaaaattgaaacaattcctgattaaagcccagtttataaactatttcgtttgggcccaacaatctcacaatggcaggggtagatttggaaatatagaaagaaggtctcaaaaatcactaaaccctaatctctttattttggagaagactataaaatcgattttctctcacaaatcttattctctttcgacttcagtggcggcgcattcagagattcaaactcaggtgagtgatcataatcagatcttttcgctttattgatttcatatgtagtctctttcgattagtgtgaaagttttggaatcgacaaatctttacgagttactactactactagagtacatcgcgatttgcttattcaatcgtttttgagaaattgaattgttcgtccgtaaaatcagttttggaattgagctgataatattagaagatagatatagcttatctgaagagaaaatcgcatagaagagtagatctgagattttgttcttgaactaaatatgtcacgattattgaaattggcagagaaaatggtggcgacaggcttattcgtggggctaaacaaaggacacgttgttaccaaacgcgagcaacctcctcgccctaacaacagaaaaggggtaagctctctaatgttacttactctgtttcttctacttagtcctatttgattccattggtcacttttagtttaactatcggtggttggtttaaatatattttgaggttcatagtagaataggtctagatcatgagctttagaagaaaccaatctttgaggataacttgaagttccttgctctgttcattctatttgttgagtctaatagtcagggattaaccagattaagttaattgtcttcatgtctttatcatagtatgtctttgattcttcgtagccttgttgaaaatctgatttgcatattgttacacttgttccgtttgtttttgtttattttttggtaatctgtttacattttcaagttgagtgttatgatttccttctgaaagaagatgcattatagtatttgagggtttttctgataatgagtaatttgttatgtgtagaaaacaagcaaaaggactatttttatcaggaatctcatcaaggaagttgcgggtcaagctccctatgagaagaggatcactgagcttttgaaggttggtaaagacaagagagctcttaaagttgccaagcgaaagttgggaactcacaagagagctaaacgaaagagagaggagatgtccagtgttctccgcaagatgaggtatctcctcttccatcttttttcaacaaatatcattcattatgcatcttactatttgctccttcataatgaaatgtttttcttcttgctgattcctcttgctttttgtttctttgcaggtctggtggtgctggtgcatccgagaagaagaagtgatgcgctgactctggttcagcgctctgtttcttctaaaccagttttctgttttttgaattttttgcagtaccttgtgtttcctttggatattttgtagcagagataattaaatgttaaaacgaaaccattatgacttttgagccagttgtcttcgggtgtggctatgtccggtccaatctggtttgaaacgagtttttcttgaccccattttgtagtctttcataaattggtcctacttcgagatttcaaatattcgttacaatgatgatttgcataatcgatgttgatgtgcttgaaagttgcaaatgttggtgatctttttaagtagtgagctaagcatgatcggccacaaagttatgttattgtgatatatactaatatatgtgatgatttattaggcctcgtgtgttttcttaagggccaagcaactttttatgggcagtcatcatcatccgtcacaatcatctattatcccccaccatggccgttcttttttaatttatgggtgaaaaaattaaactatagactgatctataaggcaggacgaaattatccttataacaaacaaaaaagaaacatatgatcgtttatggatatgtgttggtacacatacgtgtgttaaatgtggttcttagttattggtcaagttaaaaaggaaagcaacttgaggtgcatggcttgtgttattaaaggaaatcaaattgttgtacaaatttgaaaatgattggtgcatgtaccaatcacatatattaatccattgtgacgtgatgacgtcaaatatgtgagaaattgaacgtaaaagtggtgactaacctaaggccccgccttgattgtgggcaacgattgggacaagtgagcaaaaagaaaagaaaccttcttttaccagtaaacagacaaggataaatatatgaatgacctaaggttaaaaataaaatatataatctaagatatataaattgattattcatcaacatcctatatttcagatacactaagctcttcggatagtttggatcaaaaactgtccacaataattttggtttgagtcaacgaaatattaggctggcaaaacaataaggcttgcaagttgcaactttatacttcgaagtaaacacatgaattgcctcgaagctatatttgtatccaagatcaattaaaattcatcggttagttttatttgacgaaaaggaaggacgacccatataaaattttgattagtatgtgaacacgagaatattaatgtaattaactgtctttgttactaattgtttatatctatataatcattagattttttaaaaaacgtatacaatatgatctaattagcgggagattgtcaatcgtaatgataagtgtaggcgtaggagttgcataacgttgttaaggaaatcgtcgacagttttacttagccatatcaaaaaggtcccaaattgagggaccctcattgttttttttttaggtttggccaaaattgatgatggggaataatgtaaataagtttttcggcaaaagactagctagagagagggcacactaatatggaattttcatcttagttaaaatgttttataggacaactaaatatccatcacatgtactatacataggtcatagacacatagtcaagatagacacatacttgattttttttttgtacacccatttcttaaagtattataaattatgaaataaaataatatttcattgattctgtcattccattcctacaacaaatactcttgcacagacttcggtatgtttttatattaccaattagagccttaactccaagtaccacaacactacactgtcacactataaaatgagtaaatgagatcagtcaagcgaaggacctagtctcagaaaagtaaaagctgcgaagttactgtaaagagagaatgatcttcgcagaaaactatacatggaggcatctttttccgagtgtaaaaaatgtaaatatatgatactataatgtaaagatccggctcggtttttgagccaagaaggttccatgctctaggcttctagtgacaagtaattttcattgttaattcttccagagtacatatattgttcttattatgaatatcaccaaacaagactcgtaaatatgtgtgtatcatctttttccacgtgacgttagctagtatgcaatatttttatcctcaagaaacagttacctataataacccaatttggcaaaacattattcagattcgctggtacgttttcaaggaccggtttgaaccaaattttactacctatgttatgactaggagtcatagcctatgaccgaatctaagacttcgatacgaataaaatatttatgatacgatcgagtatacgaccatgaagataaaacggatataatttcaaccgttcgttttcttatcctatgattggctgtactaagaacttgttgaatttaaagatcgaagcaaatatttttttgaaaaaaatcattagtcttgcaactaaagacaaaataagttgtatacatttactgatatttaatttaacgatttaacaaaacaaaaaattaataaatagtattggtattttagatgttggtaaaatgtaaatttttgttaaaaacaaatacagtaatagaaaaaaaatggtgatgtgtaaaaacagagagtttggttgtctgtcagtcacatgtaagcgaaaaacagaagtacagagtttgggattttgttttgggctcaaattctcacgcgtgcatcgaagcgcgtgtaatttcaagatcgaatctctcggttcttgcgcgtgggttcccacctccctgacgcaccgttacttttgtcgcctagtggtccgtgacggtcacgagcctcttgctctctcccaaggcgcgtcgtttatcttgctcattgtcccgacattgattcggtcgtcgtttactacgttagatttcagtctcttttacttcagtttttatctgaaattctttcaagaaatatcatattttatgttcgtcgtctattattatttgttgttcgaactttcacaactgatattgtaaaacaattggagtcattttaattactagaccaagtcagataaattcatttgacgtctaatataaatacggtatacttaaaaaattcatagatgtatgattttgtatttttcctcatttcttatttttgggtgctaattaagatagtacaaaaatagcatgtatcatagtgcaacttatcgatgttggccaatgacttttatcaataaaactccaagatttgtcttctagttggtaaagcatcattcctctaaaatcattgttgacaaagcaaaattacagtatttgtctagacgagtatctatgtgttaatcaatacttatattccttattaatttaactatggtattaaactaataacaatattttgacttactacaataattcatcatttcatttcttatcctcgctatataagatgaacttttttgtccatcaatattgttttgtcgttttcaaaactatatatatgttttttttttcttttcgaaaactatatacattatcaaagatcattcatgcattgcgcaaaaataatctaatatacttagcgggttggtctccactactcatattacgtatatttatacatacacacactcgaaaacaaatactattactattagtaactttatgaagaaatattaattttgtattataaattaggcagcaagacgatacttctcgggactgacaaagaacgttcctttgcagtgcataacgaaatcattgtcccttaattacttccaataatattttctgcaatatatcattatataatcactatgattcatgcaatagctacaaggtaatactattacaatcattttaatattaatcactatcacatattaatatatatcgttttcctatttcttactacaaaaaatattcaaatataatgctcttccggctttctggatgtgagggttagacgttagttagtttcagcacatgtttaaatgaaatcttgtatatatgtcatgaatatgtatttactaattgttacaaaatcatatgtgatgattaactcatgatatgaggaacaaatctttaacaaagtcaataattgaatttcattgttgcagtaatgcgtgttaaattgaaattttagttcaaattacctacgaatttgagtatacgtagtttagttagatgttcaaatagctagcttgtagataaagtctcaaatagattcttctttgctttacatcaaaatcatcaaaaagtctaattaaagtattccgtaaaagagactataattttaaaaatggaataatcagaaaactatgcggcatttggaccgatatcatcataaactatagtttaaatttgtttatgagatattagactcaaaagctctccacaatatttggtgacatgtagttcagttcatatggcttaaaaagaaacataaagcacgtacaagtcacatgtacgtagtataatcaagtctttaggtgaataatccggaactggtaatgttcttttggtaatgtgcttttgaatgtcatagattaaaatagataattttttgacagaaactaaaggtcaccgatttaaaattccattttagttttcagacattttaattccaagtgttgtcatactttttcatggttaaactaaaaaatgttatctctaaattccaacaaaaaaatggattcttaatattatgccttctcgtagctaatgatatggatcatggttatagctgctgcgacagaaatactttgattaatgtgctgcaagctaagttggttagagatttcaattaaaaaaaaaacaacaacaggagaatatgtatatataacctcattcaaaattttgaataaataaaaatatgttatataatagaacacattacacgcatgtatgatgatatcttcatactgaaaaatgaaaaataaattctgcaacagaaaaaaaaccctaattttaatagaaaatccaaaaaagaaaacccaaaactagtaacgaaaatttaatagaaaaaacaaaaacctagtatagatcgatcgatgtactaacttcaaactaagtacataagatcataccacacccaataagaaactaataaaagcataattgcatcatcacatatattgatcacttagagagatgattgtttatatattgctagtagaagaagaactgaaattattagagacttcactccacgaacttgttgcagctgcggtggatgctgcagcagcgccatgaatattccagagctgttgttcgtctccaaaaagttgtctagacaagttgagctgattgttactatcttccattttcactgaagctaattgcgacgcggtggctgtaaccatagctgatgaagcagacgaagaagaggagataaggttatggaaaatgttcttaggtcgatactgacccgacccggtaaccaatccgtaacctggattctgctgctccatttgatgttgttgatcaaacgggtctaaaccgcctaaaggaagttggtttgttgccgggaatctccactggtcaaaaccgtttaaaagagccgccgctcctccactgcttccaccgcctatatgataagaaggagctgaaacggcaccgtattgtaaggtgaagttgtctgtgaagtctaaaggaggcataagcttaagaggaggcaaagatgatccaagtccaagtatgttgttgttattgctgttatgatcatgtccggggattaaccctgcgttgtaagaagacagcaacgagcttagagacgatgacgaagaaggtggtcccatctgattgttagccatggctcggtggtggtattggtcgttgctcgtggcgctgtcttgtgacttgctgttaccgctactggtgctaccgccacctccaccgctgctgtttttggttcttttgtttctacggcaaccgccaccgacgggaacgctccttagagcaccgccacgtgtccagtaacgacggcatgctttgcagaagtggcgaggttgagtgagactgtagttgttgaagtaacagaatttggtgttagttgagtcacatcttggacacttcaaggctgtttcaggtaatggtatgttggctagccttgctctttccgccatcgaacctggtcggattaacccgccaggtccaccgggaacagcgactccgccgttaccgttgttgtggtgaagctgcggaggcgtttgttgctgttgcggtgggaggggatggtgaggaagaaactgttggttgatgttatttcccgtgaatccaacggtggttgtgattggttgatgctaaagagaggaagaaatgattcaaaaacaacacaaaaagtttttagaatatgtgaaaattttgataaagaaggaaagaaagaattaattttatgagtatattcaaattcaaccacagatatacaaagattaaaagtgacaaaaggaacaagaatattattatccttttttcttgtttgtttaatctctctttatgtttttttttcttcttctttaaattggttcttgagtactcataaattataaaaccaaagaaagccaacaaaagccatttagagtaaaagaagagataatcggatcatgaacttacttgttgttgccagtttgatgaatgatcaggataagtaggaaatgaagaaaaaaccatctttgatctttcttctttgatgatatcttctctctttagttttctgtttttttttgagcaaataaaggatttaaagctgattttttttttggtgaaggcttatatgaagaagtggagaattacatcaataaaaacaaagggaagagctttagagagaggaaagaagaggagatgagagcttagcgaaagatagagagagaaggcaaaggtaaaggaagaacctttattcatttatatacatacccacacatatacacatatatatatatatatagaatatgtttgaatatcatattaattatatatatagatgaataaaataagaattgagtgtgtccacagtgttattgcgaggctctttttgttttatatattatatacatatttgcttagggttttgggaaggtggaggagagtgagtgtgtccgattgcttaacccataagtttctttctgattctctctttctggcaatactgctacttctgtactatgtgtgcaaattatacatatacacagttttagaaaataaaagaaaaaagcacttagcttgactggttgtatggtttaaactttaaagtcagtaaaaatcagaaaacattgatgtacgtcaagatatttagaaacgttttaattagcatgcaaaaaatcgaaaaataaaataaaagatgataaacgttaggattggatctaggtgacgttagtacttagtggtattcaagagaaaactgcaattgtgatatatcttagttgttctataagaaaattagggctgatatgatatctactgcttttgtggactatatcagctacaaatctaattatacagaagagaaattggttgtgcttgaattttagtacgtctatatacctcaactttaactaaacaagtaactaatagattggactaaaatgggccaacactaattactaaataatattagatgatattgatttaaaatgtattgagaatgagtagattaagttgatgaaaagaatagtatatagtatttattttgacggcaattgaaaaacagtccaacattcttccgaagtgtccccaaccaatttcgcttttctttccctcgaaccgccgcgatgtctctttttttccttttccagacaaaaaacattatttttgcatgggaattgcaaattttgaactttcctagcacacgcgccatttaagcgcgtaaattgaatctaactagcttcggtaaaccaacctaaccggagactaaatttgttagaccaatcaaacagaaggaaaatagccaatagattcaacacggttagttttggtttaaaacaatagtttctgtttccgttgaaatatcgcatcaagttcgaataaaaaggaaaattggataaacaaacatttgttggcctatgaattgattttacagtctctctcaattgaacactaaaccagatgtataattttttagtataccaattagatcattacttcttcttcttgaagaatttgggaatagaagctcggtcagcgagtatcaatggatcccgagttccagcaaaccgggcctgaggttccagaagcaatgcaagaactggatgaagaatgagcggagctatgttgagattggtgatgtgtagatgaagaagaagatactctgttctgttcttgcttctgttcttgcatcagtttcaaaatgtaagcatcatcatggaccgagaaaggtgtgctgctcacaacaaaatttacgaagatttcaattccgatttaagagatagcagaactgattttgattttgagaagaaatgttgtttatttttacctattgaagtcgaggtgtacaagttgcatatcttcagaaatctcgatttcgactactgcgtgagggtttgtctatagagatggaaatagattaggatatcgaaaaacatgaaatagaaactacggacgagaaagagatttttgaagtacctcaagtagaatgaatggtaaggtaaatccttctgctgggccttgagtcttcacaaccatctcttgatttctcgacataagactctcaagacttgagacctgatgataacaacatttgagtaacattataagcaaaacgtagaaagacggtttaacatttcattaagacaacataaaatgattcaatacacgacgtatctatggattctagaaaacctgcaatatcaataacttttgtcatctattgacatgcataacaagatctcaaattctaagagagtcttgtatttaaattttccatcaaacagaaagaagatcaccttttctctcaactctttaagaaaagcagccttcttttgcacactgctcataactttattacgatccatctgcaaatagaggtagagagattagtagagaagacgaagagagagagcaattacatagatgagataactgaaaggaaaagcttggaagctaaaccttgacttcttccacatcctttttgcaggtaataggaagtcctttccaccggatttcctttttatcccttgcaataatatccaacgccatgaacacattgagcgcatcgtagactctccgccttatgttcttctcattgtactgattgaacataagagaatgttgttatagctttttttttttccaaataactcaagacagatgatatgagctttccatctcgctatacctcattttcattcaaaggcttctctgcgttttgcttaattgtggcaaaatctgaaataatttcgtctgcaacctggaatcacaagagccacagtctcaaacgtagattttcacattttctgatacaatgcctctatataagggcaagactcctgattagaagaagaatttgagacaatgctcaacaactaacttagaggattgcttcttgaagtgaatacttgttcatataaagatcaattctaatgcgtcttaaactgaaaactcattgattacatcaccaattccttaatggaacaaagagagtaatacctccttgtaagtagttatcttcttggcttccaacttctgacaaactgtgtgaagttaaatcaaaatcagcaaaacaacaatactttcacttcaggcatgtttgagctaagagagatatatcactgacccataacactgaattgacgaagcccgcctccagaagttcttgattgccctttcttctctgatcttttaaacacaaattcaatacagacattttagctccaagtaaaaaaaccagagactttgtgagtaagaagaataattaacactgacccaatttcagaatcatcatcaacaatcaatttccttctcactggagttttctcaacgctcactgaaggatgttgcctctgcttctctggagtgacaaacaactccatctccatactcatccttctctacacaatttaccaattaacaaagttagctacacgaaatcaaatcaattagttgttcatgtctcaaatccatcgttgactaaaaccgatgaatcaatagacacaatctaaaaaaccctaaattgttgacagctccaatttcaattttttaacaaaagctaaacaaaatttatgaaatgggaatcatcaaccagttggattagatctaacgatggtgaagaaaaccctagttcagagaaataaaggctaaagctcgaatccgtttcaaaagatcaaagaacgaaccagtgatcgatcttccaatggcggaataaaaaaagatggagattttttttctagggttttggttttactctttttattacacagagatgcgaacaacaaccaaaaaaaaaaaatcggagatgaaattactttgggtgagagttcccgctataaacaaacaaacaaactgtaacaacaaacaaacacagaattctccatagcccatcaaaagcctcaacaaaaacaaaacacacgcactctctgtgttcgaacccaaccgctacggtgtcgtttttcaactttggcgggggatttaaatgggccttttgtaactctttgtaattttaagcccgttgggctaattatatgtctaaaatcgatcacgtattaaactctttgataatcgataacgttaccaaataaataatgaaaatttggctgtctctattacatatgttgacagttgtgtttgtattcgatccaattgtttaaaaaataataatattaagttcactgaatcttgaaaaaatgtttggtacgtatgcatttaagttattgaaaacattatcgctagcttataaagtttatgattttttcgtcttatatataagacatggtccgtatcatcaacttgtaactattaaaaaaaaaaactcactattctcatatactttttatttcttttctaagatgcttatagttttacacgttagtgctttaagcctgcaacgtgtgagaaggttgcgttgcactttcactagatcgaaagaatatatgcatagttgcttgatcctttttctttttcttctttatacgatgatcgtactcgtatagtactgaaaactatatgataaatttcagcataactgtttgttcaagttgttaaccgattaaaagctttaaagtttgaaaaaggatatgtttatgataattgcaaccacttggtacttgccacttgttctccatgattgttttttttctctccatatgaagattaaattaaattattttgtttgtagttttaactagttcgagttgataagaaagtttggagcatggccatgagaaccaaagctgttcctagttcctacgctgcttgattgcggagagtcattctcttactcattgcttcatcatcatttccaaccgtttagagtttcactagccatgtttctcttcttcacctctttttttgtttaacctttatgtataccttccttctcgtataccttaatcagaccggtatggactaatcaattcctcatgctattcatagctatgcactatcataagattttgaaacaatataacttcaaatttgatttgtttactttgatgtttctatgtgttgtcagaatatataaatatatgttttgtcattacaaaaaaaagaaatagtgtgatctatttaaatgtttgtttgctgtttgtatatctgtcgttgttttgggagatgagaggtggcaactcccaatatctttttggggtcatcttcaatgtcttctcagatctcaattattgagtttttaaagtcatgtttgattctttcttctcttttttttggttcactaattctactctttaattagtcttctttttttgtcaactttcgtttatatcacataaacaattatatctattgcagtaaatatattattcataatgttcaagtgtcccttgaggaactgaacatacaataaacaaaataatgttaccgtatcatatggtatgcgtatttattccagtagctttttctttcttaacatctgaaatctagtagagtaatagactatttatttaattttggaaatttaatatgttttttatatttttcctatgtttgcccaaaattgtttttacacaatcattactcgccttcataaattaaaaactgacatggtgaaatacatcaacaagctaatatgatactcataaaactgactcaaaatgcattttttttttttaaagtaaaaaatatgttgtcctcgtagttatcctcaaactctttgattcgattgttttagaatttataatacacttagatagtcaacaaagctggattagttaattaaattcgtaggccgatgtatactaaacactgatgatgacgcataatcctacttcaatggataaataactatacataaaaaatagtattaattttgttacactcactgggggcacaataatgcaattcgtcactacaattgatttaaataatattttaggattagtaatcatatcactcaactaatcaccaacaatgtctccacatagaccacaactatctagcaagattataacaacacctatcacaaacaagagttttcgctacatatacaatacatacaaaaaaatcatatacacatcggtaacgagaaatcatacatatatcatacacataaaattcaattactcacatcaaactcaagacacatcataattctattcttgatatataaaaagttgttgcttgtaacaagatagatgcgaaattcggtttattacaagatgattaaatattactttttttttttgaaaagacaaaagttaaccggtttatttcccttaattatttttggcatttgaatgatatgaagctttttattttgtttatctaattaaaaaattccgcaaaccggttttaattatcaaatttattggttgataagcacatgtaacaccacgataagcaaagcataaaatcgtaagagagaaaaagaaacattgtttaatttgtctagatggaacctataaaaataagactagttaataagagatagagagagagagtggggatcaggtggtatctagttcaggctccttctctctttttctctttcactcagccacgaacgaaccttccccttaatccaatcttcttcttacataaacacctctcctcccccaccgtttccaaaagagagaagctttctcactaacaccaaaaacaagtctttgaagaagaataaaaagattggattttgataagtttagtgaaaatgggggagcttttgtgttcttcactgtggaacccgtcacgattcattgttgcttctctcaaaaggtattttctgggtttagcttcttagaggttcttcgttcttaaaggtctgtttttttttaggttgtgatactttgaatgtaaaaaagggaagatttttagtttcgatatgtatatctctcggatgggtttgagtcggagtttcccgccgctttttgggggatttcgggaaattctagggttagggttggatattgtcttcctctagcagtctctgccacttttaaaatctcttcatctttctttgagagtgaaagaggtttttttatttgtttgtgtcttcctgggaatcgagattctggatcttaatcaatatgtgggttaattgggagatctgggatttgggagatcttgtggtggattgaagaaaaagcaaggttgtagattttgaaaaatgaaaggttcaattcttactgttttgtcaatggagaatcatcatccgtcaacgcttttatctatggattctagtggctcatctcatgaagagcttgatttggagatgaacaatggtaataggcaaatcactctttataatccaccagacattaatctgcctttgtctgtaggaagaagctctccttcttggaatttggattcttgtgataacattttggatgttggtcttagctctcatgtctatgagaccgagacgtttctcaatgtggtcccgagtaaagtagctaagaagtgtttgaaacgaggggatagtatgtggggagcttggtttttctttagcttctacttcagaccggcgttgaatgagaaatccaagtctaaggtcattagggaaagtggtggtggtggaggaggaggaggaggatgttttactgggtttgataaatctgatctcaagctcgatgtttttcttgttcagcatgatatggagaacatgtatatgtgggcttttaaggataaacctgagaatgcgcttgggaaaatgcagttgagaagctatatgaatgggcattctcgtcaaggtgagcgtccgtttccgtttagtgcggagaaagggtttgttcggtctcacagaatgcagaggaagcattacaggggactctctaatcctcagtgtcttcacgggattgagtttgtggcttcgccgagtttgtttggtgtcggtgaagaagataagaagagatggatggagctcacgggtcgagatttgaagttcactatccctcctgatgctagtgatttcggttcatggagaaatcttcccaacacagacatcgagctagagagaccagctcatgttactaaagcagcaccgaataacgccaagaagattctcaatggctccggcttacatttgacaagcaatgcgtctttcagtagcaatggggactcgtctgatcaatctccaggaggaggagtcatcaacaacaagaagagaaaagagtttctatctcctggaagcagcgaagaagaatgctgtttgactgttaacaacatcgagacccaccacgccaaggacccgcccagttgggtaaacgacttcacgggagtgatgaagaatagctgcggacctgtaactgctgcaaaaaccgtctatgaggacgaagaagcttatctggtcgtaataactctaccatttgtggatttgaacaccgtgaaggtttcatggaggaacaatatcacaaatggaatcgtgaaggtcacgggactaagcacttcgagggcttcgtttgtgaagagacgggaccggactttcaagctggttgatcagatggctgagcattgtcctccaggggaattcatgagggagatacaattgccgaatcggattccggaagaagcaaatattgaagcatactttgatgggactggaccagttttagagattgtggttccaaaattgagaggaggagtggaggaagaacacgaggttagagtttgtctacggtcacaccacctcggatgaaagatgcaaccatgttttaaagtgtttgtagaagcattttgttgtgtacaatggggaaataagcataagcaaaagcagaaagtgctgttttttaagtataactttttcactttagttttttttttgtcttcgtttctaaaaagtatattcttcagagcaagttgtatttaaccacaattttatttgattagtaaacactattttatttataaaaaggctaaattgtctacaacaaaaaatatatgtaacaaaggtttttcatatgtaaacaaagtaaaatataggttgtgatcatcaaacatgatgtagtggtttatttttgttttatctccaaaagaaagtagtcttacttttatcgttctcacttttttctagtttgatcacatttcttcgaagctttgttaaatattcaacacacttatgtgaatctgacatgtaaagaaattttcataacaaagctttctaccaagtgaccactaaagcattgttaagagaaaggggtcaccaatgaccaaacaatagagagaaagtacttagatcaaagaaaatgtagaacataaaatccaacactaaattgagagagttcaaataaaaagacaaaataactaagagaacacttagtcgacttcctcgatcttgggaccagcaccacctgatgcaggaggagcttcatcctcgtccattccagaagctccaggaccaccagcttcaccaccagctcctccttggtacatcttagcgatgatcggattgcaaacactctccaactccttcatcttgtcttcaaactcgtcagcttcacccaattggttaccatctagccattggattgcttcctcaatagagtcctcaaccttcttcttgtctgcagctggaagcttctcaccgatcttctcatcacggatggtgttcctcatgttgtaagcgtagttctcaagagcgttcttggcctcgaccttcttcttgtgctcctcatcctcagacttgtacttctccgcttcttgaaccatcttctcaatatcctctttagacaaacgacccttgtcattagtgattgtgatcttgttcttctttccagtggtcttgtcctcagcagagacgttgaggataccattggcgtcaatgtcgaagcagacagtgatttgagggacacctcgtggagcagggggaattccagaaagctcaaatttaccgaggaggttgttgtccttggtcctagccctctcaccttcaaaaacttggatcaacactccaggctggttgtccgaataagttgagaagacctgttccttcttggttggaatggttgtgtttctttgaatcaaagtggtcatgacaccaccagcagtttcaagaccaagggagagaggtgtgacatcaagcaagagaaggtcttggaccttttcgtttccttcaccgcttaggatcgcagcctgaacagctgcaccataagctacagcctcatcagggttgatagacttgcaaagctctttgccgttgaagaagtcctgaagcaattgctgaaccttagggatacgggtggatccaccaacaaggacaatctcgtgaacagtgctcttgtccatcttagcatcacggagacacttctcaacaggctccatacacttcctaaagagatccatgttcatctcttcgaatctagcacgggtgattggagaatagaagtcagctccaccatataaagagtcaatctcgatggtcgtttgagcggtggaagaaagagtcctctttgctctctcacaagctgttctcaatctcctgagggctctcggttgaccggtgatatcctgcttgttctttctcttaaactcttgaacaaaatggttaaccattctgttgtcaaaatcttccccaccaagatgagtatcaccagctgttgccttcacctcaaagataccctcttcgattgtaagaagagagacatcaaaagtaccaccaccaagatcaaagatcaaaacattcttctctccaacacttgtggccttcttgtcaagaccataagcaatggctgcagcagtgggctcgttgatgatacgcaaaacattcaaaccagcgatgacaccagcatcctttgtagcctgacgttgagagtcattgaagtaagcaggaacagtgacgacagcgttcttgaccgtagtgccaaggaaagcctcagcgatctcacgcatcttaataagaaccatggaagagatctcttcagcagcgaactgtttctcttctcccttgtattcgacgacaatcattggtttctctgcagttccggagatgatagtgaaaggccataactgtctgtcactttggacagatgcgtcactgaatctacgaccaatcaacctctttgcatctgtcacaattagcaaacaaaatagagtttagtcaaccaaacaatcccaaaacaaaacatcaacttcaactaaaattctttgttcaaactaatgaaaaatcctaaattcacaggaagagttcataatataacgcaaacaagtgattcaaaaacttctaagcaattaagatcatcctataaaccctaaaaactcttacttcaactcaaatacgaatcaacagagcataagatgagattaaccaaaccctataaattcgtactttaactcaaatacgaataaacagagcataaagatgagatttacataccgaaaacagtgttaacagggttcatggcgacttggttcttagcagcatcaccgatcaacctctcggagtcagtgaaagcaacgtacgagggagtggttctgtttccttgatcattagcgatgatctcaacacggtcgtgttgccacactccgacgcaagagtacgtcgtaccaagatcgataccgatcgcaggaccttctcctttaccagccattatcacacgaagatagaaaaagctaagaaaaagtttaagagcagcaaagagaaagaatagagctaggtttttaggtttgtgaagaaagagcgttgaagtcttgttttttataaggctgagacttgagtttccagaatgttctgtaattatttataaccgttggattatgtttgaggttgatctgacggtagctaagtgatagattccttttccaaatcctaggcaaatatgttcctggaaaaaaagaggaaaaaactgatattgtccaaattttgaaaagggaaaaagtgatattgtccaaaaactgaaaagcgcgtgttgaaaattggaaaactgctctataacgttcatatgtggggtcgatttatttattacttgacacgtaagatttcgtagtagagtaatgggccagtaagacatactaaaggctgtcattggctgtgggccgaggtgaggcttttctttttactgattgggcataggtataagcgaagctatttatttgatttgtctgttacactacaaaggctttgaggataagaaaattcacagtcctactgatttcactgttttgtatatgtttcaaatatccgtagcttcgtatatagttttgaaataaagcataaaacatcaaagtaaaaaatccagataaaatcacaaatccaaagctataaccaaagcatcaaggttgaccaaaaaaataaaataaataagcatcaacaacacattcacatagaccaactaaattgaatgcttaagattcactaggcttttgatcaacattaatttaataaaaacttccaatttatctcttcaaatctaaaccaaatttgaaacttccaattcatgaaagctttgagattttttttctactttcttttcactaataaaaacccaaagaaaaagagattgatttaatagctttttatctcttcaagtcttttggtcttgcttaaactggagttgtcaccagatctcgtcgtggagaacactacatggagagatcaattttgttttaggattttgtgggggaaaaagatttagatttttttcttttcaacaaaacaagggtaaaattgactttagtctgtgttagaaatgataaattcaacaaatgtcataataaaaaatgggtttctcgtaattgattaattaattattatcgttggttccttctctaagtaatttttatgttatgccatttgggaaatacttcccatttcaaacaacaagtcatgtttcacctacgagattggaagggaacaaacaccataaccaaaataagagagaaaatggcaaacttttaattttatccgtcatcgtagctaaactggtatagaaccaaccattgttcaaaatagtactaaccaaaaaacaccacaaaatgggcttctttaaaaaagcccaacataaaaagtcttaacagatcaaaaaaaagcaagtaaaagagatagagataggagaaagagagaggtcaatgtccaacaaattagtcgacctcctcgatcttaggtccagcaccgcctgaagcagggggagcatcatcgtccataccagaggcacctggaccaccggcttcaccaccagctccttggtacatcttggcaatgattgggttgcagatgctctccaattccttcatcttgtcttcgaactcatcagcctcagccaactggttaccctcgagccattgaatcgcctgctcaatagaatcctcgatcttcttcttgtctgcagccgggagcttctcaccaatcttctcgtcttggatggtgttcctcatgttgtaagcgtagttctcgagagcgttcttggcttcaaccttcttcttgtgctcctcgtcttcggacttgtacttctcagcctcttgaaccatcttctcaatctcatccttggagagacgacccttgtcattggtgatggtgatcttgttcttctgtccggtggtcttgtcctcagcagagacattgaggataccattggcatcaatgtcaaagcagactgtgatctgggggacaccacgaggagctggaggaattccggagagctcaaatttaccaagaaggttgttgtccttggttctggctctctctccttcgtacacctggatcaacacaccgggttggttgtctgagtaggtggagaagacttgttccttcttggttgggatggttgtgttccttgggatcaaagtggtcatgacaccaccggcagtttccaaaccaagggagagaggagtgacatcgagcaatagaagatcttgaaccttctcgtttccttcaccgctgagaatagctccctggacagcagcaccgtaggcaacagcctcatcagggttaatagacttgcaaagctctttgccgttgaagaagtcctggagcaattgctgaaccttagggatacgggtagaaccaccaacaaggacaacatcatgaacagtgctcttgtccatcttagcatcacgaagacacttctcaactggctccatacacttcctgaagagatccatgttgagctcctcaaatctagcacgggtgatggtggagtagaagtcgataccctcgtatagagagtcaatctcgatggtggtctgagcagtggaagaaagagtcctcttcgctctctcacaggaagttctcaacctcctaagagctcttgggttaccggtgatatccttcttactcttcctcttgaactcttggacaaagtggttaaccattctgttgtcaaaatcttccccaccaagatgggtgtcaccagcagttgccttcacctcaaagataccctcttcaatggtaagaagagagacatcaaaagtgccaccaccaagatcgaagataagaacattcttctctccaacgctggtagcctttttgtcaagaccgtaggcaatagcggcggctgtaggctcgttgatgattcgcataacgttcaaaccagcgatgacaccagcatcctttgtagcctgacgctgagagtcgttgaagtaagctggaacggtaacaacggcgttcttgattgtgacaccaaggtaagcctcagcaatctcacgcatcttaataagaaccatggaagaaatctcctcagctgcgaactctttctcttcacccttgtattcgacgtagatcattggcttatcggcaggtccggcttgaatcttgaatggccacaatttcatgtcactctgaacagagctgtcagagaaacgacgaccgatcaacctcttagcgtctgcaacagccaaataaaaaacggatttagtaataaatcaagcaataaagatctgaagcataatcaacaaaaatagcaataaatatctaacaaacttacaaattccaaaaaccaacagatactactagtccaagcaagaaattactaaaataagcatagttgaattaatataaacaggatctaaccgataagatctatagatgaaacactaaatccaacatatacgattgttatccagatctaactagatctaactacatcacgactacgatgaacgagatctagatttcaagtataagagagctaagaaaacgagacacgtaccgaaaacggtgttaacggggttcatggcgacctgattcttagctgcgtcaccgatcaacctctcggagtcggtgaaagcaacgtaagatggcgtggttctgtttccttgatcattagcaatgatctcaacacggtcgtgttgccatactccgacgcaagagtaagtggtaccaagatcgataccgatagctggtccttctcctttacccgacatttttatcggaagatttggaaactacaagggatctaagaacagagactgaggaaaaaactagagaacgaagaagacgaataaggcggctagggtttgtatttggtaagcaataacgaaggaaaagatttctttatatagagttttgggttgaggctagagtttccatcggacggtcaaaaattggtcgatgagagtttagatctatggcgccaggctgtttaaaatgtttcgagaatgttcgatggttgtgaggtaaaaccctaatttgtacacgttggcattattcagtattttgattggtttgtgagaggtaccattagtgcaacttgtgtggagcgtatagtctctctttccacgtgcaagttgttttaatgcattgatcttcctaaatatgcggatcataattttccttatttgaagatgttaattaagagagttcggttagttattttccctgttttatctgtttacataatctccccttttcttgacaaaaaaaaaagtttttccttcttgttgctgtaaaaaaggaaaaaaataaatatttttggttgttgttgtaaaaaatatcttatattcagaattttacattaaaatctttttaatgggagtatgattttatatgttgttgtcaaaaggaaaaaggctttttcttctatttcaaagaatatttgttaattttccaaaatcagtaattgttcagaatttttacattatccaataatccttttaatgtgagtataatttaaacttcataaagaatttggtaaaattaaaacataatctgattgaaccgcttttggttatcaatgggacgaaatgtaatgggctggtttgaaacggataaatgaaatggacggttcatataggcattgttgtggcttgatttcaaagccaatgactgttgttaggtccagtttctaaggacgaatcatccaatcactggttctttctgaacaaaacaaagagctatagagttacgttactgtagccgagacagagcctgcaatctggttatgccacatactaggttctttcttaaagttgactcactctatcctaagttctacttacaaggagctacaacaaattggtcataaccggagagcgttcaaggaggtaatatcccatcttactctgtagcaaggctacaaaaggagagctaaagaactaggctacaaaaagagagctaaagaactaactatctagcaagactacagagctatagtgtagagatttcataaccggtgagcgttcaaggatactttgaagagaagaggtaatatctcaactagcaagactacaaaaaaatggagatataaaactaactgtctaacaagactacagagctatagtagagatagatacgttcgacacttaagcatgaacattcacataaactgtctcgctggtcccagtaagttctacttacaaggagctacaacaaattggtcataaccggaaagcgttcaaggatacttttaagaggtaatatctcaactaactctctaacaagactacaaaagagagctgtagaactaactatctagcaagactacatatctatagaagagaaagacaggtgaagacattaaagcatgaccatttagcaaggagacacagaggtttaagaatgaaacagctctttgttcaaatagtctagggtggtgcattagaagattgatgcaatagacaataagtatcacaacagaggcaattcaaacaacctaaacttgagagttaccaaaggatgaatgagtatgtactcaacataatcacagaaactccagtgaaccagactgtataaagttataaacatagtaacggtatcacatatgacataacatcatggaaaaaactttggatgcagataaagctaacgcgaatcaagtaaacctgtagtaaaccatgattatatggagaaattcattttagctaactcttttttctcaaatacccgataactgtgatagaagtaacagagctacagagaagacctgaagaactgggaaatccaggtataccatattcgcccatgtatgcaatatgctctaaacagaaaacttgcatactaaaacttgaatgattgaaacactacgaaaaatgaagtcttttaactcttaatccatccaaaaccacattgtcaaaatacattgattactcatctactggcgaaacatcacgacctatagaatgctaaagacatattgattccaacacatttataagttttttttttgtagaaactaacaaagatgaaacctcattctcattcgaatttaggctctgccaccacgaaatggtatgcaatgaccattatgaagatgaaaatccccagaaaattggcaaagaagccgaggtcttggtcgtcaaacatctgtaacaccacacacaattaacaatatgagaagcttggtatcagacttagacaaaacttgttaaaaatcacccaccaatctacactttcaacatcattttctatgaagatggagcacatagtccaacacaattaggttcatacgtcaggaacaagtttctttaccaaaatcactaaaagaaaataactttgacgaaatccagacatgagtataacatcaaaaacatggaatacacaaaaataaaaataaaaaattgattgaatctcatagcagtaaataaagaaagagttgcatcatcatcacatctataagtaattgatcatatgaaatagattcaagccttaagatctacaaattcgctaccatctgagaatgacgtatccaaggtaaagaccgaaaaaaacaaatcaaatctctgagtgtttttacctttggagagctcaaaagatacagacttccttctttgattcttccctctatcgactctacgaagcagatcgaaaaagaagaagaactgaagaatgactctggttaaagaggtggttgactcaaaaacaaatcgtttggtaatatggtaaacgacgtcgttttacttctcaaaaaaggaaaaaagaaagtgtggctgctgggattcgagcccaggtctccacggccacaacgtggaattcttaccactaaactacagccactttgttgtacagtctataatattaataattatattacaatatgtttaattgctcgtcgttgtctcttcctttcttcttcactgcaattgctcgacgttgtcgcttcctttcttcttcatcatccccgacgaataagagaaccaaatggtcaagctttggatcgccgattcgttcatctgaaaccgggtctggatccgatgacccggttgcatctttgatccatgtgttccctaccatggatcctgaggttcgttagatattgtgtcgtaaagtttccatttttgactgatgaacaatgctactacagtaattgctcttttcatatactttaagttcatcaatcttccatttaaaaagtgctaagttatattgatgtagttccttcatgaaatgaactaggtaacagttttgtgtagctattgattgatatgtcttcatctacagattaacattgtgataaccaaagccaaagccctgcattgcagagaaactttgatgcaacattagcctttgttacttctgtgttgtgaaaaactgaaaattggcgacagttttgtgtagccattgattgcatagaaacttgatgcaacattagtctttgttactttgtgacttgtgttatgaaaattggtgatcttggctgttatgttttgctacaaaagtctttgggagtttattgctaatgtagtctttgttttttggtgggatcttgaattagtttgtcagagaggttatgagcaacaagaattacgtgtttgaagaggcaaaagagagtttaagctcaattttgttcaatggggattctgatagaacagaagctggcttttttgatggatctgtggaaagttggaacgatgaggatatgatcgatggagctaaatgggttgatagacttgtatccgagatgacaaaagcgataaacattgatgacatgaggcgacgtgttgcagtgatcttagaagctttagagagtatcataaagaagaacaccaacgcctcgaagaaggtataaattgatgacattgataatgctcaggttttcttgggcctagataatataacaaatagagagctcccaattcattgcagcttgaatatgcgtcgatgaaggagagtctacagagtttgatcaatgataaccaaatattgaagcgggtcattgcgaatcaacatcagcgtagctctgaaaacgaagagaaggccaaacaagtactgcatttgagaggcgtggtggggcagtaccaagaacaagttcataagctagaggtataactaacttgcctactagaaattctcggaattatcaatcttataaatcagcggattactgattttcccttcgttttcgtttgtggatatcattcatcagcttagcaactacgccatgaaactccatcttcaaaggtcacaacaacaacagacttctttctcagggaatttgcctccagacatctactaaaactatatgattgtttactacatagtcatttatagtcattaggaccttaagaagtattattagtcaactgaatttcaagtcatgcaaattttaatactaaagactttacttgtatggtttgtttgcaaattgttttagggcaattctcattaataaaacaaaaataatttctgtttacaaatttataaccgaagaaaccgcacaaggattaaaccaaacctgttatttaaaccggagaatgtagaaaaccaggaaacgagaaccaaaatacacaagctttaaaccaaactggttatctaaaccggatcaagttttccccgccaaagcaattttcattcccattgttccaaacagtttaaaccctaaacttttccccaattttgctcactaaatctcacgaatctctcctctcgagaatctcctagggttccgattatttctcaattaagatagtatccagctcgatgacggaaccaaatctcgacgaagatggttccaagtcgtctttccagaaaacggtgagtgagcttcttacttcatctcctcgtatttgattcaatcagtgttctaaatccgcctttttgttcatctgggtttttcgaataaaggtggtgctgagagattggtggttgataaaatgcccaaaggaattcgaagggaaacaatttggtgttgctggattcgaagagtccgtcgagtaagagtgctttggacttttcaggtttcttttttttttatgaaacgatttagtttttgaattcttcgaattttgccttaataggacaagagcaatgcgtgtgtttacatcttcaccaatcaccaaagctttggatgttttcacactcttagcatctgatggaatctatatcactctcagaggttttcttaacaaagaacgcgttcttaaaaatggatttaaccctgaggtaatctaaagattgcttaacttgttggaacttgatctatctaagaactaaggaagaagaactgactttgatttgttctttctcttttgttctgtggtctggtcttgggaatagatttctcgtgaattcatcttcgggtttcctccttgttgggaacgagtttgtaacagttgctttgaaggagactcttttggcactgatgttaataccgtcccttcgactatcgagaaaggttaggtcttgaagcaatgtgtttgtgtgtgtgtgtttttttctgatgcatctatgttttattgatatgtccttgttttatgatttcttagcagcttgtcctcccattttatcaccttgtaagtactctaacaggaatcttaaggataatccagctgagagcagagagaaaagcaatgtgactgagactgatattgcagagattaatgataaaggtggttctggagcaagagatataaaaactgcaaggagaaggtctcttcatctgcaaataaaaaggatacttgaatcgagtaaagtccggaagactgctaatgatggagatcatggtagtgaatttttgaatacggctaagcgcggtgatgtagaaagagatggatgtgaggttatcaataatgaagacagtgaatggaaactcgatgaaagtgaagtccagaatctttgtaatgatggagataatggtagtgaaggtttcattaaggctaagagcagtgatgtagaaaaagataagagcgaagctatcgataatgatgtgatatctccagcggttggaagtggtattaagcataccggtgcagataatgttgataaagtgacaagtgcaagtgctactggagaatcacttacttcggaacagcaaaatggtttacttgtaacaacagcatctccacattccctgcttaaagacttagccaagagtagcaaacctgaaaagaaaggaatatccaagaaaagtggcaagatcctcagaagtgacgacaatgtagtagatcccatgaattactctgggacgaaagtcaaaagtgcggaaaacaaaaggaaaatcgatgcgagtaaactccagagtccgactagtaatgttgcagaacatagtaaggaaggtttaaataatgctaagagcaatgacgtagaaaaagatgtatgtgtggctatcaataatgaagtgatatcaccagtgaagggatttggtaaaaggctttctggtacagatgttgaaagattaacaagtaagaatgctactaaagaatcactgacgtcagtacagcgaaaaggtagagtgaaggtatcgaaggcatttcaagatcccctgtcgaaaggaaaatcaaagaaaagtgagaagacccttcaaagtaacagcaatgttgtagagcctatgaatcatttcaggtctgaagctgaagaagctgaagaaaacttgtcatgggaaaaaataaagaggaaaatcgactttgatgtggaggtaaccacttccccttatgccaccacttacatggttatcctctgatattcctgtttgagtgttaatgctcttgttgttatgtaattcaaaggtaacaccggaaaaaaaagtgaagcagcagaagaccaatgcggcgtctactgattcattgggacagaaacggtcaagatcaggttaatagagagtagaaaatcttcacttccaaagggctctgttgaaagcattagttaaaaaaagaattttgtttaatgttttgcaggaagggtgcttgtgtcatcactagagttttggcgtaaccaaattcctgtttatgatatggtttgtgatttgatttccttaacactagaccaaccatgggaacagagtctttaacattgtctgggtttgcaggatcggaaccttatccaagtaaaggatggtagtgagactaactccgctccatctaaaggttagttctttaaagctgttttttgatgaaaacggctttcactatataatacaatatttgttgtttttttctttcttcttcttgataggaaaaggatcggattctcgaaagcgaagaaacttgaaaatcaaataaactatttcaaactttcgtaattaataagtaggtttattatggtctctgaccctgtaatcataattaataagtaggtttgttatggtctctgaccctgtctgtaatcattttgttggtcgtgaaactctcttaatattttagtattactagcttcctttattttttttacaaagtaaattcatagtggatctcgtttgcttcaagctcaaaagtttgaaacgacaaagtatacgtagtaagagagtagatagaattgtgttttgaattgatattttagaagagttttgagttccacggtacacacaatgcttgtttctctgaactcaactgcaaaaagctaagaagctcaccaagagaagaaaaaacaaaagctaaagctcgaaaatgtcagacccattgacattcaatctaaagatcatactaatacaaaagcatatcggcactaaaggaaggaatacatgtagacatgcaataggtttaatctcccctttctaacttgtttccattgcctctttgtggtacttgtccaattcagcatcaagatcctctgcagatacgttttcatcacgtcctcttccaccactgccacgaccaccacgtcctctagctcccctgccacctctgaaattaccaccgccaaaaccaccaccacgaggacgccccataaaaccgcctcttcctctgcctctgtggcataacaggttatccaaaatatttaataggagtacaaggttcgtgtaatctacctatcaggatatacttggcctaaccaaaaaagcatttcgtcaatatactaactcaagaacaaaacataggccatcttaacagaagaacaaaacataagtatttcatcaagatactaactgacttagcaatagattgatagaccctagcaaatgatactatgaagtttccatattgaacaaagtgtggaaacaagacaaacctgaagtttccattgaagttgccattgaaattgccattaaagttctcattaaagttgccaagtatcccattagtaggaaaaggaatctgagctgtagcaagaatgggaagagctggagcagaaagattagtcccaacaatctctatcttcatcagttttccatccaactgaacattgttgtaacgcttgacagctgccaatgcatccccacgcctcgagaaaacaacttcagcagtcccctgaaagcatcattaagtttaatcatgacaagacgattcaataaacaaatctctgaagcacaataaagcttatcaagtaagtacctttgatcttccactcctatcatagtgaatcccatatcgcttaagatcaccaacctcagagaaaagctcctacaagcaaaaccatctcaagatcagaaacaaaaccacaatttttctcataagtaagactggaactataataaacttctaaagcacaaaccttgatatcttcgttggagacaccatagtctaagtttgaaatgtaaagcttagttccagtctcgatagacgagccaccaccaacaacagcagtctgatgatgcccaaaagccgccgccacagacgcatcagtcgcgaagacgtcgttttgccacatcgcatcatgagcttgttgttgttgaatcggctgttttattcgtcaaagaagaaacgaaaacagatctcagctttttttgatttcacaaaaaccctaaaaggaattctctgattcttgaaggaagagaaggtaaagggagagatataaaatcaatgggctgacccttgaatacggcgccgttctggctcctacgcggttagcaaaccgacgagacggaccggaattagaaccggaaccaccgcgaccaccggtgttattgccacctccaatgcctcctcggccgcgagatccagtaggttttcgattagatttgatgatatcatcaagtgacatatctaagccacctgacatcttcgccggatcttttctccgatatcgagaaatgtagctagggttttgttgctctgagatttcaaagatggaattacgcaccgcgagagtgagagagagagaaacagatattatcttctcggagaattacgataaacacctcagctttaatcaatattgttttgttgcccttaaactcttacgttttactaaatagacccctgagttcttaatgggccttttggactcataaaaatccagtggcccatcctcattgtccacttcaacttattatatttttttccctccggccattgtcataatcaaagatgtggacaagtacatgtgaagcacacgcattgcctgtatgggcacagtatgtgactgtatcacaacgtacatacacattcacgtattaatattagtaagtcaacccttttttttctttgtttatctcaatttggaaaacaaatcttgccttgctatttaacaaattacttgtaccatgagtgttaaagacatctttataacctgaccagaagattttatgtagaattctagacgaattatgaaatttttaatggttaagtggacttttttattatatgatatacagatttgtattcaaatgatgacacattaattactatacaaaatatttaaatatgttgataaaaacaaaatgtggttaacaaaaaattattgatatctttgatccatggaataataaccgttgcacaatagtattttttgagctgccttttttggcagtaatataatataaggaaataaatagtcaatatcgttagacgttatagtctcacatggtcacatcacttccccatacaaatgagccaatgagccggatgtcatgtgccagtcgccgctaaaaacatgatagatagagtaaatgccttcattattctacttacataattcgactatcctaatatataggtgctagatctagcaatataatctcttctgtttcttcttttttttttttttttttttactgaagcagttacaaatgtaggttggtccattctatttagatttgtttcgttgcatgccaaacaaaataatgttaaccggttatagagtactaaacaaacaaaataatcgctaaatataagttcagctttgaaaagaatatactctcagctaccacgacaagtttgttcaactatcagttttacatcataaagcattataggttttgattgtttaaatcacgaattagtatgttgaaacaataataacaataataaatatggcattaatctcgatagtggtgtgtgtgtgtacctttgtgtaaatctaccacctaacaatgtcattatgaggctctctcagcaatcaattttgcaaggcaaaaaaaagaaagatccaaatctcgtagttggattctctgaacttggaaacgggatgtgaaaggaacatcgatatctatgagcacgggctatgaattaattttatacattctgtattgtttctttatccaaataagtatatatctttctttatctgccggtcaaaaactctgtaaacgaccgatgaagtattcttgagtagagttttaatgattttctttagtataagatttatgctcttcagttgtttaaaatttgtacgagaccttgtttagttatgttaggttttcttctttattttctatcaagaacatccaatgcaggtttgaatatggatgacaaagtcaagtattttcgtctctacatgaaagaaacaaacccacaccactttgattttgttggtttagactatagtcatcggtttagttgcataataacctccctaagttttggggaaaaaatgaaactaattagatggttaattaaatgaaactcgcccctaaattaggagggatttgggtaagtggtaacacattcactggaaacatgtgaagaaaggaggatgtcaagtagctgaaaactcagtatagtaaccaacggcttctcaccaacctttcattaataatttggtcatccctatatttttattcaacattttgtttttcaatagcttagagcaccttaatacctttcagtgtttttttataaaaaaaaacaaaaattgggattaatcatcaatccccaaatgtaacgtttacttagattatgttcatttttctatacacacaaatcatattcttttgttttaatcttcgaaaaacgagaggacattaaatacccctaaaaaaggaggggacattactaccaacgtacattaacatgtttgatagcaaacgatttattttgttcgttttgaaaaggggaaagtaatgtgtaaattatgtaaagattaataaacttttatggtatagtaacattttcgaataataagagagggaaaacactcgccattgtcggcaatttagaaccaatattagaagggtttttttagagaaaaaggacttaaaagtttagagaccttaacaacaacttatttagaaatagacatgcttaagttgacaacagcgagtttattttctatatcgaagaaaaatacgaactttttcttaattagatttcgaatgcatgcactatcgagaatcgaccgtcacaagaaaaaactaatatacatactgtacatatctatattcaatattggtggggatgggtttaatgtgtatttataattcatggataaattcacacaataaggtccatgaaactagaaggtaccaaaaataagcattaatgactctttgccacttatatatatgattctctcatagtaccattttattctcccaaacctatcttcttcttcctctcttgtctctctcgctctctctcttctacattgtttcttgaggtcaatctattaaaaatgggattatattcactaatcacaggaagaagaggaccaagtggatttggttcagcttcaacagctgaagaggttactcaagggattgatgcaactaatctcactgcaattatcacaggttcacatatgcatatgcatacatttacaaaaaaattacatcgctacgtttttgaacatgttttaattatttattgctaacaaaacttggtatgtgatttattattattgtaataaggagggacaggaggaatagggatggagacagcgagagtgctgtcgaagagaggtgctcatgtggtgatcggtgcccgaaacatgggagctgcagaaaacgccaaaacagagattctcagacaaaacgcaaacgcacgtgtcactcttcttcaattagatctctcttccatcaaatccatcaaagcctttgttcgtgaatttcatgccctccatcttcctctcaatctcctcatgtacacattctctctttctctcattcagtttaaagcgtttgcaccgccttttttagcgtttggattattgattcttatgacaattacaggctttgaatggtttccacattaacaacgttaattaacactgttttggttaccattcctctgttattgtgtagtactactatttacgttagttaggtaataaacaacgacacccaataattatttatgcagctttttcttttttgatgtttaatgctgtgacaatgacattattttttcgctctaaacatttgacttctttcttcttgttttgacaacatcaatgttactttacattttccaatgtggtatcatttattactaccaaatctctacacacgtatcactagatttgtagatgtgtgtagcaagaaaaataaatgttatctgtttttattttatttttttgggtgaaaaaaaaaagtgcatacttttaattaataattataacaattgtacacaaaatggattttgcagaaacaatgcaggagtaatgttctgtccataccaactctctgaagatggaatcgaattgcagtttgctacaaatcacattggtaaatcctatatttataaaaaagttaaagaaacttggtttcagaaattaaacctgaaaatattgaaatttttaattcttgaattatactgtataggtcactttctgttgacaaacttgctcttggacacaatgaagaacacagctaaaaccagtggtgttgaaggaagaattttgaatgtatcatctgtagctcatatctatacttaccaagaaggaatccaattcgacagcatcaatgacatttgcaggtaaattctacagtttttgacttgtttcaaaactaaataaatcttgatcttgtaaccatgttttttctttctctcagttactcggataagcgagcttacggacaatcgaaactagccaatatattgcatgctaatgagctctcccgtcagcttcaggtcgccttcacacacactgacaaacacaaacacatatatgatatttcaaagtgttagtactatctcaaatttataaacacttgagaaaataaaaactcaaaatctttttggggacattgtttggtaggaagaaggagtaaacataacagcaaattcagttcaccctggtcttattctcaccaatctcttccaacacactgctcttttaatgagtaagatttcacatcattttcttagtttctctgtttctcttcaaatcattccttttaattccgtttttggcagggttcctgaagttcttcagcttctacttgtggaaaaatatacctcaggtactatactagtagatagaatcctaagactaagccaaattcaagatcttactctatgactatgttactaaataaagacaaatctaagaacaatattttgatgcttcttgtgatgttgtcagggagcagcaacaacatgttatgttgctctgcatccaagtgtgaagggagtaacaggaaagtactttgctgattgcaacgaagtcactccaagcaaacttgctagagatgagactttggcacagaaactctgggatttcagtgttaagctcattaactcggtttctaaaaagaactacctcggtttcgatgacaccacttgaatctctacggtgttcttgttgaatgttacctaaagagtgaaaaaaaagtaagaacaagtagagattgtgatgtttctttccacattatcgtatggtaactcatgagatgcattgttgtatgcttaaatattttatcgagtgaatatgtaaccgcgtcaatcttttcatagtatggacaataaaaagaagggttgttcatcacttgattattccttggatgatcagtgtctctaacctaagagctacaaacaagaaccgacaagagtaaagttggttgtgtgtgttttaagtaattaagatcggaaatgtttggtaatagattgtgtcatagttgaagaatagatgacttgagagtctagttctccatcaccaatgtctcatatagcctccatgggagatcaagaaacagagttgtaagtcttttgacgaataagcaaatagagatcgagagatagttagaaatatcaagaatataccaagtagttaagcattcaccatcttagtaacattcaaaagccagtacaaggaagaagatctggtgaaatcagatattcagatgggttaatacggtttattgtgcgaccgtgcagtttgaatttcggtttgttacggtttatagttaaaccaactccaacgataggaaccaaaatattctggtcaagaatttcatctttatttttcttttaagaagagaaaaataacaaaaaacaggaaatttaacgacaaactatacaaccgtataacggtattatgttgggccgggcccattacaacgtgattcaccacgtggtcacacgtttccaatttccatacctttttttcctttttttttttaaagatgttctacatcgtaaaacatctttactggagattgaaaatttggctgagttgcaacaatataatcaatttctgtcaattgatattgtagttaagttatcatataaaaatatacatataccagttacaatcaaattggtacgttcttttgttaatgcaaaaaaaaaaaaaaaaaacttgatataggtttgtactttttagtattgctgtgtgaggtaatccataattaaatccaacagattgcatgttattgacaaaaatccatgctaattaaacaaaattacctaatttttaatgactttgtggctttggtaactggtctttcactttttcttttgtcctttggctttacctttgttgactcatcttggccaaaaaatagatgtttaattgtttattatgattttgccaaaaaaaaaattgtttattatgatttcagttactttttcagtcaagtgtaataataattatacattttgtggataaaaagaaacagactcatcggagacagacaaaacgtcagatcgatggcaacaatatttatgtaaggagaaaaaaacgttgtatatatatattttacaaatttattactttttcacaattttatttgtataatttgtctttgggaacaccagcggaatcttgtccgttgcattagccaattttctgccactaaaattggatccactttaatcattttataaatactttttccgtctaataaatttccgtccaatgagaatataaatatacaagaaagaaacattttgatcacaacaaaaaaaaagcaagcaacattatatatttattcagacgaaagattttcgattttcaactttatatttttcagcaaaatgattaaacttttagcgaccaaaaccactggccacatgaagtcaaccattttagttcaatgtcatcttttcaatcttataatttcgttatatatacacatataatggtgtagtcaatgataattttataggatgagactgtgaactaaactatcctcaaaatttagttcacagtttctataaaacaaaagagagttgtctactaattatattgatatattttgtatttaaattcatcgaacaatgaactaaactgaagtcaaattttctggttagtgtttacaaggccatgaagaaataggaaacaaaaaaaatgtaaagatattctacgcatttgggcattctatttaacattttaatattatctttcaggaaaatttaaaacatttgactaaatcttattgatgtttgcgtctatttacaattttaatattattgttttagtacttcaaagccttttccatctttcaatatagaagacccacggatctcgcggtcaacggcaaccataaggtccatccgtaacacattaagattctatgaaataaatcgatacttgtattttcttaacagttacatgaaaaatgaattctaacaacgatttttgtttagtataattttgtcataatcaaacatttgtctaagtttaattcagattttgttattcatcattcaataccaccataaacccgaaatacgaaactacgattgattcatgggattatcatacaatagtaaagaaagacaaaatctgattattaagagaaaagaaaggcttatgcgataattaaaaggctgaaacttatattaaaaccaaagacaaaaaaaagcgatattaattagaagaggcgttcccatggtgatctttgctaacattgtcgtcattgttgctacggttagccggaggagctgcaggagacggcggagggatctggtgacgtggcgggttagtaggaacggtggaaggaggatttgctgcgagagagatatcggagagatcgtcaagggagatcggaaaaacgctctgagaaggtcttctctggtgacggcttggtctctccgacatggttagctacagattcagacaacaaggattgggaagagagaaaagagagataagaagagagagattgttgtgtgtgagagtgatgagatcgggagatagagagagactgtttatataaagaaggtgaaaaagaaaaatgtgttaggtagacagtgattatccgaattgagagcatgtatattgtaattttgtaaattctagtatattacaagaataaaaaagttaattttaataacaaaaacatgaaagaaaagtaagaaaaacaaatgaaacatgagtttggatgtcaaataattctctctttttttttttttaaagttgtcttataattcactatttttaaaaaattagcatagactaaatcatttagtaaaataaagttatttagtacaaaagattttaggcaatgtggatttcgtgttagtttatcaatcaaatgctctttaagaaaaactgtattaccatctattttgtactgtttttctttatataccattacatcttcaattatcatgtcatctataactatgttttaatatatatgaactacgaagaacataattcttcttatcatattttttttttaaaatgtgtgaaaagtattgttttctgtagaagctggttctaagtagcaagactaacatctctatgcatggtcaaatggttcagtaaatgttctgtgcatggtcaaatggttcagatacaaaattatgaattgtacctttttaacaagtaaatttaccccacagttccttaaaagtttatcttttgttaggtaagtaattaagattgaccaaaattttgtattttaagtatgatttgttttaggtcaataagttactacaatgtatccatcagatacatgagtccatgtggtgagggagatacagaatttaataatcaccattaactgtatttgaatagtctttactttctgcaaagtcataatgttgaaaaagttaattgcaattaaatgtaaatcttctccaataaccatcatagttcattgcatttagtggaaacaaaattgttcattgcatttgatgagaatatagataattggtctgacagatcttatatatattgataatatgaacaaacttccgataagctttgtcaacataaataaattaagaacccaaattattgtaatttgttttagtttttttttgtctagaagacaaacatttctcccccatgtgaggagatgtcagtctcgttggaatttaatgttgttatacgttccatagagccatacgacacgaatacaaacatgtattcaattttctgtgtctgatttttcttgttgataagatagatttaaatgtgacacacagatggtgatttcatatgggattgctgattaaaaaactcaagtaattttacaaaagtactagtgctagtgctagatattatatctagctagtaacttcgatagatcatcagtgtccagtgacactgatttagtgtccaatagaaagcatccaagtttttgccaaaaaaaaagaaagaaagcatccaagcaatacatataagtttcatttgcattatattcaacagtaccattttcatatcttgtttcaaaaaatacatcaaattattttccaaaccttcacatataatttgagaagaaatattacaaatttaatataggttcagcataatttagaaaatattattcaatgtttaaaacttctcctaaattttggagtattgctattaatccttttaatgtgaacaaaacattgaagcgaaggttgccagatcagcaaatcatagccgttgattcacttccaatccaaaagctaacattcatcaactgacaaaaccaaccaaccaaccaacttctttcgctatcttacgccaaagctctcttaattcctccgtttgcatattttccggtcagatcaaaatcagaatcagaatcaaatttctcgtcgtgtcggagtaaatcaagccatggattccggaaccaaagtgaagaaaggagccgctggaagaagaagtggtggaggtcctaagaagaaaccggtttcccgttcggttaaatccggtctacagtttcctgtcggtaggatcggtcggtatcttaagaaaggtcgttattcgaagcgtgtcggaaccggagctccggtctatctcgccgccgtcctcgagtatcttgctgctgaggtaataaagttctgaattcagatcagctaatcatttcatcggaattatcgcagtttcatcgatttcactagaattcttgtgggttttgttctgttgcttcgttgaccatctataggtgtagaatgtcttcttctgattttagggtaaattgataatcatctgaggttgtaaaattgaatttgttagatactatatcacgagtagatcaacctcaagacatggtttcactttcaattaggtttaacatctttgctttgcaaatctcaaaatcttagatagagatatattagcgttacataaaaactaaagttgcatagtcaataaaacctaaataaaacatctgcaagtaaacttcattgagaatctatcatcatgtaacaccgttttgagaatctgaataccttggactgatgtgcatgttacatgtaactcttgtcaacaaatctctgagtaactaggatatgcaaatattgcatactaatctttttgatcgaatgtgacaaaaccccattttaaagtttacaagtctgatccgttatatatatgttgtcgatttaggttctcgagcttgctggtaacgctgcaagagataacaaaaagaaccgtattataccacgccatgttctattagcggtgaggaacgacgaggagctagggacactactcaaaggcgtaaccattgcacacggcggtgttttaccaaacataaacccaatactcctcccaaagaagtctgagaaagcagcttcaactacaaaaacacccaaatcaccatcaaaggcaaccaaatcccctaagaaatcttagtacttctttcttcattcctctgtataacctactgtttctatctctctgtacgtttctctgtaaagacagaacagaatatctctttgttgttgtgagaaagcttagtttctctgatcgtcgttgtgaaataaaaaatgcaacgtttcatatagattttgcacaatcaaaaagtattcatataaacaatgtattattattcgactatcatcatatgagatcgaagatttgatcaaaagacagaacaatgatctataattccgatggaaaaacaaaactgatgtaatcttaagagcttgtgaatttggtgacagctttggttccttcagagacggcatgcttagccaattcaccaggcagaacaagtctcacggcggtttggatttcacgagacgtgatcgtcggtttcttattgtaacgagcgagacgagacgattcctgagcgagtttctcgaaaatgtcgttgatgaaactgttcatgattcccatcgctttaccagagattccaatatctggatgaacctgtttcaataccttgaaaatgtagatcttgtacgtctctgtgctcttcttcgtcttcttcttcttcttgacaatctcgctcgttcctccttctttcgcgatcttcttctccgcctttggtgctggtgctttctccgccggtttcttctctgccttcggcgccattaatccacgatacagcgattgtgatgaatacttctgggcaatgaaagatgatttttgagggtttcggttttgaatttatacgtttcgtgtaatgatgtataattggatcctgaaatatgacatagatcgatgacgtgtcgttagatgaggaattgttgtcagactaatcaacggttaacgctaaagtcggcggttaatgtgggctttaatgggccttgactaatatatttacataaaataggtgaaaatattttaggcccgttgagaaagtcgccacgtgaatttggagtgttttcttcggaatttaattgattttggtgtttggaacattttaaactaaatacaattattttcttaattaattattcttggtatttaacgctttacgaaattccagtagtcttttccttttttttttttagataaaagttttattttgtcgttttccttttttacaaataactttctaccgtttaattaaccttttgaatatatattatcattatgtttaacataataacaagagtttaccaatcaattcctatgatcacttagcaaataaacttcgatgagtttttcttaggtatatatatgcatgaacaacaatgtaaaaaaaataaaatagaggaccagtaattcagtaccatatagttaatcaaatattttaaaagttaactttattcacatgcaaaagatacgttgaaagtggtaccagctgatggataagttttgtaagaagtataatgtatatttgacattatggtataagtgattttatgaacttttgatgatgtaaactttgtaccagctaatgtgtttccaagaaacacttctttcgacacatacagttaccaaacttggtggtccctaaaaatgttcgagaatccaaccaaagccttcccaaggatgtggggaaactcttaagtacatcgaactcattcctgccttacaaagtatatcaaaatgttaaatgttgttgaactcatattggctggttttggtttacttattctgattggtgatgtactaatgcaaagaaatagtaggatatatattgatagaatggaatggaacaacaggtttgagaaagaaatcatttgtagatatgggggctgaattccatttcatatacagtattaatgattcgattcacgctaggtcgctagctacatgcatggataaactattcgagcataattgttttacgacagtttttctgtctaaacgtcatttgacatatatatttttctccattaactgtttagtgctataaataagcggccatgatatatttttttccatcttcaacgcgattttcttatggcagtattccaattttaaatactgatttgttttgttttccatggataatgatttatttattttgtaggtcatggataatgattctatatgctatactaattacatttagagacaacaatatacattcaaatgtatatgaatagcctaatactgaaattatttgattcatatattcaaacggaaaaggttaaaaaaaaactctgaaggcctgaattggttagtggttacattacccgtccatatgcctggaaatattcgagatacccacacttactcgctcactcatgtgcataattgctctatctcccatgcatctgtgtgtcctcacttgttgtttacgggtggcttttgatataataatattagtataatctcgactaatattgttataactcgatatcattgatggtaatacattatctagccaaacaagttgtttaattgctcttgtaaataaactctcacaaaattttatttgttttgacattgtcactggctatttttggcgggatcactcgtttatttatattaaaaaacgaatgaaaaacattcacatattttgtaaattaagattattattaaagcatatacaggtcaattcttggtaggtggaagtaggtggcattactgaaaggaaaatacaagtaaaattatactactatctaacaattaataactgcattagtaaaaaatgctaaacgatgatgattattgatgatgacccatatgggtcattattacattactatacagattttaactacgtagtgtgggtcctacttcacgtgataaacgacccaaccgccacgtaagcaattgaaggatgcgttcccgtttcgtaaaatctattgcaatctcctctcagccaatcataagcatatgcccacgtgggataatgggccctatcacgagcccattgtacaagtcagcaactgatactagcagtagcacgccgtttagattaaagataacatattttaattattaaagtatttataaatttatcatattgatttaattattttttctcaaaaaaatatacacttttacattatttttttctctctttttggacaaaattaatgctctttttcttattctacttacttctaaatatcatttctcatggtattagcacaattaggcgattcctttgaatacagaaacacgtcaattttaacaaaaagcaaaaagtagcattcgtaaattgattcgattatttgaattattctgtaatcaactacacaaataaaacaaaccctgtccattttaggtcattccgtgactatagcatctatcatccttcaaagaaaaatatcatttccttgtgtttttcttttagatatttttttacttataaatattttaatacccctcttcctatttttcgggtcttgtagcgttttatatatattttcacctgcctttcttctcccatccatcatcatatctctctctaatttctctccgtataacacaaactactctttaataagtatttatgggtgatcataatagctcgcaagcttcttacatccatttggtacgactttatcaaactctttttttttttttccgtttcttgtcaaatcaatctctgatcttgatcgatattttatcacttaaccgatgctgatcatatcataatcatgtgtatatattggttgcaggtgcatcatttgatagaagaatgtatagtattcaacatgggcaaagaagagtgtatggatgctctgttcaagcatgctaatattaagcctatcatcacttccacaggtacacatattatagatagatatatggtagtatggtacaatagtaatttatgaaagataagggttggagaattgattaaatttgcagtgtggaaagagctagcgaaagagaacaaagagttcttcgaggcatacgagagaagacgagaagaaataccgaccgagaaagagacagctcgaagaatccgtgatttgctttcacgaactacaatctaagatcatgacacctacttttacttacatatacatacactcatctatattaccataggcatgtgtgtgtatatgtatgatccgacgattctatatatactctttagacaatttgtattataatcttcattaggaaatgaataattcacctttggggaaatctctttttcagcttagtttaaaatcgttatgatttatttgctctttttcacgttatgatttatttgcgtattacttttctttacgttatgatttatttgtaagttaccaattggatcttaaccattttcaatgtctaaacaatgttattggagcataatatacctgtctttgtgttcatggttttatgtattcataattgagtaaatatttcagttgtctctttaattttgctctttgtactgaaaactaaaatgtagccaagaataactaatatagtttttcttttaggtcaatcaagcatctgtatctatctccatttatgaataactttagtattcaaattaaaataatgatcaaaactaaaacaaaattaagtttaaatatggctctctgtacacatattgagtagttattcatatacttaaaccctttagaatttaaatacataaattgttatcatatgaatataatccatcaacaattaattgtcattgaatatgacgattaccagtttaccaccatcattaagattagcggtagatcatttttactttaattagtatgagtcgtgttttaaaaaaatccaatgctggaaaacaaaagcgtaggacagagatcgaatggtgaagatgccacgtggaaggcacgtggaagcacgtggaaatgttggcgtcactacataggattgcgtgttacgatttggtgatgaccgctaaactgtggtggctatttttgttttcttatctttttcgatttttttggtcagtgttggagccaaagtttggtctgtttggtgaagacactcttcttctttagtaccgcattttcagttcttgattggaccgaccttaatggtccacttgtttttaggatatgtatagtggttttttaataattaggtagaagtgatcatgtactttttataagtattaaaaaaccatttactagaatgcatgattaagagttaaattcttataatcaaacatttatttgggtttcatatagataaaaaattataactaaaagtgaatcaacaaccactttgtaaatctctagttcaatttgttgatctcggacaactgcttgcaagacacctttggaataaaggatgccaaaaagatttcatttaaaccgctttgccaaattttaaggacaaacaagtacttatatgtgaaagccaatcaatcttgtttcttcaaaatatatagattggaatttggtggcttcttttatttcccaacgttgcaaaacgaacaaaaaagtaagaaaagagaagaaaaggaatgataaatgtcaacaacacgaatgaaaaaagagcaaacaagaaaacgaaatgtataaaacgacaatgtactttggaaataccaatgaaaacgtaatgtcatgcatgtagttccaagctctttggcattccgtttcaattctattattattttttgtttgttatacgaagaaaaaagagtttcgacggtccagtttatttgcgtaaccttcacatatacttctttgaacgttaacatctcaatttggtcaatcagactgtattcattagtgtagagggaatcaaaattttatagccacaagttcacgagtataagacgaagaagagtttcaatgaacaaatcaacaaatgatggaagggcttttgtattttagtttaatcaataatgacttttcttttgtatttgataaatgctgatatctaaaaagaaattgcattgtataaccaagaaaaaactatataattcatcaactaaaattttgtagccacaacgaagatgcgtttcaataaacaaatcaacaaatgatgggagaggttttggtcctgaatggatgctgattttctattcagtttttggatttagattttaatttttatattttatattttagtttaaatttttgataaatgctgatatcttaagagaaattgcgttgtataaccaacaaaaactataattcattaactaactatactaacctaaaattttgtagccacaagtttagagtataagactaagatgagtttcaatgaacaaaaatcaacagatgatgggagaagttttgtattttagttttatcactaaggacttttcttttgtatttgagaaatgcttatacagtatcttaaatcataaggaggaataactttttatacgtcacgacaattattattattagagtcgaaattaaaaagtatatgcagtttttttttaagatggattttgacatcataatgttttctttaaaagtttgacttgtatttaacattttataaacttaaaacagtcataattaaactcaataatctttaaaactattttatttaagtgtgtaacaaattatacaaagagcccagcccattaagcttacaaaacaacctctaagcccaataaataatacgacgacgtttaattctgtaaaaataaaattttcctcttcttcttcccttcttctatctatctcaatctcatcgccggcgttagggttgtttttctcaacaatggtgtctctggccaagtttcactactgtgatcaaacactccacctccgactcgacactcaccgtaaaccgcagcctaaacctgtttcataccgaatcttacataaacctcctccttctcgcgtcatcagagcttcttcgttttcatcaaaccctaaaccctctttcctcaaaaccacctgcgtgaccttaacaacagccgccgctttactctccgcttccctccacctctccaccaaacccgtcaccgcagcaactctcgtctcacctcctcctccaccatccacggcggcggatctcacttccgatcaaatctcgtcgcgtccaaaggaagaagaagaagaagcagcgctggagaagcacctcactaagaatccaaacgacgtcgaagctcttcaatcactgatgaaaatcaaattccaaaccaaaaacatcgaccacgccttagagattctaaaccgtttgatcgaaatccaacccgaagaacaagaatggcggatcctaaaagctcaggtacaaacctacggcggcgatttcgattcagcgacgaaaggattcgaagaggttctatctaaagatccatttcgtgtagaagcttatcacggattagtaatggcttactccgaatccgaatcgaaattatcagagatcgagagtagaatcaacgaagcgattgagaaatgcaagaaggagaacaagaaagattttagagatttcatgttgttgattgctcagattagggttatcaaaggtaatccaattgaagcacttagggtttatcaagagttggtgaaagatgagcctaaagactttagaccatatctatgtcaaggtttgatttatacattgatgaagaagaaagatgaagcagagaagcaatttgcagagtttagaagattggttcctgagaatcatccttacaaagagtatttagatgctaatgtactcaatactaacaagcttttcgctaagaatcagtgaaaatttgtgtttttgtttgaatatgcttagaaatgtgactttgaacttttatttgtgatcactgcgaaattattctactaccattttacaagctttgcatcagattcacataccaaattttacaacatgtagaattgaattataaataagcgatccttactacagcaagtttaacgagtatcatacggatctaggcggagatggaggagtttcttttcggcttggtcccgatggcgggattggaacgttttttggtaacattctgaaaatcaggcgttgtgatggtgaccatggttttaagccgaagatggttggtttatgtggatcttgtggtggtgaatcagccagtcctctagcccatggtctagaccagagcaaacggctggtctcatcttgagtggttccaatgacacaagcgaagaggaggccaaaagaaattaccacaagaacataagttgatttcgccatcacaatattactttgttgtacacactgacacaagttgatatggtttggaaggtttatataaacttttggatgtctttatcttgtcaataaatatttttctttttagtagtaaacaaaattattttgtaaattgattcatatttttcttcttcataaaagctatgttgactaaaaatgatccaattccaacaaaacgttccaatccaatccgtaggaaccaagcagaagaaacacgtttcaattaggccataaaagctattcacattttaaccacaatgcaggggaattttttttctttcattgttgttgtaagtaatatattggtttatccatttgaatactttttttagatatggatataaatttgtcctgtcatcaaagaaaaaagaaatgcaagatacaataattaacaaacctttgattttgtttttcccttttttgaggataaataaataaaatttagtctttggtgtaaatctatatggattgaataacattaaattttcggtgtaaaggtaagtctttttttttttttggtcatctgtaaaggtaagtctatatggattgaataacaatatttgttttggtgtaaatccatatgcattgaataacaatagtttttttacttttttctccttttaaaaggcttatttttggattaaaaaaaaaacatatttggtgtggtgtaaataaaagaaagaataacaatattcaaaatcatagattaaaaaatatgtttttataaaaatttctaaatcacaaatagagcaagacactatttatgacattattttcaatattagtgatcaaataacttatcagtagtttttttgcaagaccttcctcttgatattactaatgtttgggtttggctttcaagttgtgaagtgattgctcattgctccacggtcttaacaagctaatactactaatcaatttttatttttccaatacttgaataaatagtagagatttagtatcacaaaaacaaattatgaagtgtgttcatataaaacatttctgaataccaatctttaatcataaccgagacaaataaacgcacaaaagaaagtaacatcttcacaagttttgtcttccaaagtaaagataagagcatagaagaaaacagagggaaaaagaaagagaattacttctgaataatctcaggccaaaactgagcgtttttaactttggaaatactcgccaacacagttaacggtgtcacgtctcccgtcacggtaaccttctttgctgcgaagtctatgttatacgacgtcactcctgcgttcaacaatcatcaaaggaccaaaaacagagtatttttacaaatcaagtatatattttcatgaatagaagaaatactttacttgttagttacctttcaatttcgatagatgtttcttaactttccctgcacagcctttgcaatgaagtgacactctcaaaacaaccacctttaagcaacgaaagaaagattgtcaagtttaatctcaaaacattaactcatgattaaatattatggttttgttcgattacttacttgatcggaagatgagtttttctccggtggtgatggcggcgacgactgaggaggagaaggaggtgggggaggaggaggagagaatttgaaatccggggacgaaacatctttatcttcaagagagctcagagaagctgtaggagaagcttttgtgggttcagagaaaggattatcgggagatagaaccggttcataatccaagaacccctcgaagaaatcgggttgcttcttctccaagaaagaagcagaagttgatagatactttgaggcgtttattatgagtcgatcttcatgaaaattatttaaatcatcagctttggttatctccggttcatcaataggtattggaatcgggtcggaatccacaaacccgtcaaagaaaaccgggttactcaataagtaccttgaagaaccctgaggtgtgtcactgctaaaacaactaaccggtgacttaccaacatcactgtcacctttcttgctcttcctcttcgctaaccgtttttgttcactactctcgagacctagtctagtcataagaggagtatgataagtagaagaagacgaagaagagggattaaggtttggggaaggtggaggagtgagtctccgaccgtcacgtatgattgggttatgacggtcaatggctcgaccaccgagccggatcgtggctgaagaagaagaagaaggttgtgaggtttgatccatggttgagcaaagggttgttgttgatgcttgagaagcacacaacatgttttgtatggtttacaagaaatttaagaaaaagtctttagtgtttgcaatgaaaatgtggagagatttctatagtcacatataaaatcaattaaaaatgtacatatttttaggttcgagttaaagatatttttttgggtgatggaatcgactttagaaaaaagtaagtttattcgtattcttatcaaaccaatgtgtgagagattgattgctagtagacctagaaaccgtgtgaaattattttgattcgattgaactgacgatttttggaccatctactacaaataaatacagtgtagtttactctcttttagatagaagaagaagaaaaaaaaaatcattttgttagaaaatcatatttttttaaaacaccaaaaagaaaatagaaaggccaattctttttgccaacccttaatgatagttccgaatctcattctcacaaacaaaaaataatcagaatctgatgcttatgggttttattgacgaatttattcgtattagctttcactattcacaccttttctcttttcggcatacgacgacccaattaaatgttctttaataaaaagcccatgttttgtggaaataactattgggctattacacggcccattatatttgccaagagaatcacgagggttttctaactcaaatcgatttcacaaaggcatcgtataaattttcttcttcaacaaaattagggtttggagccagaaaagagcaaataggcggcacatcagttctcaacactcacgatgggtatgacgaagaacagatccttataatccttaatctaattcgtgttcgtttcttttgattcttcaattgcgtgattctgattggatttgtttttgttttggtttgattttgttgtatagcgagaattaaggttcatgagcttagagataaatcaaagaccgatcttcagaatcagttgaaggaattcaaggctgaactcgctctcctccgtgtcgctaaagtcaccggaggcgctcccaacaagctctccaaaatgtatgtcttttatatatctacttatacgtatatatgaaatgtgtgtatatatatcctcatttgttaggatttagtgttactttccaatttggagacatttcacttagatttagagtaattgaagaatttggagtaagagaacatatggtgctctgttttggaatttgcatttgtatcatcatttgggatatcatcagtagaatggatgtggatttagcttatgactcgaatatgtatcttagatcaatcaaatttgggccttgtatgtagttgatgaacaccttattttggtttagtcggattcggtttgacaagtcattgattgaaagttgtgtgttattgatatccagcaaggttgtgaggaaatccattgctcaggtgttgacagtgatctcccagaagcagaaatctgctttaagagaggcatacaagaacaagaagctcttgcctcttgatctccgtcccaagaaaacacgagctatccgtagacgtctcaccaagcatcaggtctttacccgaattaccatttccaattatataatgttcttttgaattggatagcaaattagcaatcataataacttatggtgtttgtggtaacaggcttcgttgaagacagagcgtgagaagaagaaggagatgtatttcccagtgaggaagtacgctatcaaagtgtagtttcattctcccagctctagcttctagaaatgaatgattcagcctttgattatcggcttatgttatctcctctctttttgtccaaccttattaattttagttgtactgaagttttgttatcacacaacctctctaaaatcattagtatttcataaatattgaatttattctgggttttgttgtctctttggtaaattttgatttttcggttgtttagagttaagggacgattgaatgaaggattgtaaacgaacatggttgatttatacggagaatttctgatacgtatcggccaaaatagataaaatcaggaaaaagaaaagaacaagtacttaaagtcttaaacgaccacagtgggagtcgaacccacgaccttttgatccgaagtcaaacgcgctaatccactgcgctatgcggtcaagacgaatatgcaagtctcaaacactatttgttgattcatatttggatttcgagacttggagcttgtgaatgtgaaatctattttcactttggaccagtgttattttcatggttggttggtatcataaattcataatcgtcggatattttaccacgttcacacagaaaaccccaataatggagactcatttattattttcttcatatgtcactttctatcgccaattgttttttggttttctttgaaaaaatgtctaaatgactaaatccatcgcaaatttcattttagtgaattagtggcacggagaacatttaaagttgattctgttggttttgataaacattttattcaaatatactcatgatttgtttgttgacctaaatctgattgttttttgttttcaaatagaaaaacaaacaaaaataatgcttcgagtggacactaaggtttgatcatgtgttgtttgttgtattaagatagttttaagatatgtctatgtgatataacacaagcagccaaaaccacgagcatagttaagaggtaataatatattttgttgtttcttgtccagagaattcatgttactcttgtctgaatcttcctcaaatctactcatgtagacctccctatctcgatctaaatttccgccaaactttttttaatcccaaagattctttaaacagaatcatcatcaatcatgaaagagatcaagaagacgatgacgaagcagatgacggcaagacgtgacgacacgccgttacacacggcggttagagaaggcaaaacggaccttcttttggagatgatcggagaacacgacggcgtggagctgaaagagttgttggccgagcaaaaccagtccggtgaaacggctttgtacgttgcggctgagtacggttacaccgacatggttaagattctgatgaaacactccgactctgtcttagccggaaccaaagccaagaacggcttcgatgcctttcacatcgccgccaaaaacggaaatctacgtgagttgacttgattctcaaaagtctttgtgctcaagaattaccaattttgcatatatatgctgaagatcaactccatttttatctctaattgtgagtaaattgctaattatctactactgaataatccactttcattctctaattatgtgaaaattgctatttgtgtgctcattgacaaagataggaaaatgtttatgtgaatttggattttgcttttgttgcagaggttcttgatgtgttaatagaggcaaatccagaactctcatttacatttgattcatccaaaaccacggcgcttcataccgcggcttcacagggtcatggagagattgtttgtttcttgttggataaaggtgtggacttagctgctattgcgagaagcaatggtaaaaccgctttgcactctgcagctaggaacgggcacacggtgattgtgaagaagttgattgaaaagaaggctggtatggttacaagagtcgacaagaaaggtcaaaccgctcttcatatggcggttaaaggacaaaacactgagattgtggatgtgttgatggaagcagatggttcgttgatcaattccgcggataataaaggaaacactccattgcatatagcagtccgtaaaaacagagcagaggtaatcgttgatcaatcttttaagttattcttgttgcagaagttagaatctttcttgtattctttgcagattgttcagacagttttaaagtattgtgaagtcagtagagtggcggttaataaatcaggagaaacagctcttgatatcgctgagaaaaccggactacatgagatcgtaccgcttctgcaaaagatcggtatgcagaacgcaagatccatcaagccagctgaaaaagtggaaccatcaggctcttctaggaaactgaaagaaacagttagtgaaataggccatgaggtgcatactcagcttgaacaaaccgggagaacgagaagagagatccaaggaatcgctaaacgggtcaacaaaatgcacacggaaggactcaacaacgcgataaactccactaccctagtagccattctcatagcaaccgttgcttttgcagctatcttcaacgttccaggccagtacacggacgaccctaaagacgtacctccaggatattcactcggagaagcaagagcagctccaagacccgagttcttgatattcgtcgtgtttgattctttcgcgcttttcatctctttagcggtggttgtggttcagacatcagtggtggttatagagaggagagcaaagaagcaaatgatggctataatcaacaagctcatgtggatggcttgcattatgatctcagtagcgttcgtatcactgtcttttgttgtcgtgggagagaaagagaagcctttggcggttggagtaaccgccattggagctttgatcatggtttcaacactagggactatgtgttattgggtgattgctaaccggattgaaggatctaagtcatctccagcttccatgatgtcagatcctgagttagctgattccaaacataaccggaaactttatgcggtttgattagagtgaaacagaggatttagaaaatcattaaagaacagagagattttgtatccagataataaaagagataactcttgtgtttatagtagattctgtatatgtaacaaaagggaaatagtataaatcaatttataagacttttacatgataaatcatcaatgttgactttgactagagtcaacaaaaatgacgatgcctatacaaagaacaagggacgagtagacaagagccgtctctttaactgtctccggcattataatgacgatattaccctttctcgccgccgtattcgtcctccaactcctctcaactctcacggtcgcggagatcaagtctttcactatctccaacgattctcggccagtgattctcttggagaaattcggtattattgagattggtcatgtaaccgtctctgtttcctctgtttcagtattgtctccgattctagactcgtcgaaattagggttctttgttctatcagaagaatctcttcctcatgtactcctcgagctccagcaaaactttagcttctgcgttcttgattcacactacatacttcatttcttcaccttcgtcgatctctctcctcctcctcgctcccagttcagtaaatcttatccgataacgtctccaaacgattactctctgttcttcgctaattgcgtaccagaaactagggtttcgatgaaggtccacacggagatttatcacgatctatatccaaacgggtcaagagattacttactagccgggtcagcccagttaccgggtttgtatctcgtcttttttctctgttacttgagtttcctctgtttctggctctgtttctgctggaatcataagcaaattgttaaaaggattcaccttttaatgacggctctgcttctagtgaaatctctgactctgatttgtgctgctgtgtataaacactacgtgaaagtcacaggcacagctcatggctggaacattgttttctacattttccaattcattagtgttgttttgctcttcatggtgattgttctaatcggaaacggttggtctttcttgaaaccgaagctacatgttaaggagaagaaattgttggtgattgttgttccgcttcaggttttagctaacattgcttccattgtgattggagagactggaccgtacacccaagattgggtgagttggaaccagatcttcttcctagctgatataacttgctgttgtgcgattgtattcgctatggtttggtccatgtgttgtctaagagagacatcgaaaaccgatgggaaagcggtaaagaacttagccaagttaccagttttaaggaaattttacgttttggttattggatatttgttcttcacgaggatcgttgtggttgttatgaagatgaaagcagattttacgtatcagtgggtgagcaatgcagctgaggaaattgcaactctttcgttttattgtttgatgttttatatgtttaggccaatagagaagaacgagtattgtgatgttgatgatgaagaagaaattgtagagctttctctcaagtaagaagatttttgtgttttaagttttacacttgtaaggtgatcaagtactatagtgtacgtggaaatgtatgcaatgattacattaataagcatagtaaattaacaaagaagaaagggttgaataatataggccgacataattgtctctttgatgagtcgtggagcttaagcgtcagaattaaagcatgccttgtttggtgcatgtcaatttttatatattgttttcaatctttttcatattatatccaagaattgtttttgcttccatctctgattcatccgacattttatccggaaattattaatcgggagtttgaatatttttgacattattgtacgaatgaagcaacgatgaataagttagcaacatattaatgtataaccttaatcggtgaattgctccgagttttacgattgaattcaggtttggatcttccacgtattatattgtaggaaaaatatcgtcgcacatgaaaaagtgaaccatattattctatgtattatcttttgtgttcgtgattatgtgtggttcactaattccccactaatggtaacaggcgtgacatgaattttggtaagaccttgtttttttatcctaatattgttccactaaacttatatatcacgcaattaacattcttcataatagtgtgattaatgcgagaccatcattataattataatgttttgatcgtgctaagctaaatcttgtaatgcggttggtaaaacgaccggtgttgactcctccaattctaaacacgacacggcgtacctttttctcttcagtgagattcaagtttttttgggggactgaatttatatacttaaactgtttgagaaaaataaatcaagatacgtaaatagatgaagtcaataaaacatttatgagtataaaaattgttttgcaaaacgtaatttttaaaaaatatatagtaatcagaaattgtttttggctacaatcttcttttacaagtgttgaacaactttggtttaaacctttaagtaaatccgttggtatccgatgctggaattgcccgcttaatagtttcaatataagagtttatatacacacatcttcatacaaaaacaaaatataccatgaaaaattctatatattacaagtataaatacaaaacaaaacaaacaaaaaagtaaatataattaaaagaccatgcatttaaggatcactattaaaacaaagaaacaaaaattccaaatactaattataattttaagaaaaagtaagtcatttagtttggatcaacaacatcaacggtagcagcacaagataataaccttcgaaaaatccttaaaataacagaacaagcttgttcttgtttgttcttcctactaactctcctcttctcaccacgacgacgcggctttgtactctcaacgatgatgatgccattttcctccttactcttacgtcgagacgacgctgttcccttaactctccctagacacgacgtctgcgtcccagacgacaccttctccgatttgctctcgtcgtcttcccgagagaaagtgtagctacggagatacatctgtcgacaagatatgctatcaactacacgggccgccggtaggccgcctccacgacgtacggacctgacgaactcggcgtcggactccggccacttatagagattcacgtaggaggcacgtacaggacgaaccggcacgcgagggtcgtgtgcatcgttgatgcagctggagatacacactgagttcattctcaatgtttagtttttgatttgtgatattacttttttcccttcggtgattctctatcgtatatgtctaatatatatggattttttattttaaggtttaataacgtggaggaataagtgaagcttaaatttgaagaaaagataagtggaatgattaaggaaaggggtgttaataattactttcacaaaaagagtgatacttgtaattaacgagcaggggcgcgtcacccagacacatttaaatatttaagtttgtacccttgacatagaattaaacgtgtcggagtggttgtggatatttttatgtatttcatttttttttttgtctctttttcatatatttttaacagtagtttttgtgaaatcacatgtaattacaatcttgtgtagattttataaaataattttaacaaaaaaacttacaaatgttagtttatcttaaaaaagacatatacctactaaaataattttatagatttaattttcttacttagttttcagatatatacaaattaaattgttattgtgattaaaagacaaaattactaattttgataatgaaggaaatatggagtttattatcttacggctcactatgcaatggtttatcttcacggagatggtattttaacgtggttgatggaccgatttctcggagacaagggattctagttttcaaaaccgcgtgacacaaaccactatgagatatgggtggccatactctgagcggttcactttaaagttaatattttggtggaaaagttagctaaaaacaacacttagtagagtattcgactgttttttatgaaataaaatatttgtgtcaaaatgacgaagatgaaaataaacagagttttgcaagataataaaatattgattatcattgagaatctcgtatcagcggtaaaaaaaaagtttagtttctaactaaaacagtttctaattaaaaccctttttaaattttacaagatatgtagtagaattggttatggtactcacttaagtatctatacgatttggtcaagagactctcagaattaggatataaacgaaaatataacaattgtgatttggtcaagagacatttacaaattacaaattagaaggcaaagtagtttatttctgcaaacaaacatctcataggtattatcgtcatctcactcactaacaaaaaaacagataaaagaatttaaagaagcaaaactatcattactactaacagggccggtccaaaatgttttgatccctaaagcccaataaaaattgcttgctttaacacaacctaacattaaaccccatacaacataacttggcaaatgctgctctgatgaagatattaatttctctcgtttaggaataagcgaatcctgaccgttttgtatgaaacaaaatatttgtgtcaaaatgacgaagatgaaaaagataaacggaattctggaaaataataaaatattgattatcattgagaatttcgtatcaccggtcaaaaaaagagtttagtttctaactaaaaccctttttaaaatttacaaaatatgtagtagaattgattattttcttaactctttgagtacattattttgtcgtagaactgtactgattgtgaacattattcttaactctctgagaactctatgttgggttttgtttttcttagaaaaaattggcaatggattgggcctccacttgaaactacaaatcagtcgtttcaagacaaagagatctttatcgtataagtgtatcatatgtataaccaaacaagaatcaacaataaaataaagatcaaactgttgctacatataaaattgtaaaatacacatcttattgcatcatctggttcttatttcaatatttcatatccaatgaacaccattccgtatcagatgtttttttcacaattttgtgactgaacccaataaagaaaggtttgcgtctgaaccataagcatctttagaatttgcggttgaaccggcttacgcaatttgggttgtaatcttatcttgagaacatttcttggatataatttgcggcaaaagaaaaaatggatatttcgttcgcattatcgacaacacaaatgagtaggacgttatcgacggcatcaataagcgttgaacatcttttctgacaagttgtagacaaaatgaaggctaagattatgagaacattttttctagaaagaatattaacatttttcgtaagatttttacggataacattaatttgttttataatcaaagcaatatatgtaattaatgagtatgagtttttatgatatattaagatttaaatgtttctggctgttcttgttcctacaaaagccttagtcaagtgtatagatatgttaataaaaggaatagcataaccgaagtgtgccttagtcaagtggttgtttccgatctgcaagataatgtctggtctcaggtttgatgattcaaaattgatatttagcataaatgaacttttttttactttagataataaaatctattgggccggccctggactcaggctctaataatcaaccaggctataaaacgctttacatgtcattttattgctcttattgtgagagccgtgtctgaagacagtgtgagacaccttacgtgtcagcactgtattggtcggtgtgataatgtaaaagctaaaccttcgatgaatccgaatatcttcctgtcgccgatgaagctgaatcgatctcgatgtatctactgctgacgagctacttcgtctagaatcgagtcttcgacgagtctctcttgctacggctaacagacctgtcgctgcttctcttttcggagaactacacaggcgagcttctctcatttcatcctcttgtctctggttgatactgagattataatgattatactattgaagcaaattgtttctccagtgaagtctttgttgagttataaacgaaagatgtgaagtgtgtcaattataatggcggattgtttttgtttctctgttatgttacttcgattagttgatcgttttttttttttttcggatattacacaacaggtgtctcaaattggtgtcaatcttcaaaagcgtggtgtttggacaagtagtaataggtcctcctggatcgggcaagaccacttactgcaatggcatgtctcagtgtcagtgcatctctctaatgggcaggtttcatcttctttctctttttggatcaaagaaagaagcttgcttacttgtgtacctgtgaatctctttgtattgattgttttgctgtcccttgctttgtaaagtttaaaaagttgcaagttcagttaaaaattagttgtgaaatgtttgttgccttgtctttatttttgctagagatatttgcagattcgtgagaacttctctgtaagtataatctcgttgtgttactttttgttgttgttgttgcaggagatcctgcaaatgatgcattaccgtatccatttttaagccaactcttacaaaatggtaaaaagaaatcaggtgtatattgtttcttgacattgatcttagtttgtcttggtttgtctcatcttatgactatgatgtggtagcttgcatgttgtatacggttgatacacacaagcttgatttctctatgtgcacttcttgtagttgcgtatgaagaagaacagtgctatctatctagattctagagtaatttgtatataataatagagtactaccaattgatactgagccttaatgggagcatctacttgtcttgtgttgttttctttttctcttcaatcattgttctgttatcgtcattagtgtaccttccttgttaaagccggattgtagatatcactgaatccatgtttcttatatatatggctttattgctgcagtgtcttttattatgataataatcacttgatacgtggtaatatctatctataggatgttttcacttcttgtctaatgtctacttactatttattacgtggggttttcttgcaggaacttgcggctacttgtgccactgcggttaagtcaagtaagcatgtagatggaagaatagtgaccagccgttgagtcaagagtgcagacaggtagatccttgcgctctcttggtcaactgcagctacttactatcttggatccttgccctccaaaactgctctgctaaaacgttggtagctctctgggaagatgaggaactaaagtcattggctcctctggctccctcagctatacatggaagaccatgaatgaatctagaggagagaagctcagcaacggtcaacagagcataacaaatgcgtatggcttcagtgacgatcccgggccatttcttagatttctgagagagacagagtggctgaatgagaatgatcatagacattgtttctctcttggtatcaagagaggagatggtgaaagtaatctgaatgtttcttggatcacaagattcaagtactctacgttatgtagatcttcttctgtgattcaagtatataccgattagaactattttttccttgaaagtacagaacaaaagtgttgttgaattattttacttgtaaaaccaaaaacataaccaaggaaatgaagattatgccgttaaaattcttctcttttggtcgaacgttggagtttttttcctgataaatagtgtgcaaggcacgtgagggaaaagagaaggaagcttgtggaagaagtgaaggctcatttgtttggtatgatgtgtaaataaaaaaaaggttgatttgcgcagaaagagacttcatgaacctgatggtgtgcatgaagcacagaccctctcactgacctatcaagactctagcggccaactccatgtaccgaccgaaacaggggaagctctgttgagaaagctggagaccacaatctcggacatagtttcaggttgtttttgcaatgtaggacaagtgtttgttgacagctgtagaagtgagctaagaggacctcctcctcatcctcctgcaaatatgaacaactcaagatgcgagtaagtgagtttgcaagaaactgtcccaagctgacgagctgtgacacaacccatagttattgtcttctcacgagaatggaaaatcaaagaaagataaggtttggaaatgctctgatacaaatgtgtctggctctaatggcttgcatgatcacttggtttcatcatagaggtgacaaattcagcatttgtgtcgtcttcacttgtactaagggtgtctgagcaagaaacctacctacagaactagtgaaggctaatatgctctgcaaaatgcaacatgttcatataactttcgagaacaaaacgggtcacaataagataacacaaagatgagatcgatcttttgtaaggaaacacaaaactaaactagagagcatgaaaacccttatctaatgtataattcaatttcacaatgaccaaggcgaagaatcactcattagtagaaccatgaaacaggaacaacactctatgaacattcaattttcccatgtaaacttagtccgtttttgatcagattcctctgtattttttgtattttattttcaagaaaaaagaaacgaggactttaaattcaaaataagcaagagcgagccaggccacgtgtcagcgctgatgtgactaacgtctttttgtgtttcctctgatgatatatattcatcatcgttcacgctctttctctacttaaaagaaagaaagaaaacctcaagaaaccctcaaagatggagaaaaaagaagaaaagtttagttcggtcgcaagaggtttggggaattacgtcgatgctcttaagatgataaatgatttctcatcttccgctgaaagggaagagagtgaggagttcgatcatcttgaaggtgaaatacttgagtatttggggaaaaaatcaacgaatcctgcgttaaaattcactttcttgttgggttcagtttcttcgttctccaaacttgaacgctttcctctgtatgctgcattttctctgttgaatctggtcagagagtacaaatccgtggtttataacaagatggcttctatttacacccaaaaagctctccactttcttaagccgatagatcgttttctggcagagaggctgacattggaaactttagaagcaagaattgataaaggtcctgttccagagatgcccgttggttctcctctcattcgtattcggctggttccggatacagaggattatgagaggcagaagtcgtattggttaggtctagatgatgaaggttccaatttctggaaggttccaatttctgaattcaaaacctatgtggaggccaaaactggagcagtgaaagatctggagatagttctcaaatatgttaagaagaatctgaagtggatagcctggatttgtagaacttgctctaagaagttctctactcgacaagcatgtcacgatcatctggaacaagaacatgctacagggcttataccgtctcagagaatgcatatgcctcagaggataagtgaggattgggctgataaggtatcatcagttagagactggaaaccagtggatgcagtagctgctgttcaaatgatcaaggatcagtctgcacatgtgaaatcgtttgtgtatcaggatgggtggtgcaatgactggcctttagctacggatcaggttatagcgcgcagccagttactcaaagagatccgatcactccttgtaaccttcatccaacataaggttctctcagatagctttcgagagagggtggtgtattccttggttctaaagcttggcatttcaaaacagaagcttaaagactgtcgcctactggaaacacctcagagtatctgttttctggagtgtgatgaactcaacagaatccttgtctttctgcggaagatcaagagtaaaagggatgatggtactaatcttgtttgccaagcagtggatggtttcttgcagagtagtctgtttagaggaaagatatccgttgacttgcagttttcgtttctacttctggataaacaactgctactaggggagcttaagcattatgatgatgaaggaaaactgcagtttcttgtaccgagtgattactatggcaaggttcgttcacgtggtgatgctatcttaacgtggttacatgacaatgtgaatgtttcacaagaagaggatggctttgtgtttccaaaaccccctgacgctaacaactatgggatatggctggctgtactacgagccattcacctcaccgttagtctcttggtggcaaaaatagctcgtaagaagcagttagtagaggattccaatgctttgcacgaagcccaaattctttgtcaacagaagaaaaaggagaaggatgaaacgaagcaggttcttgcaactcttctacctgaaacatcaccagaattttatgtagcacatatagatatcctaagtaagctgacggatgacgacgacattttagcttccattggtaatctcttctcaggggtcctagaagaggttagcttctaacagctcctaaatcttccttttttaaacctgttaaacccttttttaacctaggacaattccttttgctgcaggttgctgaaactgactctagtatcctcttgattgaaaagtcaaggattgctctacttggtgagctcaaccaactagcgttttttgactacagatcttatgttgctagacacctcaaaaagtttctgttaaccaagctctgagtgagagaggttttttaccatatttgatttgtgtttgagtgagagagatatgttcatttttcactttttacaaaccaacaagtttagagttaccaaatattgatttctgactcaaaaataacttggtctctgtgaatgtgtgttgtttttgctgctggtttggattagtgctcttgctatagctttgaaaaggtctcgttatgatgatcttcactgaagttacacgactctatagctagcttggaactatgcttgaaacagttgatttcatttgttgtttaatctcaaaactatatctatatatacatatatgaagctacggatatttgaaaacatatacaaaacactaggaccaacctaacaagtctttagagagtctgtctccactgatccaaccctagcttccactgttgagattcttcagagagagtctgtctccactgatccaaccctagcttccactgttgagattcttcagagagagtctgtctccacagattcaatgtccggagcatttctggttctgcgctgtaatccccagtaaaagacaataatgtgtggctgctttgtaataggtttctcttagttcccagtttccacaatacatagatatcttcccagatttctccaaccaacaggtctttgtcaccttcttgcttctgttgttgctagcacactcaccattcttaggcagctgagatgctttcaaaaccgatgactggattctgccaactggtccctggaagcaggaagctgttgagattctgcagagagagtctgtctccacagattcaatgtccggagcatttctggttctgcgctgtaatccccagtaaaagacaataatgtgtggctgctttgtaataggtttctcttagttcccagtttccacaacacatagatatcttcccagatttctccaaccaacaggtctttgtcaccttcttgcttctgttgttgctagcacactcaccattcttaggcagctgagatgctttcaaaaccgatgactggattctgccaactggtccctggaagcaggaagctgttgagattctgcagagagagtctgtctccacagattcagtgtccggaacatttatggttctgagctgaaatccccagtaaaagacaataacatttggctgctttgtaataggtttcttttagttcccagtttccacaacacatagatatcttctcagattctccaacaggtcttgtcacctttgtaataggtttcttttagttcccagtttccacaacacatagatatcttaccagaatctccaagcaacaggtctttgtcaccttcttgcttctgttgttgctagcacactcacaattcttaggtagctgagatgctttcaaaaccgataactggattctaccaactggtcccaggaagcttccattgttgagattcagtgaggtgtaatccccagtaaaagacaataatgtgtggctgctttgctctgatgggtttggatcacaaaaatgccatagacttcctgtatttcaataacatgtggaacaaagcaaaggctacagtcacagactatgagacagaacacagaagatttcgtatccccaaagagttgaaccaaaagatgggaagtgggtaacttgatcagaagacaacggaaacgtgacttaacccaaccactgagatgttcctgattagcagccgagaggtgtacatgtgtttgcatacggatagagctcaaacaaaattcttcattctctgcagaagcctgagatgttctccacgcaacctgcatcatctgttgcaatttccaataagctagttagcctctgtgaagcattatgtcgaataggtgatatgcaacatttttgttcttgacacttggtgacctcctcatagtaatccgagccaattccgatgtgggtttttcttcgtggtgaataaagaacctatcaatgccaaaaccagagagtaaatcatcaaaaattaggacatgtgattgtgactgtaatcgaaatccaatggtgaagaaaacaagtccacgatgctccttgaaagatcgaattctcaatcttctgttgttggagaacacaaatctgtcgctaaggtcaaagctttttcctcctccttcgattgctgttctagacatgatgaatcagagtctgtaatcgttactttctgtggctaggagcagcgaatcctgaccgttggattggtttttctttttctttttaatgtccgtgatattattgtctgaagaagaaagagagaccagttttgacttttgacttcgagtaatgagaagaaaaagcacagtgagattgctgttcttgacgttgagtcagagtctgtggctaggagcagcttcttttgttttttgaatcgacaatggttgaggaataaacgaaatcctgaccgttggattttttcttttcttttcttctacttaataatgtccgtgatattattattgtctaaaggggagacccgagaaagagcgagaccagttttgactttttggacattgtgtgttttcgattcgatcttttttttctgaaggtatgcttttgaattcgatttttttttttttttctcgagatctttgcttcgtggtgtttcctttggacttcgtttggtgatatttctgggtttcgtcttttgacgttttttttttcttctcgatgaaatgtttactcagctgccaaatttctctgtttgatattgagtgagagagatttgttactttttacaaaatcaactagttttaggttaccaaatttggtttcggtttcgatgcttaaacaataacttggtgtagtcggtctctgtatgaatgtgtgtgtgtgttgtttttgctgctgatttggatctgtgcttttgttatagcgttgaaaatgcctcgttatgatgacctttgaacacggactcgttatatgctaatttggaactttgcttgaaacagttgatttttatctggatttacatttgatgttttatgcttttatctcaaaactctgtatatatgaagctacggatatttgacctctgatatcctattttgaagtctcagccttgagtgcaccacctgcatgaggatgtcatgagatttttttttttagtggtttttgaatcttgtaactactagttgttttggagaaattatgagattgttcctaaaatgtttggtagcccttgtaataaaggtgtcagctttgctcttgggaaatgttttcgttggtcttagatgttggtaaatgcatgttgcagttaacaatgctggtactatcaataagaacaccaagatttgggaagtctctgctgaagattttgacaatgtcatcatggttaaaggagtagcaaatgtggctgcgccattttatccctttgatgttcccacggaagcaagaaattactgtaaatatgtcttctggatggtggaagatctggtgctgccctggtgagtttcattgtgactgtaatccccttcatagcctgaaacctctactctggtgctgcccttgaagactttgcctttgtcgtaagtacttccacttcatagcctgaaacctctactctttcttttccagtgtgactgtgatccccatggatgtctctgtccttgaggatcttatcagatagaacacacaaaaaaggtctgtttggttcttgtcttttctgaagctatatcctcaaggtcttcttaagaaaggtttatcttttgtgaatttgattgttttcaactgctcatttttttgtttgtgcaggtgatggttccttctacgtggcttggcactggggaaaattggacactgatgaagacaatcagaaaactacgaagacggtcagttgatgtttcaccatagctgagtgtttctgtttgatttgcttttttcttccatttctagaaaatgaggacatgtgttttgtatgggttttcaggaaagttctccaagagttaaggtgttggagtgtttggtaatgaagtaatagatacaaatatacctgtccaagtatggagatactacttgctgaccaacaggcctgaagtaactgatcgctgccttctaggtgtttcttcgttcatcataggcatgcataaacgtgtaaatgtcaccaacactggtttgctctggggactctgccttctaggtgtctgacacattgtttccatggaatgatttgcaagcaaaactgaatggcgagtttctgaacaacctaggcaactctgttaatcgagctctgagttttatagcaaagcacatgataatgcaggttggttatacttactttcaaattcaatatttttaagtatttggtgttacctgtagatggctttttagtttggcatatccaaaagaaaatatgggatctgttgtattcttttattcaaaccagccagttggtgtgtgcaagtgagagatatttgaatcgcaggacatcagactattgtaaaatgtttgcttgcgatttttggttttcaatcttttttttgaacaaataggtaatttaaaaacttgaaaatgatagaaaggtgcatctggcttgcaagagtctttactattatgattatcctgctaaagctaatgtaacgctctctgataagattcctctctttgtaagcttatatggacatggaacgattaactgatagaacatataaagatcgttatacatgtatatgtatatctgttcattcatacactctagtggatggtcaaatgtttgcatttgggatagcataaatgatcaaattctcttagaaacagttgagtaatgttatatgaatcttggcgtggtatggctatctgagtttctgtgcctgcttttttaggttcatagtaatgttatatgttggggtcttaaagggtttatcgattctcttttcatcgttgtgtcacatgtatgattcatctgggtctctacttcaagcaaagcaaagacgacgattcttccggatcctttaaaaccaaagaactatggtaagagattttcctactgaaattgcttttagaagaactgctgctggtttagtacacctcttgtgaggtcggtttgattgtttatttcgaaaattttgtttctatttatttctagaatgccaagtgtgattaaagctgtctattgcattttgtaggtatttaagcagcaagtaaaccatggtagataactatggcaagacttgatattctattaggtaaaattgtgaaggctgagaaacatcctaaggcaaatgcattgtatgtagaagaaattgatattgggggtggtgaaattaattaccgcttgaggaaatgcaggtttgtccaatcagtctagtcatgtgttttcttcccaatatcattatcagtatgtaatcccttctacattccaattgatctactgttgtttctgaacagaaccgtatggtttctgttctttgtaacttgaagccggctacaaatgagggatattgtgttacaagcaatggttcttgcagcttccagtagtgaggaaagcaaggtagagttcacaggacaggagtatctgaactgtttgtagttccgctatgttcatttcgattgtatagcaaattgttctttgctggaaaccctgaatctgctagtattggaaagcgagttacattcagcttttagcaaccatacaatttgagattttaattcttttgtgtcgaactaattgatgtttgtcttcaattttttttaactcttctgactgtaataacaaagacagttggtcgggatataggagaagacagggtggagagagagctgatgggcttaattatctctcacaacttctagatgggctttcataagttaaaagcccattatgatttagttgggctatcaacgtaaactgaattgtgattagaaaaaaaaaggaaaaagataaaccgaataattatgtatgacgtatatgccgttgatttggaatactgtatgcaaatcctgaccgttacatgtttaataattatgtataacgtatgcccttgttttatcgaacgttagatttttcctctgataagagtgtgcaaggcacgtgacgaccgaagagaaagtcatgttggatattgtatgtcacatgcatgaggatccagtcgccatgagactgagattagggagattagattctaagggatatatatgtgagcaaagattctaatctcatttgttcttttgttgattcattgatttcttttatttttctttgttgttcattgatacaattgtttgatttgatcgtcgataaccgataataattaagagatatttgagttttaaaaagcttatcacactcatttgccaattatattctaattgccgtcagttcaatgcaaaggtaaataccaaattggtttcatcatgctagtgaatagtgtcgatggagaatgttaacactggttattgatcaacagtaaaatacagatctagctgttgctgcatataagttttaagtacttatcttattgcatcgtaggtttcagtttagttacgatactgcttagtttcaacaattcaatgcttgagattttgattgtaatgattagttagacagaaatttatattatgaatgtgtattaaaattttagtctaaaggcttgactagtaagtatgtcagattaataagtgaattatgaaattacgtagtcaatagagggacaacaattttaagctaaaagatattaattttgtttaaaaccgaaaaaaaatatctattattctattgatgaatggaatttttaaattttggtttaattttaaaacgtgcatggtaaactgaaaattcacttggtacgtattttttacgtactattatttaacacaagttttaagaaaatgtatgtatttagcggaatcacattttcaaaacgtagaaaactgcataacattcaaggctaaataacacaatacaatgtagtatttttagcaattgctttgtttgagcaaaatggagacattattgttgcgagaaagtgtttcaaccatgtcaaacagctcttcttcaaaccatggtgcatcaccattaaagtagatgcctcccaaccaaacaaccatcctctctagcgtctttgcgtttctcagcaccaaatccataaacgaagccacgagtttcaacgttgcatcattacaacccaacatcttgtagatctcctttgaggtaggaaacacctcacatgttgatctccaacattgatccggatataaaccttttaaatgatgcattttctgtagaacataaaaaattatcctatagagaataagctcatctccaatatatttttcaattagagtaactcaaaaatatagtagagttttttttttttcttcaatgtaccactctatttttttatttttattttaaagtgcaaaaaatagagttactctaaatgtaaagcaaacatatattttactctattttagaatggagttgtaaagaattttgctatgtaataaagtttagggaaaaagtagagtagacttggagatatacccttggtaaaaatatcaatcctatatcccaacgaaagtgaaagacatgtggttcatggaatgttcctagtgcgttattagtatgcatggtcttatatataaatcgacaaggaaataaaagaggtaaaaataccattatgtcgtggcttagctgcaatgtgtgtaatgttagagcatctccattggtgcatcttagcccatatcttagcttagtatcttaggtgtaaacatttaaaattaaatcaaaaatgattagaatgctaagaagtgaatcttagttaagatgttttatgtgtgttaagaagtgtagacatgttgcaatatgagtggttgaaagtaaagacaaaaccaaacaaaagtaaaaattcacctctgtgtatttagctaagataccaaaaagacaaaacttatattcttaaccattggatgtaatacatgctaagatactttcttattttcttaactcacaaaaaaacaaaaatttattctaaaatattggtaagattcaagattaagaatcaattgtatcttaaccattgtagatggtcttagcttctttaatccaggtgaattctgtagtaaccttgatataccagggattacagatcgaacgaactccgttttaacagtcaaagtttggaccttgagcgttgggaaaggaacaccgcggagctcggcgagagatagaatctgacaaaacgagatgaaattaaaaggtcatgtttgctagaaacccacttagcaagttggcgttctaaaccatcaaagaaacattattaaccaaataatagttctacaggttttagactttagagtatacctgaagaagggtttccccaacagtaagcctcttaacgttgtgaaattttgatagcatctccagcgccatggtttgataaccatctgcagtcaagggagagagtaggctactgataatggtaaggttagcttcgctcaaagaggagacatccactatagtagatggtgtgctagagtatgtcagtctcaaataatagatgtgtggcgcaacaatcgcaactggtcctgtgcggcgatattgctgatttatatccaatctcctcagattcggtgatttactcagatcaagacgctcaagtaatctgcatgtatccagtgtcaagctttcgagaattggacagccagagagaatattatgaatggattcgtctggaatttgacaaaaacgcagtgttaagttccttagggatttccaagacactgtgcatgtgggaatcatatcaaaaaagtccaacgtcacgtcgagtagctttaaggaggaactgagatagaagatatctggaaatctgtaagtcttggagtatgtgaaatccctaacgaacacagacagattttgcacattgcgggagagagcaaactcgatccagctatcaacctggggtacagtgttgctgttaaggtccataacaagtttgaaactagtgattatgggagccgtgtaggaagttagggtttggttcatcgctccgtgcttgagtgtaatgtcgagacaaggtgtctcgcaccatacatgcctccatcgtcgggataagacggaagttctcatggccaaatcggtgggaataaaggagagaatatggtgaaggatatcatctggcatatagttgatgaaatctgcaccatcgattattcgttggattctgcggtggctacgatgttgtcgtcggccccgtctctctcgccttttcgccatctaacgcagatgtctttaggttttcttttgtctacagaagaattacgtttaatatttatatacaatcggcctcccatggaaaagacggcaaaagctatgaatcgactaatgacccttttaagcattaccctttaacggcccaaaatgtatttataagattatggccgggcctagtaagacaagtttactttaaccttaactttaacattaccagtaccccaaaatgcccaaaattaatgtatcctcaatcacttgtgttacttttacaagtatcgaattatctgtaacgtaatcccttaaataatgtacgtattagtctactgtccaaatactgcgcttttgaagattgacaccaatctgaaaacaaaacagagcacaaccaactaatcgaagtaacataacatgaatattcaatagagaacagtataaaccccttctaaacactgaccttgtagcacaattcgaatcggagacagaaaaacaaaaacaatccgccattattattgggttattattgacacactgataagacccaaaagatgcgagtagtgagtttgtaagaaactgtcccaagctgtgacaacccatagttattgtcttcttgtctctttgtgtattgttgctcaatttgtttcacgagaatagaaaatcatagtaagatgaggtttggttgtacacaaacaaacaaagaaaggaaacgcgtgtaagtttttgaaacttttgtttcttgaagaatcaatatatgagagccaatgctatgtaccaacaataaaaagtggatcttgttgttgtataaagaatggtttgcgactgaaccggataaaaaaaatggtttgcgactgaaccggatgcaaattcacaatttgcggttgaaccggctttcgccatttgggttctaatcttatcttgacaacatttcttgcttctctaatttgcgccaaaagaaaaatggatatgtcgcttgcgttatcgacggcaccaatgagtaggacgattatctctgccacgaggcggtcccaagtttcacaacctaaagctaagaaagtcaagccggcgaataagcggccaacgatgtcgacaagcggtttctccggcggaacgacaaaggagttgacttggaagtgcgtagaaggttgtggagcttgctgtaagattgcaaaggacttttcctttgcaacacctgacgaaatcttcgacaaccctgatgatgttgaggtttgtttgtttctcacccaccacttgttcgacttaattactctgttaggtgttaaaacgttaatatatatataatcttatgcttaatccagctgtatcgaagcatgatcggagatgatggatggtgtctaaactacgacaaagctacacgcaaatgctctatttatgctggtaacaatcaatcattattagctatcagattgttctctctgtttatggactgaaactttgaacgttttcttcctttcctgagttcagatcgtccatatttttgtcgggttgagccagaggttttcaagtcactctacgggattgaagaaaagaaattcaacaaggaagctgtcaggtaactctccttggttgtataactctatttcacaagctcttacacactgagagtgtttaaatcaaatgtgtatctgaatcttaattaggggatataacaaatgtggaagagataaatgtgaaaaatatctttttacgttgcagctgctgcattgacacaattaagacgatatacggccctgattccaaagaattggatagcttcaaccgtgccatcagaagtaatccgagctcgagttgattagtcagataaactcaaaggaaggtactgattcagttcttttcttcgtaatacataccttagagttcccctcaatgcatttgtggattagaatgtgtacaataaatagccttatagtattggaaaattttgggattatttttgactgagattactaaagtatgtggaagagaagcaaataccaaaagacaaaaagtgagatcctactgtcaatcctcttccctaatataagctgcaaaattcatgaaacaccaaaagtctttatgcaaaacaaatcgtggacgaaccttcttaaaacatgtcatatcacagggtcaagtccaagttcatcttcaggttcatcactttcctcaaatagctgcataaaccgagcttgatctcgctgcttcttcatcctttgcgtgtgcttaaacataaaaacgcctccaaccacaacaagcgttgtacacaaaacgcctgctatgatcgctatcatgaatgttaacccgttatatccttcctcttgcggacttgaagcagctactgctttagaagatactacacacattttgttgcatacaattcatatatgttactcatcatcatatcttttcgtttcttttgacaggaaacagaaataaggaaattagttattactcaccggagtggaacttggcgcaaccgtggcagacaaaagtagcattaatctccttttctttaaaatgcatataaacttggctagcagagaaatcagtgggacaaacttcccatacatcgaactctttgtctgaaacgaggctgccttgctcatagattccgcatcgtttacacttttcgccaccaattccagtcataggctgtaacaggcaatagagtgaagaacatatatgtatttatccatgttattaatagattgtagtaatgaacggatgtaaaagagatttgggactagcctgccatgattcttgaccgcggaaagtgtacaagacacctgttttggtaacgtctggaagaacagttttgttctctccattgcattgaaagtagaccgtatgtttgagcttgaaccagtcgtgctttgtgaatatctcaatagagttgagtgtgataaattgccctcttaccagtcctgaaattttgaatatgaacacatatattaatctttttcgtaaatatacaaataagtcgatatgtccgagtggttaaggagattgactcgaaatcaattgggctttgcccgcgcaggttcgaatcctgctgtcgacgatttttaattttaattttacagaaaattccccattaatcttaaattctttgaatctcttttttcttgggacgttttcttttttcatcatgcaaaataaccacaaatcgatctatggaaacaataaaaagcatcatgaaaagatcgatcattttcgatcgagtgaatggataaaaagtttgttggttaacgaaacaaacatcatgttttgtttcccgggaaaattagtcgtgtggaatttattacctggaatccacatgtggatgatgtaacagaaaagaagatttctccagatcatcggttttcgaatcggcatttttatctaattttcagggtttttttccgtttagttctctctgttatgttttcaacgaatattgaaacaaaaggaaagaacaggaaagcaagctttcgagaaaaaagagggacagagatccacgtgcgtctcacgctttccctctaaacactctccctcttcaataccacattctataatacattatatttgtaacgttcgtataaaatattcacaaacaaaaataatgatcatattttacattgaaaaatcccaaattttaccgaatttgttaagctaattcttaaatatttaaaattaaaacgaacaaagtaagcttacttttgttatggtatggactttttttttttttttgacattcattatgtcaacaaactacgaaatctttttaccaaaaaaaaaaaacaacgaaaaacagataacaaaaagatgagacacacaatctgtcaaagctt

SEQ ID NO: 1398 - DNA, 104769 bp, Arabidopsis thaliana
tcaatcttctgttgttggagaacacaaatctgtcgctaaggtcaaagctttttcctcctccttcgattgctgttctagacatgatgaatcagagtctgtaatcgttactttctgtggctaggagcagcgaatcctgaccgttggattggtttttctttttctttttaatgtccgtgatattattgtctgaagaagaaagagagaccagttttgacttttgacttcgagtaatgagaagaaaaagcacagtgagattgctgttcttgacgttgagtcagagtctgtggctaggagcagcttcttttgttttttgaatcgacaatggttgaggaataaacgaaatcctgaccgttggattttttcttttcttttcttctacttaataatgtccgtgatattattattgtctaaaggggagacccgagaaagagcgagaccagttttgactttttggacattgtgtgttttcgattcgatcttttttttctgaaggtatgcttttgaattcgatttttttttttttttctcgagatctttgcttcgtggtgtttcctttggacttcgtttggtgatatttctgggtttcgtcttttgacgttttttttttcttctcgatgaaatgtttactcagctgccaaatttctctgtttgatattgagtgagagagatttgttactttttacaaaatcaactagttttaggttaccaaatttggtttcggtttcgatgcttaaacaataacttggtgtagtcggtctctgtatgaatgtgtgtgtgtgttgtttttgctgctgatttggatctgtgcttttgttatagcgttgaaaatgcctcgttatgatgacctttgaacacggactcgttatatgctaatttggaactttgcttgaaacagttgatttttatctggatttacatttgatgttttatgcttttatctcaaaactctgtatatatgaagctacggatatttgacctctgatatcctattttgaagtctcagccttgagtgcaccacctgcatgaggatgtcatgagatttttttttttagtggtttttgaatcttgtaactactagttgttttggagaaattatgagattgttcctaaaatgtttggtagcccttgtaataaaggtgtcagctttgctcttgggaaatgttttcgttggtcttagatgttggtaaatgcatgttgcagttaacaatgctggtactatcaataagaacaccaagatttgggaagtctctgctgaagattttgacaatgtcatcatggttaaaggagtagcaaatgtggctgcgccattttatccctttgatgttcccacggaagcaagaaattactgtaaatatgtcttctggatggtggaagatctggtgctgccctggtgagtttcattgtgactgtaatccccttcatagcctgaaacctctactctggtgctgcccttgaagactttgcctttgtcgtaagtacttccacttcatagcctgaaacctctactctttcttttccagtgtgactgtgatccccatggatgtctctgtccttgaggatcttatcagatagaacacacaaaaaaggtctgtttggttcttgtcttttctgaagctatatcctcaaggtcttcttaagaaaggtttatcttttgtgaatttgattgttttcaactgctcatttttttgtttgtgcaggtgatggttccttctacgtggcttggcactggggaaaattggacactgatgaagacaatcagaaaactacgaagacggtcagttgatgtttcaccatagctgagtgtttctgtttgatttgcttttttcttccatttctagaaaatgaggacatgtgttttgtatgggttttcaggaaagttctccaagagttaaggtgttggagtgtttggtaatgaagtaatagatacaaatatacctgtccaagtatggagatactacttgctgaccaacaggcctgaagtaactgatcgctgccttctaggtgtttcttcgttcatcataggcatgcataaacgtgtaaatgtcaccaacactggtttgctctggggactctgccttctaggtgtctgacacattgtttccatggaatgatttgcaagcaaaactgaatggcgagtttctgaacaacctaggcaactctgttaatcgagctctgagttttatagcaaagcacatgataatgcaggttggttatacttactttcaaattcaatatttttaagtatttggtgttacctgtagatggctttttagtttggcatatccaaaagaaaatatgggatctgttgtattcttttattcaaaccagccagttggtgtgtgcaagtgagagatatttgaatcgcaggacatcagactattgtaaaatgtttgcttgcgatttttggttttcaatcttttttttgaacaaataggtaatttaaaaacttgaaaatgatagaaaggtgcatctggcttgcaagagtctttactattatgattatcctgctaaagctaatgtaacgctctctgataagattcctctctttgtaagcttatatggacatggaacgattaactgatagaacatataaagatcgttatacatgtatatgtatatctgttcattcatacactctagtggatggtcaaatgtttgcatttgggatagcataaatgatcaaattctcttagaaacagttgagtaatgttatatgaatcttggcgtggtatggctatctgagtttctgtgcctgcttttttaggttcatagtaatgttatatgttggggtcttaaagggtttatcgattctcttttcatcgttgtgtcacatgtatgattcatctgggtctctacttcaagcaaagcaaagacgacgattcttccggatcctttaaaaccaaagaactatggtaagagattttcctactgaaattgcttttagaagaactgctgctggtttagtacacctcttgtgaggtcggtttgattgtttatttcgaaaattttgtttctatttatttctagaatgccaagtgtgattaaagctgtctattgcattttgtaggtatttaagcagcaagtaaaccatggtagataactatggcaagacttgatattctattaggtaaaattgtgaaggctgagaaacatcctaaggcaaatgcattgtatgtagaagaaattgatattgggggtggtgaaattaattaccgcttgaggaaatgcaggtttgtccaatcagtctagtcatgtgttttcttcccaatatcattatcagtatgtaatcccttctacattccaattgatctactgttgtttctgaacagaaccgtatggtttctgttctttgtaacttgaagccggctacaaatgagggatattgtgttacaagcaatggttcttgcagcttccagtagtgaggaaagcaaggtagagttcacaggacaggagtatctgaactgtttgtagttccgctatgttcatttcgattgtatagcaaattgttctttgctggaaaccctgaatctgctagtattggaaagcgagttacattcagcttttagcaaccatacaatttgagattttaattcttttgtgtcgaactaattgatgtttgtcttcaattttttttaactcttctgactgtaataacaaagacagttggtcgggatataggagaagacagggtggagagagagctgatgggcttaattatctctcacaacttctagatgggctttcataagttaaaagcccattatgatttagttgggctatcaacgtaaactgaattgtgattagaaaaaaaaaggaaaaagataaaccgaataattatgtatgacgtatatgccgttgatttggaatactgtatgcaaatcctgaccgttacatgtttaataattatgtataacgtatgcccttgttttatcgaacgttagatttttcctctgataagagtgtgcaaggcacgtgacgaccgaagagaaagtcatgttggatattgtatgtcacatgcatgaggatccagtcgccatgagactgagattagggagattagattctaagggatatatatgtgagcaaagattctaatctcatttgttcttttgttgattcattgatttcttttatttttctttgttgttcattgatacaattgtttgatttgatcgtcgataaccgataataattaagagatatttgagttttaaaaagcttatcacactcatttgccaattatattctaattgccgtcagttcaatgcaaaggtaaataccaaattggtttcatcatgctagtgaatagtgtcgatggagaatgttaacactggttattgatcaacagtaaaatacagatctagctgttgctgcatataagttttaagtacttatcttattgcatcgtaggtttcagtttagttacgatactgcttagtttcaacaattcaatgcttgagattttgattgtaatgattagttagacagaaatttatattatgaatgtgtattaaaattttagtctaaaggcttgactagtaagtatgtcagattaataagtgaattatgaaattacgtagtcaatagagggacaacaattttaagctaaaagatattaattttgtttaaaaccgaaaaaaaatatctattattctattgatgaatggaatttttaaattttggtttaattttaaaacgtgcatggtaaactgaaaattcacttggtacgtattttttacgtactattatttaacacaagttttaagaaaatgtatgtatttagcggaatcacattttcaaaacgtagaaaactgcataacattcaaggctaaataacacaatacaatgtagtatttttagcaattgctttgtttgagcaaaatggagacattattgttgcgagaaagtgtttcaaccatgtcaaacagctcttcttcaaaccatggtgcatcaccattaaagtagatgcctcccaaccaaacaaccatcctctctagcgtctttgcgtttctcagcaccaaatccataaacgaagccacgagtttcaacgttgcatcattacaacccaacatcttgtagatctcctttgaggtaggaaacacctcacatgttgatctccaacattgatccggatataaaccttttaaatgatgcattttctgtagaacataaaaaattatcctatagagaataagctcatctccaatatatttttcaattagagtaactcaaaaatatagtagagttttttttttttcttcaatgtaccactctatttttttatttttattttaaagtgcaaaaaatagagttactctaaatgtaaagcaaacatatattttactctattttagaatggagttgtaaagaattttgctatgtaataaagtttagggaaaaagtagagtagacttggagatatacccttggtaaaaatatcaatcctatatcccaacgaaagtgaaagacatgtggttcatggaatgttcctagtgcgttattagtatgcatggtcttatatataaatcgacaaggaaataaaagaggtaaaaataccattatgtcgtggcttagctgcaatgtgtgtaatgttagagcatctccattggtgcatcttagcccatatcttagcttagtatcttaggtgtaaacatttaaaattaaatcaaaaatgattagaatgctaagaagtgaatcttagttaagatgttttatgtgtgttaagaagtgtagacatgttgcaatatgagtggttgaaagtaaagacaaaaccaaacaaaagtaaaaattcacctctgtgtatttagctaagataccaaaaagacaaaacttatattcttaaccattggatgtaatacatgctaagatactttcttattttcttaactcacaaaaaaacaaaaatttattctaaaatattggtaagattcaagattaagaatcaattgtatcttaaccattgtagatggtcttagcttctttaatccaggtgaattctgtagtaaccttgatataccagggattacagatcgaacgaactccgttttaacagtcaaagtttggaccttgagcgttgggaaaggaacaccgcggagctcggcgagagatagaatctgacaaaacgagatgaaattaaaaggtcatgtttgctagaaacccacttagcaagttggcgttctaaaccatcaaagaaacattattaaccaaataatagttctacaggttttagactttagagtatacctgaagaagggtttccccaacagtaagcctcttaacgttgtgaaattttgatagcatctccagcgccatggtttgataaccatctgcagtcaagggagagagtaggctactgataatggtaaggttagcttcgctcaaagaggagacatccactatagtagatggtgtgctagagtatgtcagtctcaaataatagatgtgtggcgcaacaatcgcaactggtcctgtgcggcgatattgctgatttatatccaatctcctcagattcggtgatttactcagatcaagacgctcaagtaatctgcatgtatccagtgtcaagctttcgagaattggacagccagagagaatattatgaatggattcgtctggaatttgacaaaaacgcagtgttaagttccttagggatttccaagacactgtgcatgtgggaatcatatcaaaaaagtccaacgtcacgtcgagtagctttaaggaggaactgagatagaagatatctggaaatctgtaagtcttggagtatgtgaaatccctaacgaacacagacagattttgcacattgcgggagagagcaaactcgatccagctatcaacctggggtacagtgttgctgttaaggtccataacaagtttgaaactagtgattatgggagccgtgtaggaagttagggtttggttcatcgctccgtgcttgagtgtaatgtcgagacaaggtgtctcgcaccatacatgcctccatcgtcgggataagacggaagttctcatggccaaatcggtgggaataaaggagagaatatggtgaaggatatcatctggcatatagttgatgaaatctgcaccatcgattattcgttggattctgcggtggctacgatgttgtcgtcggccccgtctctctcgccttttcgccatctaacgcagatgtctttaggttttcttttgtctacagaagaattacgtttaatatttatatacaatcggcctcccatggaaaagacggcaaaagctatgaatcgactaatgacccttttaagcattaccctttaacggcccaaaatgtatttataagattatggccgggcctagtaagacaagtttactttaaccttaactttaacattaccagtaccccaaaatgcccaaaattaatgtatcctcaatcacttgtgttacttttacaagtatcgaattatctgtaacgtaatcccttaaataatgtacgtattagtctactgtccaaatactgcgcttttgaagattgacaccaatctgaaaacaaaacagagcacaaccaactaatcgaagtaacataacatgaatattcaatagagaacagtataaaccccttctaaacactgaccttgtagcacaattcgaatcggagacagaaaaacaaaaacaatccgccattattattgggttattattgacacactgataagacccaaaagatgcgagtagtgagtttgtaagaaactgtcccaagctgtgacaacccatagttattgtcttcttgtctctttgtgtattgttgctcaatttgtttcacgagaatagaaaatcatagtaagatgaggtttggttgtacacaaacaaacaaagaaaggaaacgcgtgtaagtttttgaaacttttgtttcttgaagaatcaatatatgagagccaatgctatgtaccaacaataaaaagtggatcttgttgttgtataaagaatggtttgcgactgaaccggataaaaaaaatggtttgcgactgaaccggatgcaaattcacaatttgcggttgaaccggctttcgccatttgggttctaatcttatcttgacaacatttcttgcttctctaatttgcgccaaaagaaaaatggatatgtcgcttgcgttatcgacggcaccaatgagtaggacgattatctctgccacgaggcggtcccaagtttcacaacctaaagctaagaaagtcaagccggcgaataagcggccaacgatgtcgacaagcggtttctccggcggaacgacaaaggagttgacttggaagtgcgtagaaggttgtggagcttgctgtaagattgcaaaggacttttcctttgcaacacctgacgaaatcttcgacaaccctgatgatgttgaggtttgtttgtttctcacccaccacttgttcgacttaattactctgttaggtgttaaaacgttaatatatatataatcttatgcttaatccagctgtatcgaagcatgatcggagatgatggatggtgtctaaactacgacaaagctacacgcaaatgctctatttatgctggtaacaatcaatcattattagctatcagattgttctctctgtttatggactgaaactttgaacgttttcttcctttcctgagttcagatcgtccatatttttgtcgggttgagccagaggttttcaagtcactctacgggattgaagaaaagaaattcaacaaggaagctgtcaggtaactctccttggttgtataactctatttcacaagctcttacacactgagagtgtttaaatcaaatgtgtatctgaatcttaattaggggatataacaaatgtggaagagataaatgtgaaaaatatctttttacgttgcagctgctgcattgacacaattaagacgatatacggccctgattccaaagaattggatagcttcaaccgtgccatcagaagtaatccgagctcgagttgattagtcagataaactcaaaggaaggtactgattcagttcttttcttcgtaatacataccttagagttcccctcaatgcatttgtggattagaatgtgtacaataaatagccttatagtattggaaaattttgggattatttttgactgagattactaaagtatgtggaagagaagcaaataccaaaagacaaaaagtgagatcctactgtcaatcctcttccctaatataagctgcaaaattcatgaaacaccaaaagtctttatgcaaaacaaatcgtggacgaaccttcttaaaacatgtcatatcacagggtcaagtccaagttcatcttcaggttcatcactttcctcaaatagctgcataaaccgagcttgatctcgctgcttcttcatcctttgcgtgtgcttaaacataaaaacgcctccaaccacaacaagcgttgtacacaaaacgcctgctatgatcgctatcatgaatgttaacccgttatatccttcctcttgcggacttgaagcagctactgctttagaagatactacacacattttgttgcatacaattcatatatgttactcatcatcatatcttttcgtttcttttgacaggaaacagaaataaggaaattagttattactcaccggagtggaacttggcgcaaccgtggcagacaaaagtagcattaatctccttttctttaaaatgcatataaacttggctagcagagaaatcagtgggacaaacttcccatacatcgaactctttgtctgaaacgaggctgccttgctcatagattccgcatcgtttacacttttcgccaccaattccagtcataggctgtaacaggcaatagagtgaagaacatatatgtatttatccatgttattaatagattgtagtaatgaacggatgtaaaagagatttgggactagcctgccatgattcttgaccgcggaaagtgtacaagacacctgttttggtaacgtctggaagaacagttttgttctctccattgcattgaaagtagaccgtatgtttgagcttgaaccagtcgtgctttgtgaatatctcaatagagttgagtgtgataaattgccctcttaccagtcctgaaattttgaatatgaacacatatattaatctttttcgtaaatatacaaataagtcgatatgtccgagtggttaaggagattgactcgaaatcaattgggctttgcccgcgcaggttcgaatcctgctgtcgacgatttttaattttaattttacagaaaattccccattaatcttaaattctttgaatctcttttttcttgggacgttttcttttttcatcatgcaaaataaccacaaatcgatctatggaaacaataaaaagcatcatgaaaagatcgatcattttcgatcgagtgaatggataaaaagtttgttggttaacgaaacaaacatcatgttttgtttcccgggaaaattagtcgtgtggaatttattacctggaatccacatgtggatgatgtaacagaaaagaagatttctccagatcatcggttttcgaatcggcatttttatctaattttcagggtttttttccgtttagttctctctgttatgttttcaacgaatattgaaacaaaaggaaagaacaggaaagcaagctttcgagaaaaaagagggacagagatccacgtgcgtctcacgctttccctctaaacactctccctcttcaataccacattctataatacattatatttgtaacgttcgtataaaatattcacaaacaaaaataatgatcatattttacattgaaaaatcccaaattttaccgaatttgttaagctaattcttaaatatttaaaattaaaacgaacaaagtaagcttacttttgttatggtatggactttttttttttttttgacattcattatgtcaacaaactacgaaatctttttaccaaaaaaaaaaaacaacgaaaaacagataacaaaaagatgagacacacaatctgtcaaagcttgtcagaaaatggcaaaacactaaccgaataatgaatgttttcaaaagtgaaacaacaaaacctgagaaacagagaagattgaaaatgagagacacgaagacgacgactaagagatatgtcgtcgtcttcgttatatcatccgttttgtctctccatctcctccgttctcctcctcctcctattaatcttctccggagaatttccctccaccgcaggaacttcatcaccggacaccaaagccgcagccgcacgtgcgactaacagaggaaggaggaataagcaatccgcggagttcttactcgcgcacaacgcagcgcgtgtagcttcaggcgcgtcgaatctaagatgggatcaagggttggcccgtttcgcatctaaatgggccaaacaacgtaaatcggattgtaaaatgacccattcaggtgggccttacggagagaatattttcaggtaccaaaggagtgagaattggtcgccgaggagagttgttgataaatggatggatgaaagtttgaactacgatcgggtggctaatacgtgcaagtctggtgccatgtgcggtcattatacgcagatcgtttggcgtacaaccacagccgttggatgcgctcgttctaaatgcgataacaaccgtggattcctagtgatttgcgagtattcaccttcggggaattacgaaggcgaaagtccttttgatatacctaaaataacattgaaattagacaagatttaatcaaatattgttacttcaattcttgaaacatttttttcttcctttaatggtcaagttttttccgttactccttctaatgactaatgtaatatggaccgtattgatgttcgacgttatgggctttggccttttttaattattatgtgggcttttgaattattttagaatgtgaaacgctgtcgtttatgtagcgaatgtgggtgtaatttcgaatcttcttcaccgtgttcgtcatcgtcaccactgagactctctgtagagaaaaaccctagacattttccggtgagaaatgagtatcactcgtagcgcgatcagatcgagtttgtgtctccggaaattggatccggaaatcagtcgtagctcgcttccgtttcttcaagagtggaggaaatgcctatctaccgccacggagcagcctcctcctgcctctccgttaccaccgcctccgggaggttctccgggagaaggttttctcttttatttcattccatttatctagtgtttctttgagagcatttctccaatttgtgagggcaaagatcctagatcatagattgcagagttttgatttgtttggagtgtgtatatctgaagctattgaaattgaaaatgttggtttcaaatttaaccgcagaggctattatcgaattttgctatccaaaaatgcggactttgtttactttgactgttatggttttgagactttgtttagctcactatgaaggatgttccttgatgtgtttttcttatttctttttgcagggaggttttatgggaagttttcaggcttttcaaaacatgctctgaagacagacataatgaacgtactcgagggctgcagtctgacatcagatgatctcaaattcaactatccgcgtggcggaaacttaactcctgcggcagtgtaagtcttaagctttattaattctctggattgttactttggaagagaggaattcgaatccaaactaatgaatttctatcctttttcattctcgacaatgttggtatatatcagctttgtgcagttcccatccctttccgcatatgataaagcactgcggaatatcgcaaagaaaggaaagctatatagattagaaaaggtaatccttttacattctatagagtccatatttatttccgttttacaaacaaagaaagtattcgtatgctagatggctatttaatctggagttgattccttgtcgatgattaggctgctcgtgctcagtgggatcccattgttccttatgaggggaaagtggtaagctatgtattctgtcataacttatagtattatcgaggtttgttctcacttctcagacaactggtctgacataaattgtaattggtaccaactaatatttgatgaaattttatattgtttaggttgcactacatgggattccggtgaatgctataacagatgacatagataggttcttatctggctgtctctattatcctggatccatccagttcctcacagtgtgagtaattattgggtttactaattcttattttattagtaccctgttttgtactttactcgatccgcatttgattagccgttagttggacctgcagtcttgcaaaggcagtgctctcctgtttgattcatcagttgcactgatgtttaatcatattactcactagaataagcaaatagtacagatgtaatataaatagctttcgccgggaactataggaggagtgatagcactcactcctgactgtcatattttttttattttctcgagtacgacatgtgatatcttgtcaccttgttagacatcatatctagaaatctttgtgttctatgcctatagtcgtgttgtgcagcagtttctggattactgataatatgaggacatgaaactattttaatgccttcttttaccatgcagtcaaggacttggaacttcaaagagggtagcattggtgcgtttcacatcacaaacccaggcaatgaacgcatacattacaaagaacaggaacttccttctcaaccaacgaatcacattgcaagttctgcagtaatttcttagtttctattccattctcgtggtgtattccaatggtaagagatccaaagcactttcttttgtctctactgttgggatgttttaggtcgatttggttatcaaaaatttccatctgcaaacttcacgatgcttgataaactgttgttgtctctctcttccctggttcagttcgaagttgatgaataacaaatacatgtgtcttagtagaagcagaaagtctcacataagcagatgttatactatgtgatctttttctctttcttgtattttgactaaagctgttatcattggatgcccatgtggtgaagtgatccatcgtgcttttagaaagtgaatgaatttgtactataagggtttggtgggggctcactcttcactagtgcaatagaaatcgagcacagtagaataatataatgagtttttttaattgttctcttgcttttctctagtgggtcatctttacttgtaattgaagcaacttgctatcatatcttctcagttctcacggtaaccgatctttcttcatgagtccctttgattgtgtagaagatttgatgtattattaaatttgtagatcgtatgactagtgaaactgtgtcagtgtaccttccttttgatatacttctaagtgatagtcaataaactcaatggccaaacccctctagtaggatcttcattgagctatggatcaatcaatttggtgagcttagttttgctatagtggtaagttttctttggaggaaggggtagtattgtcagaatagtcattgaagacttttcattgttggtgtccaccgaaatcttgtttagggatttgtgaaacatgagagtttgtgaaagtatggacaacacacggggacaaatgcatagagactagagttatagaatggtgtgtggtcatgtgaattattaatctttcaatactgtttctttaagacaacagttgaaagtgtagaagaagctatggatttagccgaaccttttgtttttgatatctttatatagttttgacttttgatcatcttcctcttgttttgttgcttttgtttagccatgtacactagtaagagaaacatctatttgtcctgaacagcaacatgagtttggtaaataatcttatctgatcattaggtgtgaatgataggtttttgggtttgtgatttgtgttgtgaaagttgacaaatacatttatataaacaagccgatccaaattcttactctactccacagactcttgtctggtcccactaactagcttcacattatcaaattcttcgatgaattttggtaaatgtaactaaaatatcaaattcttcgatgaagtttggtaaatgtaactaaaatatagtttggtttagaactttagattgtggagctagtaacattaataaaatatatagtttgttaaatttcaacacaattttccaactaaatccttcgaaatttcatatttccaagatttatagttaaagtgtaatgaaacactttttaattgcataaagtttgcaagcaaattatgcctgtcaccaacagttgctaaagtgtaaaacttttgccaactcttctccattcattgcttcttcacctttattctccaatcccaaatttacatctatcaattacatcaaaacccaaacaagcaaagccgacaataatctcttttgtaccacaaccatttgttttttccctaatagaaaaatcaccaatattttattattacttccaccaaattcctaatgacttaatacaatgtatatataaagcaaagattcgtcaaaaagtgaaagtgttaacagaagtgagaaacgaagcacacaagatctttaatatggaagacgaaaacaccacaatcatcatggcgtcactctctgctctttctccttcacacctcacgaatctgactcactccattctctctatctcccaccaccatcgccgccgcctcggtgcagtcctctcctctccgacccttttctccctcactctccgccacctcctctctctatctcttcctgacaaaactcacctcatcgccaaccatcttctctccctcctccatcctcttctcatccaccgtaaacaccactcctcctacgccgtcaccatgaagctccgggacctagacgcggtggtcctcctcctctttctctgcgaaacccaccagcttcatccagatgttctagaagcttccgctgataattggcgggaaattctcggtaatacgtactctaataatatgttaagtaataattccggtctttggacttgcgatgccggaatcttgatgccgtacatagaaaccctagttagatgcaaaagatttgttgacataatgggaggctataaccatcttcgtcgaagagatcaaaaagaaggctaccaagttccagccgctagagcggctgtggtggcgttacgggcggttgaggttttcaacgtcgccgcttcaaacgccggagaagtagaatgcgtgatatgcaaggaagagatgagcgaaggaagagatgtgtgtgaaatgccatgtcagcatttctttcactggaagtgtatcttgccgtggctaagcaagaagaacacgtgtccgttctgcaggtttcagcttcccaccgacgatgtcttctcagagatccaacggttatgggagatcctcgtcaagagtagcgagttacacgtggcgtaatctcagtttgcggtgatgggtacatgtgtaagaggaactaaagaagcctgtacatcgtaatctaatatactatgtagaataatatatcaagtaattgtcatagataggaatgtttggaccgttttgatatatcgaaatagtttatattttgagaaagacacatttgtgttaatagtacgatgaatttcgtaaatatgttgtaatagaaaccaaattaatagtgaccaaaaaaaataaaattaattgtttcatgtatatgagcattggtttcaatcatgtatttgttcccatattctatagtcaatcggtgggaaaatgaaatcaaaagatgacatgtcgacaacaaacaaaagatcgcgttacaatttttttccccatatcaccatccattgatgatttcacgttgctcttcagtctcgggactaatgggcttaaatacatttttgagctttctatattcgggccttacgtagcccaatacaagttagataatttaatggaagcttgctttacattctcaaagctgggccgattctaccaggacaaataacggttcatataactaactatgatataaatatcataacgaaaataatatctaaataaagtttattttgatcaaatcaatcaattaaatagtgttgatcaaaaagtcatgtgcatctattctatcgtgaaaactggaaagtcacgaagaaaaacaaaagaagataaatattctaatattaataatattatataagattcgaagagtatttttctcaacaaataattgaacaaatcatcaacatatctatcaaactaccatcgaaggttttgagataaatagaaatgtcttgaatcttgatgagaaccaactaatagttgcacacttgcacgtaaaaattgcgctcgtcaaaatgaaaatacgcgattaaaacaagtgattcctggtgaacgcagatcaaactgtcgaagtatagctacttcgataatttgtatgttttgacagtggattcgatgatatattctcttgttttgaaaacaaagttccaatattgttattaacgtaataacggttggtctaattcgcaaatccacaaattttatgtagcttactgttaataattaatataatatacatatgtaatatgtgcgtagtttttggggtatgagctataaataaaattctaatgtattaactacatgtacatagaaaatatttttttaaattgcagaaaataatgatgatggatactaagttgcaagctaagatgagagatctaatgaaaggtacaaaatcaaagtgataatagtacgtccagatacaattgcaactagctagataacaaaatcaaaatctaatattatataaaaattttagttaattgcaatgtgatgagatgataattgataaagtactacgacaatacgaagaacactagttactagatagatagtgttgtgataatatgtcaaggtttggatcgaccagacaatatgggaccttcacgatgtctgtctcatgtttcctgcatgccatgcattctatttactctcgtctactctacgtgcccacgtctccacttttattcattttcttatttgtgatcaatcaaacctaaagaaaatgttaggctaaattggatctgttttcttatatatcggtacgcttaaacacatataattagcgtttaaagattccttttcttaaaggtaggttcagtttacttgtaacctaggtttctcgaaagatgagatgtacttaaatgctcgtttatattttactccaaattaaatactgtagttgataacatcagttttcaaattagagacagtgtcgatgcgagtgcattcaattttcttattaattgataaaaccatattattcgatttgttttatttctttctgaggaggtttgtcttatacttgcatcgatgcatgcgatgtaaactttgtagaagcaattccaaccatggatatcgcagatactgaagtaactccataatcaatcatttacatatctatcatatacattaatattgaaagtgttttgatattggtatttctctatatgaaaaaacaagacaacccgagacattttaacttcagattatagtgtgatatcgaataccaaattgacctttctatcgaagataaaccttaatatagataaagacatatagttactaaagaagtaagttaatgaatgttgaataaaaacaccaatggtaagctaaatattaaacaatacaaaagagaaaacaaagctaataagtaagaagtaagaagctaaagagatagactgacatccatgctccctcaaccaaaagacaaaacacagtgcatcaatggcccagctgtcaccacaactctttttttttttgatataggaacttgttttgttttctattctataatatttatttattcttctttcttgttatctttttaaatcaaaacgatcgagactgaagttgttcaatttttttcgtaataaggataggaaattaattaaggatagagagcacatgaaaatacactgtatgtactgtaatggtgcattcaaggacccttcaatacgttccaaggccacatgtgattctcacaaaatggttcaatatttatgaaagttatttgtgaatatatgttaagataaaatgtacctggaccattctttctatttgtattagactatcttacacgtgattttcttactcttttgatttgacttcaattagatctatatattgcatcaaactttttaccaaattatgcgtcaagtcacaccaattgatgaggttggccttatcgaactagtggaaccgtcatatgcgaaaccaaatataagaaatgaatgaaagacctttcaacaaaattaataagcaagtagaagtaaatccaatatcaatataacaattggttaaacctaaattatatgcatccaatacgaaaattctttttttggtatcttttaatccgtttattatatttgtggagcctaagttgcggatccacttgtattccttatttgaatcattgttatcatttctcattgtttgtgactcgtgagctagaagaaacaaaaacaaaaggataacgtaattttgatatttaaagtaaaccactataaatcattgtgtgtgtgttttttcttgttttaaaagatcgaattagggagcctaacatgtttttgtctcaagagattattatcattaaaaaaaacaagtggaagtggaagttgtgtaacccacttgttgaattcttaacttcgaagcacaacaaaaagatagacgaaaaacgaaaactcgatctaacttcgacatatgcattagataacatatagaaatttaaacaatctcgttgatgaaattggtctatcaacacacgacagtggttctctctacagtagcatcaaatcggtggatccttatgaacagaaaaaacgaggagggacagaggaaggccaatgaggggtcatgcaaaatggaacttagcaaaagtaccaaaaagatccatcctctttgaaaattcatttcagccccataattatccatgacatgaatttcgatctgaatctcacaacaagtaagagatcagcttttgataacattaaagaaaaaggtaaaaaaaagaaagacgagagactgagaaaagggcaaagacctgtaggggttaagacagctaagagtgttcctcagtcgccccacaaatgtcttctctcctctctcttcagtctttctcagctctcaaatctttaaatggttccaagttcaatgctcccaaaacccacgcccacacatgcatcctatgacctttccttttctatccattttcttcccacaaattaccactttgcaaacaaaagccaaaaactcatttacaagatgagttaataaagacactaacacacaaccaatgtgaaaacagacgtttacatgagatattgttacctctaagaagtcattaatcatataatgagaacattcttgcttcctaagtttttacaagattattaacctctaagaaaggagagacacttttaacgcaataataactacatgatgttataaatataggagagagtagaaaagaatatgacagccctactaagacagagaatcatcatcgaacagtaaagaggagaatctctgaatatccactttaaactactgccctcttgtcttaactctcagaaccatttaatttttcagttattttgacccataccctttttggcctctttccctgctttccaacaccttcacacttactctagggcttccacggctatatatatatggtcccttccttaaacttgtatctcataattcacaaccagcactgctactactagtttatcattattccatcaatttattctatatagagttcttctctgtttatattacgatattgctcgaagattacatacctgagaaagatggttaaaccctgttggagaataggtgccggtatggagagaagtaagatcaatcccacaaaggttgatggtttgacatggtacaaagatcttggtcttcacacctttggagagttttccatggcaatgatccaagccaacagtgtgatggaggatcagtgccagatcgaatcagggccgcttacattcaacaatccgacagttcaaggcacatttgttggagtttacgatggccatggaggtccagaggcttccagattcattgcagacaacatcttccccaagttaaagagtaagacaccgactttttttatttcctttattgttgaatctgccaggcacactaacactggtctcacatgaacagagtttgcgtccgagggtagggagatttcagagcaggtgatcagcaaagcatttgccgagacagacaaagattttctcaagacagtgacgaagcaatggcctacgaacccacagatggcatcagtggggtcatgttgcttggcaggagtgatatgcaacggattggtgtatattgcaaacacgggagattccagagctgtgttgggcagatctgagagaggtggagtgagagctgttcagttatctgtagagcacaatgccaatcttgagtctgcgaggcaagagctatggtcattgcatcctaatgaccccaccattcttgtgatgaagcaccgcttgtggcgtgtgaaaggcgttatccaggtaaacattcatacatgataacgcatctgataacctgcacagagttttgcttcatcagtttctatgaaatacaaaagcttaagaaaatcatatattgaagcctatcttgtgtaaggatgtaaaactgactagcaaatgtgttatgacctttaaccaggtcacaagatccataggtgatgcatacctcaaaagagcagagttcaacagagaacctttgctgcccaaattcagactaccagaacatttcactaagccaatccttagtgcggatccatcagtcaccattacgcggcttagcccacaagatgagtttataattcttgcttcagatgggctttgggagcatcttagcaaccaggaagctgttgatattgtgcataattcccctcgacaagtaagttcaatgcctaacccatatacaaatacgttacatactagcacaatgcacaccaagaactattcgttaatactaataccttcacaatcacagggaatagcaaggagactacttaaagctgcattgaaggaagcagcaaagaaaagagagatgagatactcagacctaacagagatccatcctggtgtaagaaggcatttccacgacgatataaccgttattgtggtctatctcaacccccacccggtcaaaaccaattcttgggcttcacctctgtcaattagagggggatacccgatgcattcaacatcatgaacagatcttacggcaaaaacacttcctgtgtcaagggcaataaattggagccagggtcaagaaaagaactagtagtatagctagaaacaatattaagttatgagatctttgatatgttctccacaagaaaacatgaattctcatgtacccctgtatgcaaaattatacacgagggtacttgcatgcaatatcatcaatgtcaacgctggtaaaattcgaaagcgttgcaacatattggagtttaggcacaaaacagtagatagccaagaaatgtgttgaaacttaacattacattccctttataaaagttttctggcgcttcattcaaaattaacagaaagcaagtatcaacaaaagtttatctaaaatctattacagaaacaaagaaactgtgtagcatcagaagccagcaaaaacgcagtcccacgaacagagaatttagaatctgaggctctctttccttcaactgccatagagaccagagatatggaaaccaacaagtacatctatagttctaatgatgtcttacatgacaaagaaattctgaagtagcggcttgagaggtcatatgaaattaagtaacctaagaacgacacatgtttatgggatccattttgcatgcaatattcgcaatcaagcacagaacaccagtagaccagctaaatttcgtaaccaagactaagaaaaactagcaaaataggcacaactcaaaagtaatcaacacttctaatttctaactagttcaaaacagtaaaaaaatgtctcccttacttaaatatttgctgcatgcagtacaaattttcaattgctggtgcttgtgcttgatacgaacatgcaatactaaaaggaccatccacattccaatatattaaaacgaaataaagttattaatcaaactatacttaccactccaagaacctgcaacatggaaaacatcaataccagccacttcagaattcctaggtcctaaacacattgataattgtcatttcagacaatcagaactataggttacttattggtttctcaagatctcatctggtgattgctccacgaccgaacttagtaaagatactacacacatggacttctaattcagaaataaagagagaatgaagcagccagagagggactcataaaacgctagcacactacctgcccatataacagattatggagtcaaatacgagaaaaaatcgtatcaacaagagtttgcaatgcaataagaattatctggaaaaactcacctaactacaaagacggaaaaactttattgaggaaccttaggcagcgcttcctgatacagctgcctcctgatgaaacaaagagttcaacaagagatatcattagcttttctatcaattctctcattctatcagatggacgacacaacagaagttaaaagactgtttaccttgccaataatttgcttctcaggtaaatctgaagatgcatctgctgaagcctcttttgaaaacctaatgatgggaaattcacaaaccacaaaaatcaataattagaaagcatggcacagtacttcagttctcagggactagaagaatttgaggttgcatagaaaaagtacctcaatgctctagctttgcgcttattttcttcagcagaatcaactttagtctcttttccaaaacgagcgagcctagctttcttctttgcctcttcctcagtcttatcagtagtagaggtcgcagaaggaaccccaaatctgttcaaaatacaaagcgagtatgaaactcctttttctctaaacccaaccaataaacaactatcaagtacaaagaaagtattgtgacatacctatcagctcttgcttttcgcttcaattcctctgctttcttcgttccctctgagccattcaccactgctgcagctacagtaccaaacctgcaccgaaggtgaaattccttacaacataggtttgacaataagtataaaaaattccgtaaccctaattttcgaaacccctaaattcgacggaatctaacgaataaatattaaagtctttacctctcagcacgagaattgcgcttctcctcttcggtcaatttcaccgaaacaccaaacctctcagcacgtcgaatcttcttctggatatcatcgaccggagagatatccccagaatcaacaccagccgtcgatccaataccattagagtcggtttcttccttcttttcaccagaatctgaaaatcccttgacttctccgtcgagaatgtcgtcagtacgatctaactccgtagtgttgaggtctacaattttcttagggttttcaccagtagatagccctccgccattcaccaccgtagccgtgaccttctctccgttggtcgccatggaatcgtagctccgttcgaaattcgcacttgtggagattcgtaagatatctctttcgcgattttagcagaagactattgtagggttagagtcgaaccgtcgagtctcggggacttttaaagcccttcgacacgaagggtaatatagtcagattaaaacttgattcttatgggccggatcggatctaaattatagtccgatacattaagcatccgaaataaggggcaatattgtctatttaaacttgcttacaatccgggtctgatctaaatagcccggcccaaataaaaaataaaacgacatcgtttcataatttcatttttttatgatttaatcttctccaccacgtgaccacgtccacgaattatcggccggcgaagtaggaatgtaggattggaactttgttaacattcccgtcttgtttcatccgttcttgaatatgtatgatgtatgcatgtctcgtttcaacacttgttcctccttttaagcatcgttgcactttctcttagcgccggattactgagaacgaagtttagtgtaataatcaaccaaagcaatcagtgggtattactcaaagcatttagtagatgtgttttaagtgtggatgagataatgttttgcagacctctttagtttttgtttggtcgttaaatgctgcaaaagaacttaaagatctcccaaactttcttaatatatttttatgtcagtatgtgttatgtgttttgcatctttgtttgaccgtttggtatattctgtgactatgtgaaaatctacaaaagtcttcttacgatcggaaaatatgaatacaaactataaaagcatttagaagaaaaaaggttttttaaaaaaaaaagaagaaaaaaaaaagaaaaaaggtttctttggttcattaatttcacctcatatttcaaaatgaaatctgtatagacaatgacatgtaaaattttttaaatttagatacgttcaaagaaaacataaaattttgattgtatcttctgatacaaatattagtaaccactaaccagaagcttaaggtctaccagaaaaagaaagaaaagaaaggcatgaaagaattataatattttcatatacaaaaagaataattatttatacgatacgaattgagcatagatgattcggtgaggtagcatccaatggcgtggttcacagactgagctttttgaccagcattttgtttttgtccacttgtcataatgaaatttcgacgaaaacaaaaatagtttttttcgttgtgtgtgtgtcattccaatcgtattattataacattacaagcattacaaaaagatatcacagtaattaacaaaaatagttctttcaattgaaatatttagtcatctaccattttttcttcttttaaactctttttatttgatataaagaaaaatcatcacaaagcaaccaaaaaaaattaatatgattattagtattcacgtattcaactgattagacttcacgtatgtgattattagtattctcgcaaacaaaactagtagaagcttttgatcaatatctttgaccttcacaacaaaaattagaaagttcaacgacagagattaatcaaacgctgacgtacgtttacctttttctattggtagtcaccattgggtaagcatgaaccaagcctcttcctaattcctaattccaatttccattgagtatatatataatatatatacgtagtcttatgtgtttgatccatagttcctttaaaacatcatatctgcaataataatcccctgaagaaacaactcttatcaaatcctctccatggctctatctcctccgtaagatcctttttgtttactttatgaggtttcttgattagtataaagtcgttttttcttgttaaatctatattcatctccttgattttttttcctttatcaagaaaaattttcgtagaagatcgtcaggttccgctcgatgctacctctgatccacctgctctgttcgacggaaccacaaggttgtacataagctacacttgcccatttgcacaacgtgtttggattacaagaaacctcaaggtacttgttttttatatatttatggtatatatgtatgtaaattgagatcgagatgaaaaatttataagcaagatttgttgatttgtttgacattggggagttttagggtctgcaagatgagatcaaattggttcctatagatcttcctaataggccagcttggttaaaggagaaagttaatcctgcaaacaaggtgccgtttatttttatgattaatccttataaactaattaacgttctttcaaaagtgacaatagaagactctaaaagattgtgataatgatgtatgtaggttcctgcccttgaacacaatggaaaaatcactggggagagtcttgatctaatcaaatatgtcgatagcaattttgatggaccttcactttaccctgaggtatgaccttgttggcatgttatagacttgttcttgtcatgtaagtaacaatatttcgatgagatgttgtttttttgaaatttttggtctaggattctgcaaagagagagtttggtgaagaactgttgaaatatgtcgatgaaacatttgtaaaaactgtgtttggctctttcaaaggtgacccggttaaagaaacaggtaaggttgattttcttttgtgtcttgtcaattgttttgggcatctgaaggctgaaacatgtgtgtttttgacgcagcatcagccttcgatcacgtggaaaatgctctgaaaaagtttgatgatggtcctttcttccttggcgagcttagtttggtatattagtcttatcaaaatgttaagtgcgaatgaaccttttttgaatgtgtcactatggttacaaaattactcgattttgtttgctaggttgatattgcatatatcccatttatcgaacgctttcaagtcttcctcgacgaagtttttaaatatgaaattataatcggacggccaaatctagctgcttggattgaggtacacgtgtgatatatgcatgtcaacatggtaaaacttttgtatgatttagctgcatacttgattgctttacctcaatgtgtgtggtgcagcaaatgaacaagatggttgcatatacgcagaccaaaaccgactccgaatatgttgtcaattacttcaagagattcatggtaatttcgctttttataaacgtttaaacttttgtttatttggactcaaatgccctttttactttaatgttaggctttgcaattttgtcttaactcaatttccggttaacgttctaaaacaaaactaaccgattccggtttttctttatttgcagtaaaagtaacaaatctgttggactttggtaacgatgccatgatggcttatgaagaagaaatattactacttgagagtgttataaatttctggatttggtattgtacattttgtgataaataagagatatttggtattgtttactttcattcatcaaagagagagacatggtttattccggataatacaaatgtcaataataaaatgggcttaataccttattgaataccttattgaattgtatcaattacggcccattatgagttatggagttcccgacaaagatcacaaaactgccacgtgtacgatgatgactgtaatttcgagaaacgtaaacgcttccacacaaaaaaaatccgtagtttcttctacagaatcagatctttgtatcgtcaatggctccttcttttatgtaaggatctatgttcttatccggaatttagagtctttattgagtttgatcgattttgggattataagtttcgcaaaattcatgttttttacattaagtctattcgatttcagctgtattgggaatttaagtttttctgtggcttgattctattgagacagttttgtagaagatcgtccagctccgcttgatgctacttctgatccaccgtctctcttcgacggaaccacaaggttaatcttcaatgttgcttcttttatgcttttggttttagctctgttctgtagtttattggatttcccttatgtcttaacctcttattgttttgtgttaccaaaggttgtacacaagctacgtttgcccatttgctcaacgagtttggatcactcgaaacttcaaggtttaacagcttctcctttgtactagtctctcacctttaacaatattttggtcgtattagggatatttgaagccggattggttatcttgttgaagtttgttaatttgacgtctcacaaacttttatctttcttgcatatgtgtactctatttataaagtagttggattctttggttggtttccggtggttgtagggtttgcaagaaaagattaaacttgttcctttggatcttgggaataggcctgcttggtacaaggagaaagtatatccagagaacaaggttttctatttataactcacgagttcatatgtgacattccacttttggttatgacttagtggaaacttctcgttatctttttcaggtgccagcgcttgagcacaatggaaaaatcattggggagagtctggatttgattaaatatcttgataacacttttgaagggccttctctttaccccgaggtaacacatcccttataccgagtatggtttcccttcattattctctgattccactattcatttccctctctaggatcatgcaaaaagagagtttggcgacgagttgctcaagtatactgatactttcgttaaaactatgtatgtgtcactcaaaggagacccctctaaagaaaccggtgagactttaaactcttcaactgttttcaggggtgaaaaggcgacaaaattatgaccaaaaatttcatgttcttgtttcagcacctgtgttagattatctggaaaacgctctgtataagttcgatgacgggccgttcttcctcggtcagttaagcttggtataagcctcactaaccttctttgagatcatacatttcgccttttgtttgtcttaattcttatatggacggtttgaattctttgtttttttcaaggttgatatcgcctatatcccgttcattgaaaggttccaaactgtactcaatgaattatttaagtgcgacattactgccgaacgtcccaaactatcagcatggattgaggtatatatatatgcaatcttcattaagtcagaaaagattacacttatcctcactagggaatggtacttaagcgatcggtgttatgtttgcaggaaattaacaagagcgatggctatgcacagacgaaaatggatcctaaggagattgtggaggttttcaagaaaaaattcatggtaagtcatacaactaggatataatttttttaactgaactaccacatgattttaatggatccaaatgtgagttgcttcatattttcttgggggttagaacataaaagctatatatgcctttaagcatctggttgtttaggtgtgaatgttcgttgctttgggttagttttctgttttgggaatgaaaaccgagtcggtttagcatctggctcagagacaatctcatctttctccaacgagcgttttgcgacttagacgttttgaaagcaaagaccatgcactaatcatcagctagcctattactatggccaaatgacttgtttaatactttctcggttaatggtctatactaaatgtgagtctaattccggttatattcttgcagtaactgtaagcaagcacgaagcagtaaagtgtatgagaccaaaccaccttgtacgaacaggtggtctttggatatgaagaaataagatgtgtacttgaacctgatgatgcaataagatttgtactttaagcagcaacagcttaatctgtattctagtgttgatcaaattatcaaccattgacattgttaatatattactgtatgatagtaatactatcaaaatctcacacattaagaaccagatgatgcaataaggataaggtgtatagttaacttgcagcaacagcttgatctatatttgactgttcaccaataatcaatccttgacattgtaatatgatatcaatacaatcaaaatctcacacattaaagttttgaaaactatagtactttaatatttatacaataactttggaatcgaagcagacatcctcagtacaataatgagaaattgtcacatttgaaagcaagcgctcaataaacattacattaaacaacatcacctataacaacattataaaccggcctctatatgaatctatctcttcttacacatatctacaagtagctcttaagccatacattcacacttagtctgaaaatcatccacctttcctctccaagaaagacagcacggaatgggtttaagctacataacttacacagcattgcggttctcgggattattttcagaccctctttgatctaggtggagtccctggagcgaaaagggatccttggactggctgagccagaggatcaaacttttgggaggcgaggtaagaaagtgcagtgacgacgtcagcaatgagaggtctaagatttggctgctcttgtacgcacatcgctgctacagcgagtgcttggtataaccctcgcggagggtattgaccttgaagcattggatcagccatctgagagaatttcctcctgtctttaaacaaaggccttgcctgacatagagagcatttcaaagaatacaattagaaggaagaatccgcagagaaaacaaagtttgttcccaatttgtttttttttcttacccatgcgactagattctgttctccagtagatcttgaactgtctattgctttccgaccagttataatctccaacagaacaacaccgaagctgtaaacgtctgatttgagtgttagctggcctgtcattgcatactcgggagcacagtatccgtatgttcccataacccgagtggacacatgagacttgtccccaactgggccaagtttagccaacccgaagtcggatagctttggaaagtaatcatcatcgagcaaaatatttgagcatttcaaatctcgatagatcactggaggcatggttttgtcatgcagatactccaaaccttttgcagcaccggcagctattttcattctggtgttccagtcaagtggctgcttaccaggtgaaatgtctgaaataaaaaaagcatcacccgattgaaatttaaagacttctcataggcatgtgtgatcttagaagcgcataccgtgcaaatgatcttcaagtgaacctaggggcatgtactcgtagactagaagcctttgatctccatcagcacaatatcctattaagttaacaagattcgggtgatgaagaagactcaacatgagaacctcgacgaggaactccctgtttccttgtaaaccattatgatcaagttgcttgatagccgctgtctacaaatgaagatataatgacagtgagctttcactaccaagaagattcaaaaggttaaaaccaagcaaaaaaaagggaaggaacctggctagtgctggccaagtatcctttgtaaactctaccaaatcctccttctcctataagacattcttttctgaagtttctagtggcagtagctaactcagagaatgtaaacgtttgtgccacaatgtgatcagagcctttacttttggattcactcaaggacgacttggccctagatttctctacaaaaaaagaaagaaaagaaagcgataagaagaaataattaatcaacacaagctgagcataattgtctcaaggtcaataatcaacaaattaaagttctaagaatatagcaagatacttaaggatctagcaagtcccatttaagagtttaatccacaacttccactggagagcaataacaacaattaacaggaaagagacatgcaataacacatcactgtcaaaatactaacacaggtgttacagagtagtcaaaagctagtgaaatggaaggaaaaaagcaatctttaaacagaaagtcaaaaaccctaatcagcattagcaaacgatgatggctcacaggaatcagaaagttttagcaaaggataaaaatttccataatttagtaagagaaggttaaacccagaattaaaattggacaaagactataaagagaaattacctgaagtagacacagaacaatcagaagacttcctgtcgagtttgtggtcaccgttcctccttgtcttattcctcccactcgatttcccagaacacgggatccaacccattaagcttctcacgatcttcttcttcttcaaatgattcttcgtttcgattgtgttcgatgatctcaaaagcgagagagagagagagaagcttagagaactttgaaatgtaaaaaaagcacgccaagccaatcgctggatttttcgatttttctcttttgatataaaatatatttttaaaacaatttaatttttgtgatacaaattaatgtgaatgggtttgactttgacaaataaaaattaattgtcaaagaaaaaaagacaaacaaaaattatattttatcaaagtagtatcaactaactacccccatggaatttaaatttcttttcaacacacaaaaagagattatttgattgaataaatttcttgtgttgtaagttgtaacaatattgaaattgaactttaataagcaacaatcgtggtcaccattatagtttccaatcatttgggtataagagattgattattcctattttaaaatggtgtttatcaaagacagattttttctaagaatatatatatttacgatataagctaaatgatattgaaagagataatgttgatacaatacgacaccgtactatgcacggctccaaaagcaagcttataccaaaaaatatacagagaaggggttattgttttacaagtttacaacatctacaaagatttcactacatcctgaaaccaaacccttcgtcctaatttcacaaaccagaccagacaacgacaataataacaaacaatcaaatgtcgtagtgtctttgtttcgtgaatagtagtagtattatcaaagaatcagactttgaagggaaaatgttaaaacatgtgatagatatatatatataagatagatatgagcacattactcatgtttttgggctgagaaatagtgggttttgttgattttccgttagctatcctcaatgttttttatgtcgttatcatcagttgcagcggctgttttacgcacaaattggcctcgcactcgagggcgttgttctgctagttttttccggctttggtatcgtacctgagaaagccaaaaaaaaaacatttttgcggtttgcatttgctttcgcaatttacaagaatactttttttttcctttgttatagatttgaccgagaatttaccttctttcggaagcacctctcttttctcttctgacggaactttgtcaaagcagcttccctttgagagatcttattttcatccgccaagtttccgctaccacttccacttccgcttccactaccatcgccatttccatttttgccagcaccattatcacttcccatattcattcctccagcattcataccgttactgcttccatatggcccattacttccatgaccactacctgatacacttccattcacactgtaattcactgtgttgttgttaccttcaatcgtttcgttgtacacatttgaggatccacattgtggcggtagcttcttcctctcagcgacatggacaaggttataggaggcatgattattatgatgatcacagggtaaaggctgaaacgatgaatgcttcactgatgaagatcctgctgagcttacttttggagctcctggttttgtgaaagcgttgttctcagtcgtggaactcatatcaaagttattgctaccgacatgtgagcgatgattatgggggagactctcattcatgttcgagtgacaatcatatgctgcttcagtcttttttataagatcctgactattattatcctgaagcgaagtgcttcctaagttcccaccagaaatcttattggcatttgaggctggattatacctgcacaagtccaacagtcgatctcatagttcttcaataaggcattcaaaaggttgtgtacggaagaaaaaacagaggtttgattctaagaaagtaccttgagaaagctgagccctctgaacgcctcagcacattccgatcatccctaactagtgtcccatcatctttagttcctctatgcctctttgaactatgttccacgtgcattagctcttcagaaattttaacagaagcttcatttgtatctaaagttttcaagtgagtgttaggcgcctcaggttctctgttatcttgaaggtggctagacatagctttgaaactcgagcctccatcttcatgcatttgtttacttgaaggactttcgctactgaggtccaatggtccttttccaactttcattttccatttactagagctcttttcaaacgaattatcctgtctcataatgccagtagttttagataggggttcatcttttggctccagggccagatcacagtttctacgaatgctaatctccaagtctctacccattgtgacatcttctgcaaaatagatgaaaaacattcaatatcatgtttttgagtttcagtataaagaagagtatggaagaaactaagagatcacagtttcctttctttaccaaatttatcatcatgttcttgagtctccttctcagcaggtggtgcaaccaactgattacttggaaactcagggttagaatgtaccacttgggcgcaagtgctatcaactcggtcccatagagataccgctcgtggactgtcatcaacatccacagcttttttcgtccaagagctctgaacaaaaaaaggtatgtcaaaatcaacctaggttttggagataaaccatgtgcaaaataaaacttcaaaatgaactagaaattttcacccagtttatcactgaatagatctaagttaaacatcattgagttctacaattggttagttaagcgcttccaccatttataagcatctgagtgcacatgcgaagttcgatcatccgacccctatcatttgtggttaagaaatttttaaaaggatagcttctcgggtgtatatttagattatcggtattgcacattcgtcttacctgagcgccactcccatcactacttccatcactagcattcaggccaatgctcccattttcattctcatcactgcttcctgaatcttgatcagattttttaatacttttcgatttcacagacttttgagtttgatgcgttccgctctcacttccactaccactagactgaacaagaaacaaggaaaaccatgagaaaccaaaaagtaagataccaatcatgtggaaaaaaaaaaagaagataccaatccacaattagaccatgaatttctagtttactacttatcaccagttgtaccaacaggttttcagattaatcatatatgagcaaggacatacactttggcatcttctccaaacatgctgccaaaggatcttaagctcattttttcttattggcttaacaagaaagtcaacagctcctttcgataagcacttaaagaccagccccattgagtcatgagatgacatcactgcaacacaaatctcacaggggaatgtagttaaaagcatctactttccaacatacgctagagaagactcaacaaatcgtgtaacttcaaaagaaagagctcaatgtaaaacgaccaaggaaaaagaactcactgatgacagggatgttccgacgagatttgtggttcaaaatcttgcacaagagaccgataccagataagtaaggcatgatcacctctgttagcacaatatcaatatgattgtttagatcttctaacaccttccaagcttgtatcccatttgacgcctcaacaactgccatgacagagttaataataatcaatcaacaaacagaaccgaaacgggtacatatatgcgctatagattaaagttgggccataggcttcaaaactgaccttcatagctacaattgcgaagaagtgcagtaacgatataacgagtgcagtcgtcattttcgacaagcagaactctaatggttctcacatgaagaaacctttcccaacagacagttgccgctgtttgttgcgacaatggaatttgcagtccacctgaactcccatttctcacatccatagtaattccattagttttctcttcttcactatgcttctctgtccgactctcaaccctatcgaatttcgtctctccggtctttcgatcagtgattgggtaacgtgaaccctccccctcctcattagcattcatcacaccaactctgcttcgctgaattcaaatgatcaaaatatcaaaacacagccataaaccctaatttcgattattgcaatagctagaggagttagaatcgtacaatatctcagattaacagaaaaaagagttgaagaacgacgaattctcaaaaaaccaactaatcaagtaactttttgaagaatcatcaaaaaatcgaatctagacaaattacatcaaataaaaatccaaccatacaaaagcatctaaattccaagagagtactgatcttacaataatcaaatactagaacgaagaatcgagctccagaagttgcatcaatcaccagaaaaatggatctagcacaatcagctaacggttgggaaatagaaacaaggaattcaaatcgataaacagaattaagaatcgaagcttcttagaactttagaaggaagataaacacagtgaacaatttttgagattatgaggtttttctgtctcccagagagtggaaatcggagacgaccataagccaccgatttttatttttccggagatagatagatattagaaagatttgtctcgggccaacaaaaaaaaaaaggaaattaaaaaatcgtaatatctgacatggacaaaactagaggtcccgaacgttcgagaagttccacgtcagagcggatatttccacatcatatattggcgaggattagtgacgtggatggtatatcaaaaacagtcgttcaggaggctagtggcagattattaagatctttttgaactgacacgtgtaatggtgggtaaggaaaacgtcaagtggtaaactcatctggaccgttgaatagattttggcggaagagactagcgtttaaagattttatagatgtagttaatattgggcttaccatatgggccattcaaaaagattttaacccaataaaaaatattcaaaaaactatcgtcgacagcagggttcgaacctgcgcgggcgaagcccaatagatttcaagtctatctccttaaccactcggacatatcgacatctcgttaaaagcacaattaattaacttaataaatgcgtttctaagtctacccctttagtttaccctagaaataacattcacgagatacgttgacctaaagggtaaattttcccgccattgttagtaccagaactctctgggccgccgcgtctccgtcgtcgtggctatctacagatggcggataagaagaagcgaaagcgatcaaaagatgacgaggcggaggaacttcctttcaaaagcattctggaatcagacgacgttatcacggagcttctcaaatcgtatatttcctcttctatcaaagccgccgccggagccggcggtgcctcctcctcttcatcgaaacctctaaccctagctgacctctctctatcatcttcctgtcgtgaagtcgcagatctctcactctcctccgtgcagacagagatagagacagtcatcgtccagatcgcccgttctattctcgccggtgatggcttctccttcagtgttccttcacgcgccgcctcgaatcagctgtatgttcctgagctcgaccgtatagtgctaaaagacaaatctaccctccgtccatttgcctccgtttcttctgtcaggaaaaccaccatcaccactcgtatcctcgcccttatccaccaactctgcctcaggaacattcacgttactaagcgtgatctcttctacaccgacgttaagcttttccaggtaggttcttcttgctttcaattttacttgagatgatactttcttcccattaaatagagaatgatagtcactgttttagatccagctcttgtaaacctgaatcgaaagttctagcattgattctttgtagtttcgattttggaaggtttttgaaccaattcgcaaccttactgaattttcaggaccagacacagagtgatgctgtgttggatgatgtctcatgtatgctcggttgcacaaggtcaagtctcaatgtcattgcagcagagaaaggtgtggtggtgggaaggcttatattcagtgacaatggagacatgatagattgcacaaagatgggaatgggtgggaaagccattccaccaaacattgaccgggttggagatatgcagagtgatgctatgttcatactcttagttgaaaaagatgcagcttatatgaggttagctgaagacagattctataaccggttcccttgtatcatcgtgactgcaaaaggccagcctgatgtagctacaaggctcttcttgaggaaaatgaaaatggagcttaagcttccggtacttgccttggtggatagtgatccttacggattgaagatcttgtcggtgtatggatgtgggtcgaagaacatgtcatatgatagtgcaaacttgactacgcctgatattaagtggcttggaattaggccgagtgatttggacaagtataagatacctgaacagtgtaggttgccgatgactgagcaggatattaagaccgggaaggatatgctagaggaggatttcgtgaagaaaaatcccgggtgggtcgaggaacttaacctgatggtgaaaacgaagcaaaaggctgagattcaggcgttgagctcttttggtttccagtatttatcggaagtttacttgcccctgaaactgcagcagcaggattggctctgataatcaggtttcttcctgatcaattagatagaccaacaagtgtactctacaaatttcgaatttttgataatgcaattgcctgtttcttagcatgtgaattattattgcaaagatcgaaatttggttttaaatttatggttgaatctacacagaactggaaagatagctgtcagatgattatttagaagacaactcttttgtttatttagaagattgtatacaatatgatgggcattgagatgatatgcaatctttccccattcttttctgcatatggtttgaattagcataaaatacaatgatgactgattagtaatgtaacagtcggaggcagctactttctgcgctgcaaccactgatacagagacgcctttgtaaccatcaacctctccagaatcgcaggtctcctcgttgaggatatactaacaaatgacttagtgttctcttggtctgcatcatctacacagtgtgcatcctgtatgatatttctttgtccagcaggaagaaccacaagagacaattcatctcgtagaagcttcactagcgcttcttgcacagtaatctcttgctttcctgaaacggtatttgcttcatcggttcctatgataatcaacacatcatctattacaacgtcacctgcaaaggagattcagttagttacaagtgttttttagtctctactggcataaaattcaacaacatttgatttttttgtcctaacttaagctgcatgtatgctgttcccgtttgaaatgtttaccgagtcaaaaagttactacatgagagagagaatgtattggtgtcttgaatcttacctcgcatatagtcttccttgatcattcgcaaaactgctagaacaacaagtcgagcctcaatctgtaaatggatgcaaaagtttgacatggtcatatcgctgaaagagttaaattgataggactacaagcacatatgaatatttcattgtctccagtaacttaccttggtaagtccttgaaggtcaattgcaaggtttccagctgttctctcttgcatgtgtgtagctactttttcaatgagtaggcttacaggtctccctgcgttatctccttcttggtcgcttattttatcttggctctgaccgttttcctgtatgactccttcgcaccactcctcaataagttccttgagaaagtgatcgttaggtttgtacctgcagtgttgtggctttgtttgtgagtaaaaaggaatgcctccttacttgttgcggaaccatcaggaagagaaatgaaagtagaccataaaagtaaaaattgttcataccctgcatttcgcatgtcctgatatatagccaagcattgccgcacttcaagtaaagaaccatatttgcttcgtgctttaagaagtgtattatatgtcacctgagaaacaattttctagactgagaaatgctgaaataaattttgaaacggcttccatctttaggaaatgcattccgtcaatttagactactctaataatagctttggactttatatgcataattttatacacatcactgataatttcagtctgctgattctctcgaaggtggcgttagtagctgaaagggacaaaaagaaacaaagcaaattcgaggaggagaattacccagtttggcttaatctgatatctcctcatctcctcaaacaaagaaaatgccaacttcaaacatttattttccgcacaaatctgcaagataataaggtctggatcttcacacctttgagttgcacaataattaacaacaaagcagaaatgttggcaccactaagagagagattaataccttgattgctgttgtgtatgcaacaacatcaggtctggttccagccgaatgcatagttctcaaaatctgtgctggaaaagaatttctatcagggaacttatcatattactgcaaatcccatcattgatattatgaatgtatctggaagcttataaacaaaagctggagaagtatgatcaccttaatgctatatctctgttttaggaaagagatttgaatgattaattttaaaaaaaaaatcaagagaaaagttaactcacccgtacagcaccttctacatcgcctgaacctccacacatatcaatcaaagtcgaccatgttatttgattaggtgaaagacctaggctcttcatctcatccatcaattcttttcctcgatagtaatcagtaccacaggctttcaagagtatattatatgtagcagttgttggcttgaagcaaaatctctttgaagcttggatataaggtgaattagaattgcgattcaccaaagacccaggaccattatttttcaatatatttgggctggaagtgcgacctttactaactatgtcatctgcatataaggattcattaacggagcttcctttccaagattgaaaaagacgaaaagctctgtcatactggcaagcttcaacgcaagcatgcagtaggatgttgaaacattgagaattaggctcgcagccagatgcaagcatttcttcaaataggtgatttgcctgctctactaaacctgcattggcacatgcactgattaatgatgaccatgtatgagtatttggggttacaccaacagatttcatatcatctttgactttgagtgcccatttccacatctttgcatctgcaaaaacctgatcttaagacattattcagagacttagggatataaaagcaaaaactaatgataaacttagttttccaaaaatactgatattgtacctttataatagtacaatatgtaaaggcgtccaacttcaacaatccggaagattccattcgttttgcttctttgtatatatcctgggcaagatcaacccgtccagccaggcaacatgttttcagtagtatgttgtaggatgtcatgtcagctgtaacatcaagtatctgcccatgacatgtagagtttcaaggtcagtccacacccactcctaaatctaaaatactctctagacaattcaaatacttgtattcaagagacagaagaaagaacatacctgcatattcttgtatacttttagtgtgtacccaagatcatgggaattaacattcattagactgttaataacataaatatttggcttaatgttttctttgagaagatcctgccacaaaattatgaattaactacaaatctcaaatgcaggatggcagacaaaatcgagcgtaaaggatacttacgcaaaaatacagtataattagggaattacctcatatatgtacctcgatttaacgtaatcaccacacaggccacaaacatctatcatcgttcggcatatatacatgttaggagtatccaaaatctgtttgcaggcttcatatgctgtcataacagagaccatatctcctttctttccgaaaccatgaataattctacaaagcaataactctgtatgcggcaaaagacatgcgtatctgcattcaataatcatcaaatcgttagcagaacacactacatccagcattcttgtaataactttctgaatttgaaaaccattaacctgaatcgttatgtgggaaacaaggcttacctaatagctaattgaggattggaaatttcaacacaactctttacaacatcaaaaggatccaccaactctttgattttgaatccgagacctgaaataagaagcaggtaatcaattcaagagttcatagtcacagtgtaacagcaagaattgatatagtatttaccggcaagtatctccattagatcaatagctttctccacttgcacagagttagccattgctcgaaactgtttcctcattaatttcacagacgaatcatcgacaaggtccaatggagcaattcctaccttctcaattctcttcaaagtgtaaacgacgctctcaatcttaccttgtcgaagattcgacgaaatccctttcgataagagatcataatcaaccatggaagcgaaacgagccacattagctccggactctgcagccaaagtctcggcgatgagagcgacgtcctcaattcgaccatcctcagctagcttcgaggcaaaatcagcgtaatactcaagcgagccatctggaatccatcttacgacattggagaagtggctagagagagaatgagtcgcggagactgaagcaggagaaggtgaatgttgctgcggtagtgacggaagtagcttggtgaaagaagaattggatttagttttccggttggactctggtgctgtggcgtaacagcgacggtggtgatggtgaggattggttatggcggaggaggagccaaagacaataacaaagtctctcattcctcgccaacggttaggatcatcatcgtatcatcattgtggctcagtttttctggttttctaatttcatgtaaatcaaatggattggatttgaaaggctatttttacaacttccacaccggaccggatttgtagtgttaaaatacaccggtatatataaaccgatttggtactttgattttaaattttaagaaataaaataagaaaaaggagaaaaatggatggcctgaaattgcaagcgaagcgtctccacatattatacaccaacttcttgcccgccatgtggatatcgtcgtcatttctctctctaaccccttctctcttcagtctctctctctctagacgatctctatcttgaataaaataccgataatgacctcaaccaatccggtggtcgccgaagtaataccggcggaaacttctacagatgctacagagacgacgattgcaacgacggaagctggtgaagcaccggagaagaaggtgaggaaagcttacacaatcaccaagtctagagagagttggactgaaggagaacacgacaagtttctggaagctcttcaattgtaattttaccgcgctctttttttcttccaccagctatttgattgactgattctttgtgtttcgagctctaatttatagctgaattttgcgtaatttcgcgtaatttctacttaatttgcttaatcagatcgaagtttggttatgtggtagatcatctggagttttgcgtatgcaattggattttgcagaagcaacaatgtcttctttgatttgttaggttggattgtatattcgatagatcagaatttatattaatcgctgatgaatgtttcttctcataaaaccgaagtatggtttaagcttatcttaggttgccaaaatgattgagtagaggacttggcatctggtttctgcataaatagtggtattttgcagaagtcgtatctttctttattaaaaatgtttaacatgagaactgaaaaaacttactacaagtcagcttttagagctatgcatgaaaccaatttccaactacagtcctaaactacaattcagattttggtaatggttcgttacttccacatattacattgctcttttgtgtgtgtgaaaggcttctctctcttttagaaaaaagaatcttactttgtcctgacaattttctcgtgtccttaggtttgatcgtgactggaaaaagatagaagattttgttggttcaaagacagttattcaggtttgagatcagcttctttggatttttggtttaatatacaaccttggcacatttccccactcaatcatcctgtgcctgtttgatttactgcagatcaggagccatgcccaaaaatactttctaaaggtccaaaaaaatgggactttagcacatgttccaccccctaggcctaagcgcaaagctgctcatccatatcctcaaaaggcatcgaaaaatggttagttctattgtaatagatattactttgggttgacagatggagtaacatgtaatcaatctgatttcaactcaaatctgcagctcaaatgtcgcttcacgtttccatgtcctttcctactcaaataaataacctgcctggatatactccatgggatgatgatacatctgcattgttaaacattgctgtaagtggggttattccaccagaagatgaacttgatactctttgtggagcagaaggcatgcgttctcatctgtactcagtttttatattttgctttggtagtctagtcactctatcttctgaagttttcatatgctaaatgcggcttacatatcattgtttcagttgatgttggatcaaatgacatgataagtgaaactagtccttcagcatctggtatcggaagctcaagcagaacactatcagattctaagggtttgagactggcgaaacaagctccctcaatgcatggtaattatctgaacaattgagggactatttcttagttttcattttgtggtggacgctgttgtaatggttgctttgcaggtcttcctgattttgctgaggtttataacttcattgggagtgtgttcgatcctgacagcaaaggccgcatgaaaaagctcaaggaaatggatcctataaatttcgaaactgtgagttggagctttacttgcctttagattaactgatatgtgtgttgcagcatatcaatcatttagtcttcttctttgagttcccgaataaattcagctgtgtgagaagataaatataaagatcagtacttgcaatatatagattcacgagttggaaacaccaaaaagccaaagtaccatgattctatggagatgttggtcaaataatgggattgttacaaccatgagtcagttttaggtgtcatggtacctatttgtagctgtcagtgattgttctttttcctagtatccgtcactaatcacagtttttcttgcaggttttgctgttgatgagaaacctcacagtgaacttgtcaaaccctgactttgaacctactgtaagttataattttatcattacttctgtgctcgttgagtatgtgaggcacatttgtcttttcgtgataagaatgagtgagaaaaagtctctaacagctaacaaacctacttactatctgccttgaagtttaactatagaaattaagactagttcgcctttagtgtgttatgtttttaaccgttccaatgattaaatgaggattgttgtgctctatgagatataatctaaccataatttagtctgaatatgttgatgctgcagaggaaggtcatgaacacttaagctcttagctgtttgtgcactcaacaagttatatatcttcttgacgacttcttgctcgcaacaactctctaccagctatcaagtaagtttggtgttataccgcatccctccgacaccaatataaaacactataataagaacgttcgcattgacttaatagattatatcgaaacctaacaccacagttcactaaggttttcaccttaatgtttctcatttgttactgtagttattgtctcacatgatcgaacgtcataataagaatgatctgtagatcataactgttatattctcagcgttgctgctattattctgattacactacccttaaggtcttaagaatattgctcttacggtctaccaaattgctattgatctctgtatatggtggattgtgtcagatgcattctacggttgttgtctgaggagaacataactgagtcgtcgtcacaaacaagaggaacatatgcagtttcggtcagaaccagtcgtgtgaatggtagatatatgtatgtgtgtgtagaaaatggttaccaattgtatcttctttttgataattattttttcatgccttttgtaatatgtaagtttctttacctcgttctctgattggttattttctggttatctgtttaaccaaaagctatgtaacacagtagcaaattgttacttaactcggaagtgagatacataactctgttgtattgcacttgtatcaagcgttaacgtccatgattcgtctctgttattgtcaataacaattgttcgaaagccaggttaatggtaattaggaaattgaaccgtatcggtatggttttagcgggtctttagacttttctaattgatactgagggtttgcgaattttgtataaacagttgaacactaaacagagaagagaagcttcgtctctttaattatcttcgatttaagagattctttcgccgtcggcgaagatgctacagcatcagatcgtacaatctccggcgagattagggttaacaggtcctggctctccttccgtacaaaatccgacgcctactcgtcatggccatccaacctcttcttcatcttcccaatctcagcaccaacagatccaacaacagcctaatctacttccttcctccaccgtcgccgccgcttcctcagcctcagcttcggcggctgtttcatcctccgccttgctatcgctccttcctccattaccgcgagctcaagctcttctccagcagatggcggttttgacatctaagctcttcgacgtctctcccaatcgagctatctggctctcagctttccgtggctctctcccttcgttcctctcctcacactcgttaccacctccgccgccgcttgaaaaccctagtccttcatccacgaaggagatcctctctcaattcaattccctccagactcagctcttcgaagccgttacagagcttcaagagatcctcgatctgcaagacgcgaagcagaaggtggcgcgtgagatcaaatccaaagattcatctcttctcgctttcgctaacaaactcaaggatgcagaacgtgttctcgatatgcttgttgacgactactccgattaccgcaaaccaaaacgaagcaaaattgaagaagatgacgaagacaatgataatgagtcttcttcttcttcaaccacagtttcgtctcagctcaagttaaaggacatattagcttacgctcacaagattagctacaccacatttgctccgccggaattcggtgcagggcaagcacctctccgtggtgcattaccaccagctccacaagacgaacaaatgagagcttcccagctctacactttcgctgatcttgatatcggtctgccgaaaacagtagaaaacatggagaagaaggttgaagcactgattgagccaccaccaccaccagaagctatggatatatctgctattcacaacctgcttccgccgaatatcgcagttccttcaggatggaaaccaggaatgccagtcgaattgcctagagatttaccattgccacctcctggatggaaaccaggcgacccagttgtgttaccgccactggagtcaattgctgcacctagagcagaggatcatcaacatatgagaccttctcagggactccacagaccgcctgatgtcatacaggtccgagctgttcaacttgacattttggaggatgatgatagcagtgattacagcagcgatgatgcaagctcagatgatgaggattaatcaacattgtgattgatggttctctgtaaggtaatgatttgaccaatgttactgctaattcttgatcaagtttgattttctacttggtttcgttttgtttagcagtgcctttatgtggatagatgttagtatatgcttcatcgttatcagtatctttgatgtatcaaagttgtttcttacgaaaaccctggattctaattcagtttacagaattattggttatcttttttccagaatcattctttagcttcaaatttcaaattattagtaaaattcagaatgttcaactattggagttatgcaacttgacattttggatcgatctctctatacgacaaagtaaaatccctcttaggtcatacatacatatcagaggctctttctgcccatttctttattgtacagtttattgttccatttgggcttctaataatataatgggttgacaaaataagtagtagcccatttagatctaacctgttgaatctggactagccacgtggtcgaatataattgtagggaaataaaactaaaattgtgttcttggaacaaaaaaatataataaaaaaaatctgacaaaaatatccattcatttctcttcttctttcactctcggttgcctcctggttcttttctagtttctactactactactacctctaatggcggacaagctagctcttcctcttctccttccctgcactccttcctctaaaccttattctcacgaccaaaaccaccatatctctcggacgccttttcttactacgtctctttcgtcaccacctcctccgcctgtagagcctctcctccacgatgttttccttcaccagaaccctaattccagacaacccatcagctctcaaacatctagaaaccgtaaccggactcgaattggcaagtcacgtgaccctaacctcggtaaaccttggtcttaccatggtctttctccacaaggtcagcaagttcttcgttccctcatcgaacccaattttgattccggtcaattagattctgtactctctgagctattcgagccttttaaggataaaccagagtctacctcgtcggagttactagcttttcttaaaggattaggatttcataagaaattcgatttggctctgcgtgcttttgattggtttatgaagcaaaaggattatcaatccatgttggataactctgttgttgctataatcatcagtatgctaggtaaagaaggcagagtatcttccgctgcaaatatgttcaatggtttgcaggaagacgggttttcgcttgatgtctactcttatacttcgttgatatcagcgtttgctaatagcggaaggtatagggaagctgtaaatgtgttcaagaagatggaggaagatggttgtaaaccgactttgataacgtataatgttatcttgaatgtgtttgggaaaatgggtactccttggaataagattacgtctcttgttgagaagatgaagagtgatgggattgctccggatgcgtatacttacaacactcttataacttgttgtaaacgaggctctttgcatcaggaagctgctcaggtttttgaagaaatgaaggctgctgggtttagttatgataaggttacttataatgcgttattagatgtttatggaaagtctcatcggcctaaggaagctatgaaggttttgaatgaaatggtgctcaatggattttctccgagcattgtgacttacaactccttgatctctgcatatgcgagggatggtatgctggatgaggcaatggagcttaaaaatcagatggcggaaaagggaacgaaacctgatgtttttacttatacaacacttttgtcagggtttgagagggctgggaaggtcgaatctgctatgagtatttttgaagagatgagaaatgcagggtgcaaaccaaatatttgtacttttaatgcctttataaagatgtatggtaacaggggaaagtttactgaaatgatgaagatatttgacgagatcaatgtgtgtggtctctcccccgacattgtcacttggaatacactattagcagtctttggccaaaacgggatggattcagaagtatcgggtgtattcaaggaaatgaagagagctgggttcgtacccgaaagggaaactttcaacaccctaatcagtgcgtatagccgctgtggttcgtttgaacaagctatgactgtttacagacgaatgcttgatgctggggtcactcctgacctttccacctataacactgtgttggcagctttggcccgtggaggaatgtgggaacaatctgaaaaagttcttgcagagatggaggatggtcggtgcaaaccaaatgaattaacttactgctctctacttcatgcatatgcaaatggcaaggagattggtctgatgcattctctagcagaagaggtttattctggagttatcgagcctcgagctgtgcttttgaagacccttgtcttggtttgtagtaagtgtgatcttttgccagaggctgaacgtgcattctctgagctcaaagaaagagggttttcaccagacataaccacattaaattccatggtctccatatatggaagaaggcagatggtggcaaaggcgaacggagtcttggactacatgaaagaaaggggtttcacaccaagcatggcgacctacaatagcctcatgtatatgcatagtcggtctgcagatttcggaaaatcagaggaaatcttgagggaaatactggctaaggggatcaagccagacatcatatcgtacaacacagtcatttacgcctattgtagaaatactcggatgagagatgcatctagaatattttcagagatgaggaattcagggattgtccctgatgttatcacctacaatacgtttattggttcttatgcagctgactcaatgtttgaggaggccatcggcgtcgttaggtacatgatcaagcatggttgtagaccaaaccagaacacctacaactccattgtcgatggatactgcaagctaaacaggaaagatgaggcaaaactttttgtcgaagatctgaggaatcttgatccccatgctcccaaaggcgaggatcttaggttgctggaacggatagtgaagaagtggccatagataattgttgatgagaaacctcacagtaaacttgtcaaaccctgacttcagatctgctgtaagtgttaatttttatcataactttcatgctcgttgagcatgtgaggcacctttttttcttttcttgtttgtacttgagagagaaaaagtcccactatttgccttcaaatttaaataaggataaactgttagaaataagaatatttcattgttagtgtgttacatctgtaaccattccaatgactgaaggagtattgttgccctttgtgaaatatgtagacacatcaactgctgacttctggactgatttcaatctaactttaaaatagtctgaacactttgttgctgcagaggaaggtcctaaacacttaagctcgtagctgttagtgcaggatccgtggtgaagaactcaacaagtgatatatcttcttggtgactcatagtaagaattatctgcataagagcttcaatgtttctcagctctcactgtagttaccgtctcacatgatcttaaacttgatagtaagaattgtctgtgaatcggattgtattgaccataactgttagaatctcagcgtagctgctataagcctgatcatgttctcgaaagagttattatggctcttacctaatggctatttgatttctgcattaggtgtatcgtgtcagatgcttctcacggttgttgtctgagaagaacataactgaggcgtcacacacaagagggacatacggcagtatcggtcaaaaccagtttttccggggaatggtatatatatatatatatgagtcaatgtgtctagaaaatggttaccaatggtattttctttttgatatttgttcctgtgttttgtactttctctgatttggttatctatttaaccaaaagcaatgtaacacagctagcaaaccaaggcagctaacagtaaatgccaacgtccatgttattgtctcgagcctttttgttgttcttattgtcaataaccaatatccctaaacccggttaacaatagtcgggaaaccgaaccgtattggtggatcctatcaaatcaaagcaaaccagaacagataaacgaattgaaccaaatcagagctaaaccgaaaaaatgcaacttgaaattctgctggacctacattgggcctttcggcctgtataaatttccacaatttacggtaatacccttgtaagaaaccctaagtaataatgatgtgctttaaaagcgcacagcctcacttccaaacccttcgtttacagcaaaaaatcgaaaatggttgcctcagccgccgcacgacctcttgtcaccgtccaaggacttgacggtgacatgagcaccgatcaatccaccaccgtcactttaccagacgtcatgactgctccagttcgacctgacattgtcaacttcgtccacgcccaaatctccaacaacagccgtcagccttacgcagtctccaaaaaggccggtcaccaaacctccgccgagtcctggggaaccggaagagccgtgtcacgtatccctcgtgttcctggtggtggaactcaccgtgccggtcaagcagcgttcggaaacatgtgtcgtggtggtcgtatgtttgctccgactaagatctggagacgctggcaccgtcgtgtcaatgtcaacatgaagaggcacgcgattgtttctgcaatcgctgctactgctgttccagctcttgtgatggctcgtggtcacaagatcgagaatgttcctgagatgcctcttgttgttagcgactcagctgaagctgtggagaagacatcagctgcgatcaaggtattgaagcagatcggtgcttacgacgatgcggagaaagctaagaacagtattggaattcgtcctggtaaaggtaaaatgaggaatcgtcgttacatttctaggaaaggtcctcttgttgtgtttggaactgaaggagccaagattgtgaaagcttttaggaatcttcctggtgttgagctttgtcacgttgagaggcttaacttgttgaaattagcccctggtggtcaccttggtaggtttgtgatttggactaagtctgcttttgagaagcttgaatctatctatggctcgtttgagaaaccatcagagaagaagaagggttacgtcttgcctcgtgcgaagatggtgaatgctgatcttgctaggattattaactccgatgaggtacagagtgtggtgaacccgattaaggatggttccaagagagcggttctgaagaagaatccattgaagaaccttaatgtgatgttcaagttgaatccttatgctaagaccgcaaagagaatgtctctgttggctgaagcttcaagggttaaggctaagaaggagaagctcgagaagaagaggaaagtcgtcactaaggtaaactcaatgctctcttttctctatgcctgtctttataacttgagtgtctattgcatatggtggtgatataacatacacaaattccaaagcttttgatttagattgtgtttgttcattactgtgctatgcatgattcacagttagtttgagtttggaaaaaaaaattatgaagtattcttattgtgttgaccttgatggagtcatatgcattgcaaatcagttgtggtctttgatgttatttgggaatggttctttgattgtttaagattggttttgcggttactcatattcgtttgtgtcattttcattaacacttctgctgtcctaaacgacatgattaacatgattcagttcacttgtgtactcgaaccgccagctttattgagattttgtatagtttttactggttgcgtgactgatcaaaaagttgtctcttttcttaatcttatttttttccttctttactgtaggaggaggcccaagcgatcaaagcagcaggcaaggcttggtatcagactatgatttcagacagtgactacaccgagttcgataacttcaccaagtggcttggcgctagtcagtaatgatgctctcgtcatcgcaaagtctcttatatctaggcaaagattttggttttctgatttatgttcttcgtttgtattggatttatctgggattttatgttgttgagttggtaagacgatttttaagaactatgatggtgtttttcaaactcttttcaatctgtttcccttagtgctctttactcgctattcaaattcctccatttgaatatttgatgatgatcatcttatcaaacaagcgccatgagttgataagaataactggaacttcaactttattagttattgcacacaactctacactcaatcgaataatgtagatagtccatcttgactccaaccaatcgaaaatacgtgcctcaggccctttagtcccgaactatgtgttgtcttacttccactggaaaattaaaaaaaaaaaagacttgagcctcaagttttcttatacagtgggataaaattataagcagcctttgcttgtatgttgggaaaggttgctctttgacttcgatcgatgacttgaacagatttgtccaacttacaggaatccctgtaactagtgcattgtttggacttggctcttacctttacgacgacgatttttccttgcaaatgtttagaattcagcagcaggggacgatggtgtatgcagatcacgcttgacgctttggaaaactgcgatcttttgctcgcttttggggttgaaggtaaggccttccgcccttcccattccctagcaaagcgaaagcgaaagctaaaattgttcatatcgacattgactcatcagcaatgtctatggatgttaagcttgctttgcaagagatgaacaaatacctgagctgaagaatcttgaatctggactctggaggaagcagttgaacgagtgtaagcagcaatactcccctttgagcatcgagaagcgtgcaggggagcatataactaccactggtccatccattagtttacttggccttgtatggttctttattaacttggcacttatgtggttgctctttaatttgcttttaataaattaattgggtttcgtagatttttttacaaattcataagtttcgtcacttttccttgtaaattacaaggaggttcttagatttttttaaaggtaagtaaatatggggattatcagtaaacggcataaaactgagtctttaaagtctaaacaatccggataagtcggtcaaaagaaagttgtgtcgacctgatgaagctttgtggctctccgcttggggctgaaccagtcctattagattatgcacaagcccacaaaagactttcttgtacgtcaagtttttcttataatcgtagaaaatataaaagaaaacaaaatactaaagtaagatctttttttgtcaataaagtaaagatttcccctaaattagttgaaattatgaatatcttaactccaaaaaagttagtcacacctttccgtataatatggtcagataacaactttcgtctctttctttgtaacattgcaaggaaattagtaattagaacttagggtccgaatggtgattgcgttttgcggtgcgggagaagtgcggtgcagttcaaataataacaaaaatacgtaaatacatatgtatatgtaaagattttaatactgttacagcactattgcggtgcagttttgggtgcggtgtatatcaccattcatgatcttagaatttatgtaaatatgagaatattattgtcaataatattttaatcaattgaatatcaaatactcattcataatctggtcgatagacgttttctcttgaacaacttccgaaccaattattataattttgtgaccagataattttatgtgatcgcccttttaagttatcacgaaagaatcgggttcaacttcattatgtattttttagaagatattgccttgattttctcttaagcttaacaagatatactcttgatttcccattttcccttattagttggcgaaagagtattattttaattgacctgacgtatagttattagaacttcctatacgaaaccctaaagtaaacgattaataaagccttaactttgttgctttaatatgataaaaatttaatttccaaagactaatcaaaaagccaaaaaaggtttctatttaagctccattaataatcaatggatttaccataaaaatgaactaattgtaagcaaaggaaataaataaaagctagcttttggattaattgtatggtttaaaactgttaataacgacacgtgtcacaattaaccccacatgaggcggtgctaaatactctgatcctaaaatccaaaacttcacgtccgttggatcttctctcaccaagttttgaaaccgtccgatctaatcaacctttcggatattcgatgtacacagtacttaccgtgtgcacatcccgcagatgataaacattttagaagtctggtctaattaacaaaccagcgtcttagcaaataagctaaagaaaaaaaaaagtatatacatacacacacatagtatatatatatatattatgtgtggatttcttctttctggagattaaaattttccagagataaaaccctagagagattctcatcttcttttcttcaatctctctgagaatttctaggttttcgttaccgattgggtcaatctggtgaaactcaaggtgtgtgtgattatgagttattttttttgtttcccttgatttttaatgcgatcatgatcgtttttttttcttctgttttgtgttgttctaagttgatcgtaatttctatttcgaatctgttatcgattgttatataatttgtttcctctgttttattgttcgttctcgatagtgaagtctctgtgtgtgtgtttgttttgattttatttttgaaattgatcgtctttgtctgtgtctgtgtagattctggtgagtaataatggtgtttctaagaattgccaaaaaaaaaacctaatttttgtttttgtttatttccactgattttgtggttagtgattgactcttagttgtactttcttatattttttttttttttgtatgttgatgtataaagacttgaactttgatcatttgcttggttacaggttgagatcagataatttaattggaagattttaggttatggagaacagaggccagaaacgaatggaggttgtggaagagttacctgctgataagagagcttgtaactctcaggattttagaccaagcacatccggatcatctgttcaagctcaagctaatgatacgaatccaggacatgaaaacgttgacgctgatatggatacttcttcatctgcttcgccttcgagtcgatcagatgaagaagaacaggaagagcaggataaggaggattcggactatggatcttgcgattctgatgaggaagatccgaggcagagggtgcttcaggattaccagaggcagagatcatctggtgatcatgggaaattgaagtctcttttgttgaatttgactggagaaactgatccttctggacagttatccaggctcactgagttatgtgaagtgttgtcattttctactgaagaatcgctgtccagtgttatggccaacatgctatcaccggtgcttgtaaagttagctaagcatgagaacaatgcagatattatgctcctcgcaattagagctattacttatttgtgtgatgtttatccgccgtcagtagaattccttgtaagacatgataccattcctgctctctgccaaagacttttgactattgagtacttggacgttgctgagcaggtacgttatactttccaccaaatgaccttattgtttacacctaaagaacgcaagttttgatttcatactaactgttgacttttctagtgtttgcaagcacttgagaaaatatcccgagatgagccggtagcctgcttgaatgctggagcaattatggcagtgctttcgtttattgatttcttctcaacaagcatacaggttactcatcccaaaacaaatagccttgctgtgtcagatttctctgttttctgttattgtgacttggtttagcccgactgggtgacattaagagacttatggttttaacatcgcatttgcttcagagagtcgcaatttctactgtggtcaatatatgtaagcagctttcttctgagtctccctcgcctttcatggatgctgttccaatattatgcactcttcttcaatatgaagatcgacaggtaaaaatgatgctcagctcttttgctattttttctcactgaactaaatatttttctgtaaattattgatagcatatatgtttccatttgcagctggtcgagaatgtggctatttgcttgacaaaaatagcagatcaagccagtgagtcaccggcaatgttggatcaactgtgtaggcatggactaattaatgaatcaacacatctcttaaacttgaatagccgcactaccctatctcaacctgtctacaatgtacatgagatttcttctccatttgtttgacctctcttttcattatatatagataacatcttgcattttggctttggttggcagggtgtgattggaatgctaagaaaactatcttctggttcagctttagctttcagaacgttatatgagcttaacattggctacagtttaaaagaaatcatgtccacgtatgacatttctcattcagtgtcttctacacatcctatcaatgcatgttctaatcaggtttgcgttttattatcaatcactcttatattgtttggtattcatacaaagggttttctattcaaaatagtcatgtatccaaaatagcattaggtgaaagtaaaatatttagtctgattttaatgttgtttggaatcaaacttacaattcaggtgcatgaagtcctgaagttggtgattgagcttcttccagcttcacccgtagaggataatcagctggcatcggaaaaggaaagttttctcgtcaatcagcctgatcttttgcaacaatttggaagagacatgcttcctgtcatgattcaggttatttctggaatacaattttattctctgtgcgtatgaatcttctgattattcctctctaatagtaagatatatattttgaatgttttgtaggtgctaaactctggagctaacgtatatgtttcttatggttgcctatcagcaattcacaagctgacttgcttgagtaagtccggtgatattgtcgagttactgaagaacaccaacatgtcaaggtaatttctcttgtaatatattcggcagagcttctaaccctgttgttttataacttttaatagtgcatatcgtaatgctgcagtgttttggctggcattctgtcaaggaaggatcatcatgtaattgtagtagcactacaggttgcggaagtgcttcttgagaaatacagagatacttttttgaattcttttataaaggaaggtgtttttttcgcgattgaagcactcttaagttctgatagagggcaacaaaatcagggatcagctgacctttcacaaaagcctgttacaaaagagattgtgaaatgcttgtgccaatcttttgaaagatcgctatcctcttcttcacaaacttgtaagattgaaaaggattctgtctacgttcttgcaacacgtatcaaggagggtttctttggacctgaggtattcaactctgagaaaggcttgacagatgtcctccaaaacctcaagaacttgtcggtagcacttagcgagttgatgactgtacccattgatgcgcatgtcctgcatgatgagaaattcttctcaatatggaaccaaatcatggaaaggctgaatggaagggaatctgtgtccacttttgaattcattgagagcggagttgtaaagtcactggcaagttatctttctaatggactctatcaaaggaaacttagcaaagggggtcctgaatgtgatagtttaccatttattggtaagagatttgaggtgttcacaagattgctttggtctgatggagaggcaacttcatccttgttaatacagaagctccaaaattccctttcttctttggaaaacttcccaattgtcctaagccaatttttgaagcagaagaactcatttgcggctattccaaatgggcgttgcactagttatccatgcctaaaagttcgttttctgaaagcagagggggagacttctttgcgtgattactcccaagactttgtcactgttgacccactttgctatttggatgctgtcgatcaatacttgtggcctaaagttaatatagaacctatagattctgtggaagcaaaagatcaagctatagaatgtcaatcttctcaattgcagtcaacttcgatatcttgtcaagctgaaagctcaagtcctatggagattgacagtgagtcttctgatgcgtctcagttgcaggtaatttctaaaatgacttaatttttagtcgtgtggaagtagtatgtgcaacctttctttttatcgtcgattaggagtgaatcaaacttatcctacatgagttcaggggaagcaattatgtactagaactgaatcatcttcaaatagtgaaagttttcaagatggagtaaaagtgatggctttgtttttaagctgcgcattaggtagtgttttggttgtttagttgagaagaagttgtcttcctaggtgtttctccttctcttcaagcttcttgttttagttattttagtaaatgaatcttttgtgtctctggaaactttttattgtgtcaagggatctcaagtggaagatcagacgcaacttccaggacaacagaatgcttcctcctctgaaacctcctctgaaaaagaggatgcggtacctagacttttgtttcgtctcgaagggcttgaactagaccgttctttgacagtatatcaggcgattctcttgcacaaactaaaatcagaaagtgaagcaaccaacgattcgaagctgagtggaccccacaacatcacttatgaaaggtctgcacaacttggggattctcgtgaaaatctgtttccacctggatctatggaagatgatgagtatcgcccgttcttgtcctatttgtttactcatagacttgctttgcgcctgaaggggtcaagtcatcctccgtatgacatattgtttcttcttaagagtctggagggcatgaacagatttctctttcacctgatttctcttgaacggattaatgcttttggtgaaggtaggctagagaatttggatgatctgagggtacaagttcgtcctgtgccacattctgaatttgttagcagtaagcttacagagaagttagagcagcagcttcgtgattcttttgctgtgtcaacctgcggtctgccaccatggtttaatgatctaatggattcatgtccgtgtttatttagttttgaagccaagtctaaatacttccgacttgcagcctttggttcacagaaaatccgtcatcatccacagcaccttagcagttcaaatgttcatggcgaagcgcgcccagtgactggtagtttacctcgtaaaaagttcttagcttgccgtgaaaacattctagagtctgctgccaaaatgatggagttatatggaaaccagaaggtggtcattgaggttgaatacagtgaagaagtcgggactggtcttgggccaacactggagttctatacgcttgtcagtagggcatttcaaaatcccgatcttggtatgtggagaaatgattgtagttttattgttggaaagccagtcgaacactcgggagttttggcatcttcttcaggactctttccacgcccttggtcaggtacatcaactacgtcagatgtgctgcagaaatttgtcctcttggggacagtggtagcaaaggctttacaagatggacgagtcttagaccttccactttccaaagccttctacaaattaattctcggacaggtaaattggtttcttcaagtatctcatttacatttcaatatttctttccgactttgtttgagtcttacagagcaagttgtcttttaggagttgagttcatttgacatccacttcgttgaccctgaactttgtaaaacactggtggaattgcaagctctggtacgtaggaaaaagcttttcgctgaagcacatggtgattccggagcagccaagtgtgatttaagtttccatggaacaaagattgaggacctttgtcttgaatttgcattgcctggctacacggattatgatctcgctccctattctgcaaatgatatggtacttattgttttagttttgtgaataaatctatttctcaagatacttgaacatgtagatttatacctgctttactcctctttctaggtaaatttggataacctcgaggaatatatcaagggtattgtcaatgccacagtatgtaatgggatccaaaaacaagtggaagcatttcggtctggatttaatcaggtaaattctttagctttactcttaccaatagatttaactatagattaaatcactccttcttttatgcatccttcttcaggttttctctattgaacatcttcggatattcaacgaagaggagctggaaactatgctgtgtggagaatgtgatctctttagtgtaagtaaaccttcagatgggacgtgttgagtaccctttttcatcagctgaaaaaggtgttttccttgcagatgaatgaagtcttggatcacatcaagtttgatcatggatatacttctagcagcccaccagttgaatatgttggtccttttaactttgaaaacatctacttttctttctgcattatgttgttctttttcacggataaactaaaaggttcaattgttttatattccagttattgcagattctgcatgagtttgatagggagcaacaacgagcctttttgcaatttgtaacaggatctccccggttacctcatggtggtttggcgtctctcagtcccaaactaacaatcgtccgcaaggtccagtggactgaaaaaacttctattttctcacattgaatgaaatgctctcttctcttttctcataggctttttcttttgttgtgcaacagcatggtagcgattcttcagatactgacctccctagtgtgatgacatgcgccaattatctgaagcttcctccttattcatccaaagtgatatctctctcgtgaatcttttgttaaccgccctcttactactcgtggatttctctgattaaatagccggtctcatgatcaatctcactgtgttgtgtttctgtctttttcctgtctgtgtgtttgcaggagaagatgaaggagaagctgatttatgccataacggaaggtcaaggttccttccatctctcttaagttaggttcttgtaaaaagttagcagaagcggtagtggaagagaagagtggattgttagaagagacgaaaggaagctcttcttcttctttttaacatggttttaaaaagttttcttcttttttaggattttgtacaaaagaatagcaataagtataagtactaggaaaacaaaagaaactctctttttaaacttatggaaaaagttgtacataaagaaattcctaaactggttttaatattattgtatatttgggtacccataataatttgacaaaatcacactgtcaaatccgaaaattatgttgcgtcgctcgtaatggaaatgcacacttcattctaatgaaattcacattcttatcaaaaaagtaaagaagataaggaattgatcgatgatgtttcttttcacatggctctttcttttgtaccacacacaaatccatcatgccattcatatttctacctacacgttcattatgagattgcatggttgacttgatcttatttacatacatgttccattactagttagttgcaaatgtcaattgggtataataataataaatgatactatcttcacctatctacttttcatatatcaatatttacttctttttttgtcaacatcaatgtcacgtcgatatttaaaccattatacctactgaaaataataaggattatatttttattttataagtaggaggaatgtcagatccattatttcattcttaatcagtgttattctacctaacctgtcaaatttgttgtaatagccaataaaatattcgaatttgtatatatataccattacctaacgatataataaggattatattttcttttttataagtaggaagaatgacagatccattattaatcagtgtttgttctacgtaacctgtcatattagttgcgatacccaataaatattcgaattcggataatatacgttgatgttttgcgttttacgtgatgagtttgaactactaccattaacaagtaaaaatggtttgtgtgcgtggccgtaagtaattaattgttttgcattgtatcggagattatttcattatatcataattagcttttccacagtatattttcattttgttaaatcaaataaaccatatttttatggtctaacatattaccgacatttttttttctatcgaaacacatttgtagctatatatatcgagttcggtgttttacaatttaagatacatcaataacaccataaaaattaacaacttcacaatcaatacccaacaaacattataatagtagcgtagtacatctacattaaaattgataacattactcaaaacattatacaaaccatgcatgtcactgatattaatgagttactcttttggcagtgcaacaataaatttggctagcgacttggcatccccaaaagtagatgggaaaacaaatactaccccttttgagacacacccaacccaacatgaagtaacttcaagtctttccccaaacgataaactcttatcaagtactccatcatttgtctcctctgaatcacgaccgcaatcgcaacccttaatcacttcatcactcgaatgtatctctaccttcgtaccatcacatccagtactattttcgccactgctttgttccttgatgaataagaaaacatccccactcgttcttttgctagttacaatgcaggctggtgatattttcaggcatgttttggcccgaaaagcaataggttcgccgcggtcgagaaccgaggctgacctaaaaaattcagtgaggaaattaccaaagtcttgcttgagagaagggaggtggaatactggtttgagtgtggtttgagctaaagagctttggatttgagcccatttggttaagaaacctgtctcaaggaagagatcagctattaggatgctgcagcttatcccaattgagtacccaccactctcaaaattagtcacctattaacaaatatataaaaaaaatctcaatatttatatatgtgaaggaacatttttattttttagaccaaaccaaaaaaaagaaacattaattgtaagtctgaggattttaattaaaatatattattaattatagtgtatattaaaatttgatagatgacataaataattgagtttgcaaataacctgaacatagaacaatggagagtattgaggttcatcttcatcaatgtctttccagaaaacagtctctgcttcagctctgcttttgtctctcttcgccatttcaagaaactccggcagactcgccggaaacttagcctccaccatcctcacaccactatcattggccactaactccaaaccatcattccccgccgtcttcctcctccgtagcctaccggaaagcatcggctgctccgtcaaggctctccctaaagattccttgatccacccggcgactaaccaccctctctcaccaccactatcacctgcttctttgtaatacgtaactatgttaaccgttcgccggaatattcctactccgacgggatctacgacggatacggagcggatttcccggtgttgcgtcacttccaccggcatgacagtctgtactccggcgatcattgacttagggattttggtttccattttggttcgaattgtgaaattggctttagaccgtcctctgctatttataggaactcaagttattacacaacttgcaaaacataactttgtaataaaaaaaagtggtgcaaatatctagctagtagtataagaaatgtgctttaatgttataaatgaaacccaacagcgaatacagatgtgaataaaccttgaattaattgatactttattttatcaatgcttgttctcaatttgcgtaaaaggttaatatggagtcttaatgatcattgactattgagacaagcaagagtcaagatttgcggttggggtaattaatgatttgatttatgaattttatcaaaacataacctgcaattaatgatttgacctatgttactacttagtagcagtgtacgtagttgtgggtattcactcttgttttgtttgcatctacagtttactagtttagccgatacaaaaaaggggtcgaattaattactggccatccctcagatggcatgtgcttcatagttttgaaaaggaccaaacatatcctatcaatattgcacaaaacaagataaattaaaccattttgtagtagaatcagaaatataaatgtttgatgaggcctccgggtaatgaagaaataacttacctttcttgtctagtagtccttgaattatggcgaatgacttggctcaaatccatcaagaactaaagctcaaacctgtaaggccattgatagcttcaaacttgttgcagacctgacgcattcatggtgcacatactagctagtggtagtcacactctttacttggacaattgtaaaagtggttgaattggtttcttcgtttttgaccgcaaacaatgtatcaatttaattttttcataaatcaaaaaccgtgaaataaatgattgatgcatacaaaaagcatatatataaatctgatacgataaagacaggtaaacatcttagtaatttatgtattagtaaacaaacattaattatatctagctaacaactatataatttgaaccttaattatattttaggtaatgtctataattagtaggttgattagatgtttttaagaacaaatcatagtctctatcgtatcaatcaaaatggttaatatacattcatttttatcagaaaagagatgttcaacttccacctatatactatttacattatcgtgggactgtgccgcctaaatttatatctcatgaattgaaacccatgcatgattttgtgcatgaagggatatctatctatctaaatcgaatatatattttcacatagatttgtaaatgtctatctcagaacttttagcaattcgtcggtctatgtatttatttgagtaacaacaatataattagttggtacactattcaaaaattcacgaaattgtttctgataacaaaaaaaaaaagaaaaaaaataacagatcgaaaaagaagacatcactgaatctgaagatctttggtgatagatcgctgtgtttggtttaagggaccattgcagattgtggcgccacatcttcattgtttgagtttgagaaactctcaaataccatgtagtttagttgatttctcttctttaaccgaagctaaactcgacatatagtttggtggagctgaaccttgaagccagattgtcttcaagacatggtgctaaagatgctagaaaagttgcagaacgtacagaaccttactattggggaagtctttcttcagatatgtttagccattcttgcattctctaaagcctatagagaactcactactatgttgcagagtcactcgagattatggttgatggataagttttcatcatttaggtgctgcttcagtattcactatctttctctgtatatcttttgttagattttatgccttgccgagctcaatggtgttcattttccgacattcaaggtcaaatcattgactcttagatcaatgatcttccaatctcttcaacacttggattaacgaagctaatgcctgagctcatgtctttgtttgtggaatttgtgctcagaactgcatctggagacaataattgtacgcgtgggaagtgaccttaatgaaacaaggtttaaagaactgcatcaggtggattcaacacttcctcgcagcaataatgtctccattgtgatattagattaagttcattgtatgcttcatagggggtttaataaatcttggatcacgtggaatgtgtttacattgaatcactgagataacctcttgggaaagttgtctagctagattcagtttttgtaaggaattggtcaatttgtcatttcttgagatgcttttgtatatgaattggtcatgtgtttcctttggttttcgtgaattactcttaactaatagtcaaagtatacataatcgtttacggtccaaccattgcccccttgtctctctgtatgtgataatgtgcatgtgttcacatataaagtcttcgagataagaaatggtcagttaaggatattgaaagaaaaatctacacataataatgataagttaaaaaaaatagctacatgtatataaataaatcaagttgtttgcgcactcaaagaaaccatcacaagtgtgtgtgtgtataaatcaaactcttctaatggcttcaataagcttattcgaagcttccatagccatcttttgctttatcatccttcacttcttccttgggaactggccggttctcgggatgcttccgggtctgctcttggagttccatcggatctatgacttcagcgtggaggttctcgagaactctgacttgacatttccatttaaaggcccatggttcactggtatggatatgttgttcactgttgatccaactaatattcatcatataatgagctcaaacttctccaattacaccaaaggtcccgatttcaaacaagtgtttgatgtttttggagatgggatactcacaacagacgattcagagttatggaagaatctgaagaaagcttctctagtgatgctcaaccatcaagggtttcaaagtttgtcaatgagtaccacgagaagtgctcaaggatgggcttgttcctcttttcaatcattttgcagagaatggaacggtggtggacttgcaagatgtgttcaaaaggtttatgtttgatacgactctagtgacagtaaccggttctgctgatcctagatctctctccattgaaatgccagaggttgagttcgctaaagctctcgatcatgtaggagaagggattatgcatagacatgttagaccgagactcttgtggaagttgcaaaaatgtgttggatttggacaagagaagaagttttcaaaagctgacgccactttaaatcaagcgtgtgcaaagtacatattagaaaagagagaagagacaagatcacaaggttttgattatcattccaacggatcagaaagtgaggatatattgacataccacataaagatagatacaaccaagtacgagctgttgaatccgagtgatgataagttcctcagagacaccatcttagctttcgttctagcaggaagagataccactgcttctgccctcacttggtttttctggcttttgttggaaaaccctcaagttgtcactaaaattcgccaagagatcaacacaagtaatggtggccaagagaagccatcttgtgaacctatggagtacttgaataacttggtatatttacatggcgcgttgtatgaagcaatgagactctatccaccggttccattcgagcgaatgtctcctataaaaccagatgtgcttccaagtgggcacaaagttgactcaagtatgaagattttgatctttatttacgcgttggggaggatgagagccgtatggggagaagatgcatcagagtttaagccagagagatggctttcagagacaactagcttgagacatgagccttctttcaagttcttagcatttaatgcaggtccaagaagttgcataggtaagcaactagctatgactctaatgaagatagtggtcgtggagatattacaaaactatgatattaaggttgtcaaagggcagaagaagattgaaccagctcctggtcctattcttcgcatgaaacatggtcttagagttacacttactaagaagtgttgatcgttaaattaagaataaaaatcatttgaaatcatatgtagcctaattaagaatgattctctctaccttggttacaagattatactgcttatatttgattgatgatgtgatttcctcatcacagctcttttaatgtacggaagattccatacttatcaactgagacttttatttttatgattggtgtgtgtataatttatctggttattagaaaaaaaaaatccataaaggatgacatcaaaaaggagaagatatgtttgttggactaagtttgtgcactttttctctgtagacataccaaaaacagagccactcactcagtcacatctcacatgtcgctttctgcatgtaatatgtctcgtcagattttcagggtcaaacggtgtttttgtctcgtttttagtttcacagagaccaaaagatcaaagagatatatgtgcttgtacagttgggatgtttataccataatgcaacagcttcacattaatttgacactttcccacacaacaataatgttagtttcttgaacccatgtgagttttgcagtaggtaggctatactaggaatagcagactgaacaataaaggaactaagcaagatatagaatctaactaaagaatgcaaaaaaacagagtgaatatttactgaaacacataagccaaagcaacaaaaacaagatcaaggtaccaaagttcctcaggcatatacatataaaaaaagataaatatgtaatgaagaaaaaaaacagtaattcctttgtcttttgtggatctgtgaatttgtttttcgttgtatggtcgagccaaatggttatgttgggccttagccttttttttttttttgggggcaaacaagaccttggactttataatagttattacttctttgtttactatagttctttttttcgtaaatggaaatttattagtaatatatttcacctattaaaaaattgtttacttgattaataggaattttttttacaaaaatatataacacaaacatcgagaagcctaaacatatacatatcttgataatttaatctgcaataatttctaaaatctaatgatatactatatataatattattagtatgttttacatcagaattttttgtcttacttagtagaacaaaatttagataaaagaacacttacgtaaaaaaaacataatactagtccttttgcatcaatatcatcaaatatattatataaatgatcgaaatattatataaacaatcaataaaaacaaacctagtcatatgaaaatattacattataaaaaaaaagttattttttatgtcaaaaaaatcattcacttcgtaatagtcaaacaaaaatgacatctgttaaaaagataaaaaaaatgacacctgtaacatgttttaaaagttactttcattcgttagaaattattttatcttttacttcatttttttttggtctttattcccagaaaaaaaaaatatttatacagaaagacagcgtctccgcgacggttgaaatccctagccaccactctctgtctgattctcccctccccgccaaaacatgataactggcgattcaatcgacggtatggatttcatcagctctctacctgacgagattctccaccatatcctctcctctgttccgaccaaatccgcgatcagaacctctctcttgtccaaacggtggagatatgtttggtccgagacaccttctctctccattgattgccgtagagccgatcctaattcgatcgataaaactctatctttcttctccgctcccaaaatcacaagctttcatcttcatacaaccttactcaacaggattgattctgttaatggctgcatcgaattcgccatttctcacaacgcagagaagctttcactggagtctcgtgattatcgtgtcagaaattacaagtttcctgatttcttctacaccaattcatctgtgaagcaactctttgtcgactctggatctgttcatttgattcccagatgcactgtctcttggacttctctaaagaacttgtctttgagcaattgcacactttctgatgaatcatttcttaagattctttctggttctccacttctggaaagcttggagttgttgtattgtgctgaatatatgtgtcttgatctgagtcaatcacagcatctaagaagattggagattgaccgtagcgattggtttatggggccaacgaagattgtggcaccgcatctccattgtttgagattgagacactcgagattaccatgtagtttagttgatgtctcttctttaaccgaagctgacttgaacatttactttggcgatcttaaaactgttaccgctggttttcttcaacacaatgtggtcaagatgctacaaatgttgcagaatgtagagaagcttactattgggggtacctttcttcaggttcgttagccatttttctgccttctctaacacatagaaatctgtatgttgtagaatcacatagcatgctcttttagaatcagttggttttgcataggcagatattggttgatcaggctttgatactcagattcatgattacctactaagtatttggtcaatggctcttgtcttgttgtgctttggttatttattttgctgaggtttgtgtttggtatgttgaactatatttgcattgcctttcagatgttatctcttgccgcgctctgtggtgtaccttttccgacgctcaaggtcaaaactttgactctcgaaacgatgattattcggtctgttattcctggtataacaaagctactacggtacacacctggattacggaagctaacaattcacactgtgaaatgcagcagcatatcggtcggtatctttaccatgaaacctcttttactctccttcacatatatgatcatagtaactatgacaaaatagtgtttatccaagaaccatgatgaagttttttgacactctttttgtatacaagttattagtttgcatgatgaaatccatttttctgtttgacaggaattgcatctcaatgactacttgcgtaaacatagcttgaatcagcgtcaatgctggagatcaaaagactcggtcttcccgggctctcttgagaccatttcgatgttggcgagtaaacacgcagagtccaatctcgtggctttgttcatggaacgtctactgaaaagtacaaaaagtctagaaaccatggttgtactcttggtagattaccttgatgcattgggttttgaagaacttcttgcaatggctacaacactttctcacaacaatgatgtctctgttttgatcaaacgaagctatataaagtatgtatccaacactttccctcaacgatagtgtctcgattgatcaaaagcaaatgccattgttaaatatgtatcattagattttcgaccttgtatactgaatctgtaaatcagattagttgtatttctaactttcaatgaaatttctgtagctttttgttttgtttcgtgtcacttcttcaaatccgatccaacttgaagtgatgttttatcgacgatcgaatttatcaatttgatatccatcaagaactaactagagatttacggacgattggtaacgacggttactgggagtagagattagaaaagtaactaccattaccaatcagtcgagtgaaaaattacatttaatgtcaatggagcgaataataattaagaagatttttaatctaaccttaatgaaaaagagattctaaagccatgactttttgaaaaatgaaagaaattaaaatggctataaaagatagtgactttagaaactctaaaataaaaaataagtaaaagtcttgattggcaaaattttagcttttaaattttaatacctctaaaaaaagaaagtaaaagtctttaaattctctaccaatcacccccaaatttgtttagatttatatcaaaatctacaaaacagtttagactttttaattgttgacaaaaaaagtttactttttaatactaacaaatagtcataaatttaaatcctaaaattaaatttaatactaaaaaagtttagacttttgatattcactatcttcttatacttttgtgtcaaatttttgttaaattttatctaaatccgagctccatggtgttcttttaccgacgctcaaagtcaaaaattttgaccattatgcgacctgtggttcctggtaacaatttacacaatgcagttcagcaccgtactggtatctttcactatccttcatatattaatattagacaatgcatttgttcttccctttctttggttgagatatctttaaaatcttattctggtttgcaggataaatgtgacagcttcttccggatcaaggttggagatcaatggatgtggcctttccgacctcgtgggattctaaagttcctgagccggaactcatggttttgttcatggaacacttttgctggcaaacacaattacattagagacattggttgtacggttgggaagttttcatagatcaagatttgaatagcagtttcaaatcgctctaacgctttctcacaacaacgaggtctcaattctgctcaagtgaagcagtgttaaaatcatgtaaccatcggttttgggtgtaggatccatctgtatactagtggggaaattgcttcagcttcaccgaatttaagctctattagtgagtatattggtcctcacatactatcctgctcagtatgtcttcttgtgtcctcgttattatttcttttgatgaggtcaagcctgatttttaagtccatcacttttaaagaaccctaaccctaaaaaatacttgtatttgataatttttcaagaaaattatgaaaacttgaaaatagttagctattttaattttccttgattttaatttttttcttctaattattccactgataaatactactataaatcaataatcagccccacgacacatattgcaacacacagtatttttttttaaatctgattggccatggaagaggaagaccacgccacctttgctgtaggaaaccctagccaccgttttgatcgtcctctaatcagacgatcaagtgattcaatcagcaatctacccgacgaaattcttcaccatatcctctcctttattcccgagaccaatttagtgatcagaacctcggtcttgtcgaaacgatggagacatgtatggtccaagacacctcatctctcctttgaatggcttatggtttcccctaaattgataaacaaaaccctagccagctacacggcttccaaaatcacgagtttccatctctgtaccagttacagctacgaggctggccatgttcatagctcgatcgagtttgcaatgtctcacaacgtggataatctttctctggcgttcagtagttttccaccgtgtaacaagtttcctgatttcttctacaccagctcttctctaaagcgagtcgagttgagatctgctagtttgactcccagttgcattgtgtcttggacctcactaagggacttgtctttgacccggtgtaatctctcggataaatcctttcttaagattctgtctggttgtccaatcctcgaaagcttgagtttgaagttttgtgagtcactcaagtatcttgatctgagtaaatcactgcgcttgacaagattggagatagaacgcagatcctgttttcgagaaccaatgcagtctatgcagatcgtggcgccacatattcattatttgagattgagagactctgaggcacactgcactttcctggtatagcaaggctactgcaaaactcacctggattaaagaagttaacagtttacacaattgaaatgtgcagcacgttactggtatggttactgtgaacctcttcaattacctttcatatataacccaaaacaaataagcatggccttgcgtttcttttggtaatctatacatgagcgatatgttgttttctgttttgcagtgggattgtgtcaacagctacttgaagaaacaacgttggagattgaaagatgagatctttccaacctcgcaggagtatgaagttgtaaagccgaaagtcatggcttcgttcatggaacttttgctggcaaacacaaatacgttagagactttggttgtacagttgggaagttgcattgctagatcaagatttaaagagctgtttcagatcgcactcacgctttctcacgacaaaaaggtctcaattatgctcacgcaaacactttagctttgaatgtttccagcagattcatccccttgtggaagttacctttttcttcaccattcatttattttttatttttagtatgtagttgtgcggacaaataattgcaaatcgtttttcgaaagtttttttttttggtccgcaactaattgctatcccaaaatcagtttaccatttcttagagaatctttcaaaaaatttaagaacccaaaacctcaactttagacatttttctcatatccgattaaccatggaaagtggatcgctgagagggaaattatattgcttcagcttcaccgaatatatggtcctcacatactaaactatcctgctaagtatgtcttctcgtgctttggttatttcttttgatgaggtcaagcctcatttttcagtcgatcactcctttagaaaccctaattaaccctaaaagaatactcgtatttgataaattttcaataaaattatggaaccctaaaaattatttgataacttgaaaatagttagctattttgattttccttaaaaatagtttttcttcttgtaaattattccactgataattaataattaattattattgattgatttttttcttcttctaatttttgttcttctacaaatcaataatttatcccactgccaagcattttgccccttcttcttctttgcacacataaaaacgcgacaacttctcttgagcgtgtcgactcttcttcttctccttcttcgatttcgtctgcaccttctcctttttactttcttcttcccatatgcttgattctttgtgaagggttaatcaaagatgagattcaaacaacctagccgtcgagatcgtcccgtcatgtttaaacgatcaaaaaatgtttcagtcgatgttggtgtagactcaatcagcgatctacccgacgctgttctccaacatatcttctcctatattccgacagagttggcgatcagaacctctgtcttgtccaaacgatggagacatgtatggtccgagacacctcatctctcctttgaatggctcaaggtttcccctaaattgataaacaaaaccctagccagctacacggcttccaagatcaagagttttcatctctgtacccgttacagctacgaggcagacactcaccatgttaacagctcgatcgagtttgcaatgtctcacaacgtggatgatctttctctggcgttccgtagatgttcaccgttttacaattttgatgattgcttctacaccaactcctctctaaagcgagtcgagttgagatatgttgatttgatgcccaggtgcatggtgtcttggacatcactaaagaacctgtctttgaccgattgtacaatgtctgatgaatcctttcttgagattctgtctggttgtccaatcctggaaagcttgagtttgaagttttgtatgtcactcaagtatcttaatctgagtaaatcgctgcgcttgacaagattggagatagaacgcatatcctatattcgagcaccaatgctgtctatgcagatcgtggcgccatatatccattatttgagattgagagactctgaggcacactgcactttcgttgatgtctcttctttaacagaagctaatgtcgacgttagcactttccatcctagaacctgttatcatgattttgaccccttagaccctcatgatcttctagtcatggtgcaaacaatgctaaaaacgtttcagaaagtagagaagcttactttgggggttaatttacttcaggtaatgttaccattctttcattctttaaacacttagtgcctataaatctcaatgttgcagaataatcatcgctttagaatgagttgcctacacagtcaatattggtttgatcgataagttttcgtaaggcttttgatattattgtccttatttatcatcatttctctgtagatgttctgaaaatatgctaattagtttatgactaaaggttttgttttggcttttgatttgttgagaggtttgtgttttggtggtactcacatctttttgtgctttttcgtcgatcatctgttagatgttatcactttccaagatccctagtcttccattgccgatgctaaaggtcaaaactttgactcttgaaacaatgattatccgatctgtggttcctggtattgcaagactgctacaaaacttacctggattaaagaagataacagtttacacaactaatccgtgcaacaccgaagtggtatctttaccatgaatctattttattacctcttatatattatattacaaaactacaaattaaccaacccaaaagaaacatgcacttgcctttctatggctaatctttatatatataatatatgagcgagatatattgtggaaatctgagatatttatctacaaggggttttaagatgaaatatttttctgttttgtaggagccatgtgttaacagctacttggacgcgcaagacttgaatccagatcaatggtggaggttagatgatgtggtctttccgatatcttctgagtatgaagttttaaagccagaaattatggcatcgttcatggaactgttgctggcaaacacaagaacgctagagacattggttgtagagttgggaagttgcgttgctagatcaagatttaaagagctgtttcagatcgcactcacgctttctcacgacaaaaaagtctcaattatgctcaagcgaagcaatggctgatctcattcaacagctttatttataggtggattctcaccttatttataggtggattctcaccgaagactgattttattcgcgaaagaatgaaatgtacaaggatttgtttctttgtacaaaatcaacagacttatctgatacttgcatttgtgagaaaatataacatgtggaatatcaatatgctatagtttcatagtgtgataacttggtctccttcaagctctgatataacaatcaatgagtcttccatttcgagggaaacaggttctgtctttggaaccggattgattatctgcaacaacaacaaaaaccgagtttgtgacaaggaaatgtctggttgccgagtaataacaaacagtacctttttaccgccttttatgtagcctatggcaacttctctccttagccaagctcgctctgaaagctccgtgaatgaagggttctcgccctctttcatatacagttcaatgtcctgtgtgttcaaagcaaactcaagattctcagaccagcaaggattgtgaatattgtaaaagttactggcaaaaaaaattgaagtaaaagtgtgtttttcttgtttaacctttacgtatatctcatcaccctctgcatccaaaatgtccttccatacctcgtttagttcgctgttttcagcaactggttacaaacaaaagagtattactattgttcggattgcgtgtagatagacaagaaacaaagatcgagtagatgaaatgtaaccttgtgctgttacaagactcataacttcctctgctgctatgaatgtcaaggacggcttgagtcttgttatctggtatggttttgtatcatgttttagcaacttaaccgtaaaaaagctaacaggaacagaaaaaaaaaaaagcctttgaatacctgcttgccgagttttgtgtcgacaatttcagaggctagattatgtacctaaagaaacaacaatagtaagatgaaagttcagtgaagtaggatgtgaatagtataggcagtagcattatgaggttaatagtcactaacactaccttaactccaagcttgttgcagatggtttcagcaaggagaagagtataagcagattgtttgtctgctctagatggatctataagacgtcaaactattcgttagtttgatcattcattattgccaaagacagaatcaagaagaataaatcatgatgcttacctccaagaagcaagtctcgatccgatattacaacgatagtcagacgaatatcttcttcacctttttcatatttattttgcatgtgcattatactttcctttaatgtatcataatccatatgattcccaacctgcaaaagattgaaaaccatcaatacacaatgattttgaagctaattcttcttctttccagtgaaactgaaatttacgctatgtgaaacttggatgttcttgatttttcctgtagctatactctggtccactcctcttctgtcctctaacggtacatctgataatatttcctgtgtttaaaaaaaactatcagtaactcattccgtgagagcccgtcagaaagagactatggtatatgagagcataccaatgaactgcctggaccaagataactatcaaactccttgatcatattcacaacatctccacgccaaccaagcaaaagtatagattctttgggtcctttgaaagaatctgatccctgtgtaaaccatagaaatgaacgtcagaggtctcaaaagcctaatatcatagatagttcaagcattgtaggggggacagttcggagccagacctttgataaggacttactaggacgcgttataatcttttctagccgtgattttttttcctcatacacttgcttccgagtatcatcagtctcatctactgtcatgttctcagttttcatgtctgtatataaaaagtccttcttgagaggtgcaataaacaatagtttgtcagtttccatgagctcttcatcatcatttggatggaaatttactttcccatctcttaaaatcccacagaccacaacctggaaggagaaatacatctcttaaaaggccgcagactaaaacggtaatgattcaaaaacatactcaaaacattgtcaatcctacctcctggaaccccagtcttaactgtctatacttcatcccagttagattggggaagctgcaaaggttaaatacattttctgcaacgagtagagacttggtactaatcagtcttgataacaaaacttaataagtcaacatatgtataataatagtatcttacttgagtaatttagtaggtgcctgtagatctttatcaggtccttttgacgtgagcattggacaaacaatttggatgtagaattttcaaccggctccactttcaaccccgatatggacttgagaagatcatacatattagagcttgatacctgcattcatattcagaagcaaaagataggaaacaaatcagcactaaaaagacataaaaaccattgctgcacaatcttcacttacctctacaatggttgggatggattccatcttttgtataggttcaagggccaatacagaaagaaatgcgtctgtatcaacttcatacctgaaacaatgtttaacttaattgatttctcttttacaaactactgacaggtttcagaaaatatttatactttgttttcattcagaaccaaacaaactaaaccataatgagaagtagttaattcttaccgatcacctttcgttggtagtatgataatggcgcgcgccatacaggcggcagccctttcaaacgattttgtcatgttaagactacaactgcactgatagaagaatgaaatcagcattgtaaaatatatgcaaaccaacaagaacaataactaatatatatggcataacttaatttcaggttcacgtctgcatattacctctttgtaaggatgtcaagttgatcaaaatctttggcgtacgcctcagctagcttgtccatctctttccttggagtatcagacatgagcagaagtgtctgcttcctgaaagcatataacaaggaaaagtgattacccaagtcaacaaaaatgggtaaattaaattcatggtgtgaccaaatttaaattacctagctgtggtggtacctaagcggacagcatgctgttgataactgttgagttgctttagtatgaaaggcagatgactgtttattccacaaatgatgatatggtcagattctaggacttgcatatgtgccccttccctcacttttttcatatgatactgcccaagacaacatcgatcaggataacttttaccaattaaccaataatgtttatctcaagaacttacccgaaattgctctgtcattgtgcttaaaagccgagagtaaaacactattccccaaatggctaggacaaatccaatgagtctttcgaagcgtgtcttttgctgcagtttgcagtaaacatatacataggcatttatttagtaagcaagaactccatagaaatatcgtgagactaatataagttgttctgtgaagaagcaaatcatgacctccagatgagtatcagcgttaacgaggcatgcccaggcctcccagaggcagtcttctaaggatgtgtctttccttcacaacaagaaggaggggaataaaagtaagaaaccatgcaatggatatcacaagaagttcttaaacatagctaagttacctgaatttgaaaaagaagagtcctccaatgataacaaacgaaaagcatgttatcaggagcaccacaaataccctacaatagccatgacaagtgatcagaacggatgtcatatatagtcacatgcctgcaaacagctatactcgttaaaactctgagactacattggggtttaaggacgtacgtgccaaggttcttctcaagctgagtattgaagaggtaagaagaccttgcaagaccccatttgatatcatgggaagaaggaatggccttgagtaaaggatgtttgtctatagcgtttgatgcacatgcaaaaggcaagccagccttcactgaattctgaatgagatttggaagctcttgaaatatcttttgcgctattctcaacaccgcatacagtgggatgcatcctatcacaagtttatatggaagactctgcatatttaattaaacaagattatattattataagcatatggagtgataacacattcagtgatgaaactcattctatagattcaccttatagaatttggaatttaaatctttgaagtttttattaggcggctctgtatctcctgtcctttgagatttgactttgaaggtccctgtcatatagagagaaaaaaaatacaattagctaatcaagaatgagtctaattgtggaagaacagcaacaatgagaccgtaaagaattgcatcaaagttggaaaaatatacagaacctgacctctgaaactagaagacttaatcccacctaaaggcagagagtgtaaactcaagctcctgcaaaaaaagaatcagagatacacaacttgtaaacatcacaacccaatgagctttgattgaatgacaatttccagattttgaatcaatttacgatatacctttatcttacaaacccaaattccatttgaaactaaactctaaacccaaattcagagctcctaactaaaaccgtcacattttctaatcgaaaccattgaacttggctacatttactgtaagcaaaacatgaagtaaaattcaccggaagaagaaacaacaaaaataaactgtgatatatgcccaagcaagttttgaagataaggacgaagaagacgctgacggaactagagggttcggattataaagaaaagaagagaagacacagaaataaacagaggcattggcatttcttttagaatatagaatttgttgagaggagttacttagtattgatcgcttaaatgataaataccgtgttctttaagtatctgtatcagttgtttggaaataaagagcttgtttctaacaaaaacactcaaaatcttctgaggatcacaaacttcacaatcatcatcttatcacttatggataaagtcaccaccatgcaattgttttcagaaatatcaagtataagaaagaaattacaaaaacaaaacctgtgaaaagaagctaatcgatctcttgtcaaagcttgagaaggtagaatcaatggcttccaggtaaacaactgaacagccaccatctttcttaatcttctccttgatttatcttacgctctttttgtttctctccttatatatgtgggtggagtatggacacaaggctggttttttagatttttgcgtgattattttgttgttgttatattgttttggaccatattagttagcccgtggggtgttatgaacataaaaacaaatcgactaattttttttttggcttagaacttcatttgaataggtaaacaacgcagaggaatcgcgtccatagaatagaatataataaaaacaaaatggtactcttatcgctttgaattttaactactttctcttattccactcactattcacgtttttatatacatacatacatataagagtacatgtgctaatagctgtccaaacaaaaaaaagagtacatgtgctaataaacgactattttttagtacttttgtttcaatcgttaaaatctcatccacaattttgaatctcgaacgttactggctcccaaaatatcctctcaatgttgagacgccacatgacataacaataaaaatgacaaagacataacaagaaaatggattttgcattttttgaccattgagagagctaagcactttacacaataaacggtgttattgtgtttatatatgaattgatatattattttgttagtctatgaggagtatttaaaaatatccccaaaagaggtttttcaaaatatcactttttagtaaaacatactattaaacaagtttagaaaacttataaaaaagtgtcttaatgttgtaggaaaacatttggttctcattaaacataaaattaacaaatttaattctttagaaataaactagttgtagtaaaattctaatctacttgtagtaaaattctattctatttaatatcagtaaaaacaagtcaaattcaagttcaaataaagagggaaaagcaaaagtttgaaaattttgaacctcactcaatgtaataatgtatggttgtgatgagtcgagacaaaatcaagtactgccacgtggaataattcgtgacgtacacgtagctctctcataaaccccctcaaaacgaaagaaactctgttatttcttcattacccaaaatctaagctttcgtcgccggcgaaaccgtaaccgccaccggaggttctgtccaccttttttgctctccgattattttcttcgtctctcgtatgatgtactgtttttgctttaatggaagcatatactgaagcaatttctgcttttttttgtttcttcgttgtctagggatttttgttggtgctcgttatgtctacggaaccagaaggagtcgaatctgactccaacgctgattttgccataaatgcgtcgagttttgactacggtatggctcacacatctgaaaccctagctgatcccatgagctttcaagctcaggacttggtagtgaacctcactggagttgagcgaaaagtatttgtctctgctcgtgatgataaggatagtctctgtaacggggttgattttgatgctgattcagatctgcttaagaacaaggataagaaaggattttctaaagagaatctgaagctttttgactcagatttggtttgggctaaactaagaagttatccatggtggcctggactggtctttgataaatctgttgcctctaaagctgcgatgaggcacttcaagaaaggaaatgtcttggttgcgtattttggggattgtacatttgcttggaataatgcatctcagataaagccttttcatcagaatttctctcaaatgcaggagcagagtaactccgctgagtttcgtgatgctattgattgtgctttggatgaggtttcaaggagagtagagtttggtttatcttgctcttgtgtttcagaggaagcctataacaaactcaagactcagaacataatcaatgctggaattcgtgaggactcaagtgttagatacggtggagacaagttatcggatggaatctcttttgaacctgctaaacttgtggattatatgaagcatttagcttgctttccttgctatgatgcgactgagaagctgcaatttgtgattaaccgagctcaggtattggcttttcaacaatggaaagactattctcacttcattgactatgaaacatttgtaaggtcggtggaatctgctgcgaccctggcttctctcccagaagtaaatatggatgaaggaatatctgccaaaaagagaaagacagattataaagataatgctgaacagacaaaggagaagactttgtcagatttgactgtaaagaaacgctgtgggagcagatcaactgagaaattggatggtaagtcgcattctgaaaagaagcgtaaggttgagtcttcggaatctggtaagtctgagaaaaggatcaagaaaagtcagcaaaaggaggattcagtgtctaaacactctaatgaggaaagtcttttgtcagtgggtgatactaataaactgcagaagacggctgaaccgtgtcatggaactggagtggaaaatgagatgaattctttaactcctacacttaagccttgccgtgcttctaaatctacggaagttgagaatgagaagactaagaagccgagacatcaagagcttgctgaaagaaagatttcttctcctgatgagatgctctcaagccttcacgctgccaatacctcaacgggaatacctgattcaatcaacatagacccctcgaattatgaagattttgaaaagttcattaatgaactgttttgcagtaaactcaatggtgactcaaagaaggcaagtatcactgagacatcagaaccttgtgataagaaagactctgcagaagaagagatattacctgcaaataaagaaatcactggctcaggctcgaaagagcaaattggtctcaaggactgttctgcagattcattaccaccctatgctttagtcctcaactttgcggattcaggttcggttccatctgaagaaaagctgaacgagatatttaaacgttacggtcctctccatgagtctaagactaaggtcacgatgaagggtaagagagccaaagttgtgttcaaaagaggggaagacgcaaagactgcctttagcagcgcagggaaatacagcatctttggaccttctcttctaagttacagactcgagtatgtttgccccaaacggaaaaaaacaacatgactgattgagtcacggcatctcttaactttcagagattagggtctgatcagatatcatcagctaggtcttatgatgagagtagattttcgataaataaacgtaacctaggatttatgatgagagtaggttttcgataaataaaagtaacattcgtgtgatgagactaattcttaactttatgacatacaaaaccaaaactggaaataccaatgataacagtaaagttagtcgcaactgaagatgaggcttataagttaaaagagtaaattgattaaacaccaataacattaaacgatcatgtcttaattcaaaaactcataaaatgtaacacaaaatcaagttcttgaaacataaagtagaacagaacaagacttaaactgaactatcaaaaaccatatcaaaagcttgaagctttttgtacgggttgcttaagatcttggcttctccttcttttccttgaagagggccaagagtgaaacaccagaaaccttcacgaccttgaacctaactccgggaatatctcccacagcgtgacccttacgaccaaatccagcaatcaagacctcatcctgcaacaccataaacaagaaatgtatcagcatatgaatgaaactaatccatagtgtgatgattgaatagtcatttcatgtgacttacgttttcctcgatgtagttcaaacaaccatcattggggacaaaggcagcaatcttctttccattcttgataagctgaactctagcacacttacggatagcagagttaggctgcttagcctcaataccactgcatcatcaaacacaagagtctcatcaacgaccaatgtctctactcaacaaatcaattataagaaaaagtaaacttgaatgttatatcagacttacattttctcaagaacaattcctttagcgtgagaagaaccagcaaaaggcttcttccactcatttcccaagtgagacttcttgtactgcttgtcagcccacctctggttaattcggagtctcttcagcttacgcccagctcccataccacgtgtcttactgttaacaaatcatcacaaaataacatttgagaacaacttcactcgataaaccatagttaaaactcagaaaatcaataagaaattcatctaaataataacaagacgatagaagatttatctctaatacatcagcaaaagtgagcttcaaaacccaagagaccatagatactcatacagcgaattttaaatctccagttatcaaccatactagaactccagagtagctcaaaatttacacaatctattgtggatctatacataaaaaacatttagcaaacatatccagaaatgaagacgcatttgctatagaatcagttccaatcaaaaaccacaatcaaaagtcgaaaacatgtaacaatttcaaacaaaaaaaaaacacagcagactctatagaatccttcataattcatggaaacagcaagtgaatcagataaataaaacgctaaacagagaaatgagataggaacacgaaggatagatctaatagaggagaaacgtaccccatgtttgttgatggaggagaaagatcaacagcaaagagctatttgcaggaagcacaaagatgataagctcttaagcggctgagaaaaccctaaacctagtgaaggcagtgactcttaatatatgcgaagctggttctacctccgcggatttctaatacttggcccatcaattagtaggcccattaagtcatgggcttttaaaaaattgactataattgtctcaacttctcatcattcttttgggcttttaaaagctgaactctaaaccgttggatctaatggacgcattagatgacatacacgtatactctgatgctaattaatactgggaataaatacttccgccacatcagcataacccgtaatccttacggaaccggctgtaacaggtaaaagggacacacaaagagtgcactgcccgcacgacagtcactggttcagcccgtccccaccacttaaccgtcgataccacgacagaccaacgtggacaaatcacaaccgtttacttcaaaaaggcaattttgatccagtggtccatgtttattaatgcgccagctaaatccgaaagaggaagagagagagtcaaagaaaagctccagaacctcgtcaatggcggactgggatttttcataaagccagtcaaatccaggaggcgatggagaatattgaaaaagacgaacgtgacaaaaaaaagtttagctgaagaataaattgaagattcgaatcaaaccattagtcttgtgtcgaagctgtttctacgtcatttggtaagataaacttttgtctcctttcgctttcttaagggaaaaaaaaaagagatgattcgttattccaatttttgtttccgagattttaaaaagaaaaatagggagcttgaatttcacgctatgtaaaagtgtcactcgtagctcatttctctctctgattcttctatataaatgaatgtacaggttttgctgtgaagagttggttcgggtttaggttcggattgggaagatggaggagattagaggagtgcctacgtggcaggaagagttagcgagcctagttgacgccggattacgatacgacggagcaccgatcgatttaacggcggctacaaagagatcgggttttgtgtcggcggatggatccggatccgaaccgaaggagacattgaaagatcaagtgacgggattcatgaaatcgtggggagagatgcttcttgagctcgcgaaaggatgcaaggacattgtgcagcagacggtggtcactgatgactcattcctagtacggaagctccggaaaccggcggctaaagtgtcgaagaagcttagctttctaaacgagttcttgcctgaggatcgtgatcccattcacgcttggcctgtgattttcttcgtcttcctcttagcactcgcaggtaatcaaatcaacacaatgtgttattattagcttagtatctgaggttgattcagtattgtttatatgtagtttaaatagcttagtattgtaggtttgattccttgcattgacatattgaactttgaagtgcagcattaagctttagtccagagaacgatagaccagtgacggttataacgaaactgcgtttacatcctaccggtgctacacgtgtacagcttccagatggtagatatatagcttaccaagagctaggtgtttcagcagaaagagcaagatactctttagttatgcctcattcttttctttcctctcgacttgcaggtattcaaatcagtgttccatcggttttagttactacacattacgtttagtttgcctctaatgtttggaatgtgtacttaatcaaggcatacctggagtgaagaagtcattgttggtggagtatggtgtccgtttagtgtcatatgatcttccagggtttggagagagtgatcctcatcgaggtcgaaatcttagctcatcagcctcagatatgattaacctagcagctgctattggaattgatgagaaattttggttacttggctactctactggtagtattcatacatgggctggaatgaaatattttcctgagaaaattgcaggtattattaacactgttcctatcattagcataccagtcatgcaagactgttgctcagtgggtttggttttgtgaaactgcaggagctgcaatggtggctcccgtgatcaatccatatgagccaagcatggttaaagaagaggtggtaaaaacatgggagcaatggctaacaaagaggaaattcatgtactttttagctcggcggtttccaattcttctgcctttcttctaccgtagatcttttctctctggtaacctcgatcagctcgatcagtggatggcattgtcattaggagaaaaggtactaaatctcctccattgtagatcacaaacacaaagagaggagttctctaggagaaggagtcatcatatctgctaactctgttttcatctttcaggataaacttttaatcaaagatccaacgtttcaagaagtttatcaaaggaacgtggaggaatcagtccgtcaaggaatcacaaaaccatttgtagaagaagccgtgcttcaagtatcgaattggggctttactctttcggaattccgcacacagaagaaatgtgcaaccaacggtgtcctttcttggctcatgtcaatgtacagtgaagccgaatgtgaactaatcggatttcgaaaacccattcacatatggcaggtgagttctgcaccatacaatgcatcagttagtttgtttagtaaagttaatcaaaccttgatttctgtttctttaaagggaatggaggatcgagtggctccaccatcaatgagtgactacattagcagaatgattcctgaagcaactgtacataagattcgaaacgaaggtcacttctcgttcttctatttctgcgatgagtgccatagacagatcttctatgctttgtttggagaacccaaaggccagcttgaaagagtaaaagaaacagaggacactgtagtggaaacagaggcacataaggacacttagtactaatacaaccaccaaaaaaagagtaaagaagtaaaaaaggaaaggtgaaaattagctatagctagaaaatcaaaaactagatattttttgtttcatattttttaggggttacaccaagcagaattttatactagatggcattttacattcctaaagatgatttatcaatggttttattagataagtgagctatatttaatgacatgctcaagcaacctttatatttcgttgttgttctcttgactttcccatgctaaatgttttttagacgtgtgcttttgcattcaccgcctaggaaataaaaagttgataatataaccgtaataaaaaatatttaaaaattaattacgataatctcgaaatatattttaaaaactatcataaattccccacaatatcataagagatcacagagatacaaaaattctattcaataaaagcttccgaaatctaggcgtagtaatcagaattttagttttaacctgaaggtgctccataataaataaataaaatctcatattttacaaagcacagaaaccctaagtcatctgagagatagataatgaaaacggaagagatgaatgaatcatcagagtctcctcctccttctcgtacgttttcttcgttaccatacgacatcatactcaattgtttggctcgtgtctcgagataccattacccaactctatctctcgtctccaaggagttccaatctctcatcgcctcccgtgagctctacgctacacgatcccgcatcggaaaaaccgagaggttcctctatatctgcttaaacctgactaagagcaaccctaagtatcgctggttcacacttcccccagttcccaacgaacaaaaactactacccgtccctttgtttacttatcatctcaattcctcaaccgtctcctcaactgattcagagatttacataatcggaggcctcgtttggggaaatagaagcaagaaagcgtccatttttgactgtcgatctcatcaaacgcgtagactcccaaaaatgcgttttcctcgagcttctgctgccgctcatgtcattgacggtaagatctatgttattggaggcggcgagattcggggagaggtttatgacccaacgacccaaacttggctcacaacaccagtagatcacaccactgaagagtgtcaaaaagtttatgacaagcatggcgtgaatatttgctttgtagagatagacaacttgctgtgccaaacatttgtattcaacgggaagctatattggcgtcatccaaggggagatgattttggctgggctagggttaagggagtggaacaggaactcttccgtaatcatctttcttatgtggacaaatccggcggaggaagaagagtgacagtgtggtggaagtctgtggtggtgtttggctgtcaaggtcttggctattctacggaatttgatacagagatttggtgtgcagagatttcgtttgagagacgcggtttaaaagagctttggggatttgtagaatggtctagaaaagtgttcacatgtaagggatgtgattctcctacggattttgttatggattctgtccttgtgacatattgatcaatgggatgtatttttgttttttttagattttttctgtgaggagtctttttagtataattcgagaatttaagagacaataaacagcttgtgtgtctcttaataagcaaataatttaagaacataaacatcaacacacttgtgaaagaatttggtaattagtcctcgaatttagaccttcaattatgtgaaaattttactaacgttccttcgtttcaatacacaagattagactattatgactttgtttggtttgtgagcacaactcatatataggggttgtatgcttggttggtatagaaatattggattctgatttttgtacatcaataacacttcctaggggttgcttctttacatgaaaccggccgatagcaaaacaaagcctatggccggtttcgattgagagcagagctggccctgaccacagccaattgaaataattgctatggcccattaattctcaggaccggccctgattgagagacgtggtctgacagagctttggggatgtgttgaatggtctaagaatgtgtttacctttgacgggtgtgaccctcgttccgatttcttcttgaattctgcgattagcacacattaattgatatgtccaagtatttttaggatcattagatagattctgcttatgagattttgttgtagtatctgagagagttttatattttctttgtcgggaatgtttttgaacatcttgagtatgttttcaagagatgcatgatgataaaaaaaattacatgaatgtaactctaaattactaaataagcatgtggcctaagaacataaaatatcgacccaccacttgtgaaaggttttgtcgttgggttaggtaatggtacttgaaatcttgtttgaaatagtgttctcgaatttagacctttcacgatatgttatttattattgttccttcgtttcaattcttctttctcacacaagatttgactacgattttttctttttgtatacacagatttattttgatcatataattccttggccggtcaaaaaggctcatttaaataaaagcccatcagaccttgaattcctctctaattgatgattaggtttttttttgggtaaagtaatgatgattagggtttaaagactcaaatgaagaaaaaaaatcgaaacacaaacgacgacggaagagatgagctccccgaaatcatcatcatcagagtcctcgtctcctccgacgtcgttttcgtcgttaccgttcgacgtagctctgaattgttgggctcgtgtctcgagaatccattatccaactctattcttagtctccaagaatttaagatctctcatcgcttcgcctgagctcgaggccacacgactccgcattggaataacagaagatttcgtttgcttagacctcaataagaaaaaccctaaccctagctggttcatactttcctcaactccaaaacaacagaagttactacccatcccttcgtttccttatcaacatcccaaatactcgaccattcttttagtcgattcattgatttacattatcggaggcatcgtgaatagacaaaggagcaatagagtgttgatactcaattctctatctcaccaatggagtagtctcccaaacattgcgcctacctcgagtttctccagccgctgatgtaatcgacggtaagttgtacgtgattggaggctcttcgtccaaaaatatcggggattggggagaggtttatgatccaaagacacatacttgggagccaatattgcctacaacactagatctcacagctcaaaagagtgtggttcaagatagattagtaatgggtggaaaggtttatgccatggatggtttgaagattgagctaaagacgaatatttgtttggtagagaaatgtttgcgtctagtgtcgtattccaatcatagtctttattggaatgatccaacggaagattgtgtgtggaggttggttcgagggcttgaagaactttgtgatcattatccatatttttttaataatcataattcgcttgcaaactccggcggagaaagaagcgtgacattgtggtggaagtcggtggtgattcaacctccaaattaccattgcactaaggagtgtaaaacagagatttggtgtgcagggctttcgtttgagagacgtggtctaaaagagctttggggatttgttgaatggtctaagaatatgtttacctttgaagaatgtgactctcgtttcgatttccttttgcattaattcacacattaattgatatgtccaaggatttttaggatcattgatagactaagaggatttaaggttttcttttattttattttatttttaatgattttctaatagagattttatatttactatatattttgtcacagatatcaaaaactgattgtaaaaatttatttattgttttggataaatctaaattaattattttcttgaagtttataattcaccatcaatagtcagtaactaataaaaatgcattaaaacaacaagtctattaattctaggttttcttcgtaaattagtttgaaggtataaaaccctaattcgaaaacctccccaaatcaggaaataatgacgacgaaaaagaggaagaaataatcaaagtctcctccgacgacgtttctttctttaccagacgatatatatcgctttcaattgtttggctcgtatctcgagattccattatccaactctatcactcgtctccaagggtttccgatcactcatcgcttcgcctgagctcgaggccacacgttccttcattggggaaaccgagaatcacctttgtgtctgcttaaacctcaacaagaacaacaactataatcctcgctggttcacactttccccgatagccaaacagaaattgaaatccatcccttggcatcgtcatcaatatcccaaatcctcaacagttgttgcaaatggttcagatatttacatagtcggaggcttcgtttgcggaacaagtagcaagagagtatttgttttcgatagtcgatctcatcaatggcgtagactccacgacatgcgtttacctcgtgtttctgcagttgtaaatatagttgacaagaagatctatgttattggaggctacaagcccaggaatatcaaagattgtggagaggtttatgatccaaatacccaaacttgggagccattattgcccacgacagtaaatctcaccattcaaaactgtgtggtttcaggtggcttggtaatgggcgggaaacgttatacaacgaatggcacgaaaatgaacacttgctttgtagagttagagaacttgctgttgggtctaagtgaaacgtatagagatctagtgtggcgtgaactgaaggaagatgtttggcgtgtggttaggggacttgaacaactgtctcacaatcaaaattttacttatgtgggaaactccggcggagggagaagagtggccatttggtggaagtcgatggtggtgtttcgccctcgaggtcgtagccactcgactaagaaatgtaaaacggagatttggtgtgcagaaatttcagttgagagacgcggtttaggagagctttggggaagatttagttttagttttcgagatagttttatatatatttttttgtgggagtttttttgaacatcttgaatctgatttcaagagataatacacaaaattaaattggtgttgtatctctaaattactaaataagcagttgcctaagaacataaatatcatcccacgctacttgtgaaagagtttatcgttgggttaggtatgacctttaactcttgcgtgaaataatgttctcgaatttagaccttccactatatgtcccttcgcttcaattcttgtttctcatatacaagatttgactatggggttttctttttgttcgcaacgcacgaatttattttgatcatattccttggttggtaaatatttggattataatgttgcatatcaataacacctccttggtttgctttttctaatgcatctatgaaacccggtagcgagaatatctctctattttatattataaaagtttaatcgtgatattcttaaaactatcttagatctcggaaattttcctaaatttccatttataaatgtttccgaaattttagggtttagcttagtcgtagtaaacatgcgttgatgctagacctagacggagtaaaataaataaatagatcgaaggtaaaaaaagctcctatctaaaatcaaagcacagaaaccctaaagcctcccagaaaggcagaaacagaacaccatgttttgctcgtgtctcgagattgtttttttccttgccggaagacatcattctcaatttccatcgttaccggacgaaaatgagacgaacaaatcatcagactctcctccgacagtattttcatcgttaccggacgaattaattctcaattgtttggctcgtgtctcgagattctaccgtccatctctgtccttggtcaacaaggaattccaatctctcatcgcttctcctgatctcgaggccacgcgctcccgcataggagtaacagagaatcacctctatgtctgcttggagtcgaataagaacaaccctaatcctcgctggttcacacttgcaccaattcccaaagaacagaaagtgaaacctatcatcccttcgtttccttatcaacatcccacatcatcaacttttgtctctattggctcagagatttacatcatcggaggcttcgttaagcgaaagagaagcaggagagtcttggttctcgattgtcgatctcatcaatgtcgtaggctccccaacatggctctacctcgagtttctgcagccgctgatgtcatcgacggtaagatctacgtggttggaggatcaaagtctaaaaatatcgacaattggggagaagtttttgatccagagacccaaacgtgggagccaatatttcccacaacagttgatctcaccactcaaaagagtgtgtttccaggtaaattggttatgggtgggaaagtttatgacatggatgggttgaaagttaacttgaacctgaatagttgcgtggtagagatagacaacatgatgtgccaaatatcagtttgcaaagggatactagtttggtatgattcagaggaagatttggtgtggaataaggtaagaggacttgaaggactactgccccgtaattcatattttccttgctatcttgtttcggttgcaaatcatgaccgaggaagaagagtgacagtttggtggcagtcgatggtgtttgaccgtctaggtctcgattggactaaggaaggtaaaacggagatttggtgtgccgagatatcgttggagagacgcggttttggagagctttggggattcgtcgaatggtcaaagaaagtgtttacttatgacggatgtgattctccttcagatttctttttgcattccgctattgtgacttattgattaggatttgttggaatgtttctagaacatttattactattgactttgatttcaattattgaactttttcttttcgtatcaatcatttgctttcatttgtagtttctttacacaagattgtctttgaatgttaatattttgtagtggctacaaaacaagtaaatctaatcaatagaggcccatttaaggcccattaaaccttgaatattaaaaattgattcagagttagaaaaagaaaagaaacacatgacccctaaatcgagaggcttcgttaggagaaggagaagcagaagagtgttggttctcgattgtcgatctcaacaatggcgtagtctccccaaaatgcgtcaacctcgagcttctcctgccgcgtatgttaaggatggtctgatcattgtgattggaggttgcaggtccaagaatatcgagacttggggagagatttatgatctaaagaccaatacttgggggcgaatactgctccaatcacatgatcccacagttcaaaatgcttacttgaatcgctttaaacctaacttgcagacgaatgcttgctatgtagagattgacaaggtgtcgtgcctgatatttttatccgatgggaagctattttggcgtgaaacaaagcaaggttttgagaggtgtagtgttatattgggagatgatgagcaagtgtcctcttatcaacttgtttcggtggcaaacgccgccggaggaggaagagtgacagtttggtggaagtcggggttaaaagttctggatctcttaagtggcactgagacttgggaatgttacacaaatattcggtgtgcagagatttcgtttgagagaagaggtttaagagagctttggggattcgttgaatggtctagagaggtgtttaccgttgatggatatgacgatacttacgatttctttttaaattctgctattgtgacctattgatcagtgggactttatcttacttgtactgtgggaattttgagtatgattttaatagataaataaatgtgatttgctaacaacattacaacatagatctaagcattcaaggttgtgtggtgcctgatggcttttgatgaaggggaggttttctactttgtatcagacttttgcttgctagtgaaagagagaataatgggcacaacatttttgttactccatgggaaagataatgtagagtggtctcaaggaaaaaatggtgtggagagtggtcaagggacttggattgccaaacattgtgtttcagtttggtggtgtacaatgttggatcacccctatggtcgtaaagtgcagatttcgcagagctttccaagggaatcatagaatcgtcaacagagttgtgtttcgaaccaaaggatgtatatttcgttccactttcttcttgcactctgctacagtaacacatggatttgtatgctctcatgggagtgtacaaactcctagtgattggtgtttttatttgtcctttggaatgcttaaagaatgatatacaacagcaggaagaaatcatagcacattcattacaaaaccaatggaaaatacatactttttgttgaggtcgtatcagaaacatgacaatcaaaaggcagagccggtgttgttggattttcgaagcatcatatctttggcttcattaatcttagaagccagatagtgactgcctccagcgtccgggtgattgatgtaagtcttaggtctaagacatgagtaatagaggaaagagttgtataagtatatgtgaaagaatgtgtaataagatttaacaatgtacaagttaagcaaagcgtttcccttgttgtctctgtagaacaaagaaactaaatctgtgtgagagatagagatgaagagaactaacctgagaggttagaagtgggaaaagaaaaccaacacaatgatcaatgtgattttaatcttttattcagattttaattattaaactttttataaatacatctaaatctaataaactgttttttttgtctcatcaacaaacaagtcaatttatttaaatcaataaaataacaaagttaatcaatttattgcgtaaaatgtatttctaaatttctttaagaagaagaaaaaagtcacaaacatttataatactttggatatttttcctttttagtaaattaaaaaaaaaactgatataataataataaatcaactgatattttattaatattgatcttatttatgatatgtttatgaattattgtctaaatattttgaaattttgtagtaattaactggtatcaaatatctcaacggtttgatgcttataatcgaattgttatagttatgcaaaaaaataatatcaaaaatgataattttgtaatttttaaatgatattaaatattttggaagttttgttttagtaactaatcgtgtagttaatgtagaaagattttgggaagatagttaaatgtcaaatatttaattcgaagatttactttctaattatcaaaaacaattattaaatgctagtggcagtcacagtaaataagtctcaacttgaggatttatttcacaaagtgattgcaaaaatgtatatgtagatgatcaatatgattttatttagattttatttttttagcaatacatctaataaatagttatctcatcgacaatataagtcaatttaattcaatcaataaagaacaaagttaatcaatttatcaaaagttatttataaaaattatcctaaatttctttaagaaatagacaaaagtcaaaagcatttataatattttggatataacttttggccatatgcatggaccctataaataccatccttgaagaagaagaaaaaaaaaactccgatgacggaagagatgagtaaagagtctcctcctcctcctccgacgtcgttttcttcgttaccggacgacgtcgctctcgattgtcgggctcgtatatcgagattccattatccaactctttctctcgtctccaagggtttcagaactctcatcgcctccccggagctcgaggccacacgatcctttatcggaaaaccagagaatcacctctgcgtctgcttgaggctgtataaaaaccctaatcctctctggttcatattttccccaattccgaaacagaaattgaaacccatcgtcccatggtttcctaaccaacaatatcctcaatacccgaccgttgtctcaaatggttcacagatatacataatcggtggattcgttaggagaaggagaagcaacagagtgtcgatttttgattatcgaacttatcaatggcgtagactccccaaaatgcgtcaacctcgagtttatcccgccgcgtctgtaatcgacggtaagatctatgtgattggaggcttcagaggctccatgcccacagatattgagaactcaggagaagtttatgatccaaagaccaatacttgggagccaatattgctcacatcacttgatctcactgttcaaaatgttttcaagaaaaaacattactttacgaccaaggcatgcttagtgattaataaggtgtcgtgcctactatatgtttccgatgggaagctatattggcgtgaagacaaggaaggttttgagtgccgtaaggtttatggacttgcagaacagtcctctaatctgtttcgtgtggtggcaaactccggcggcggaggaagagtgacagtttggtggaagtcgatgacaaaaggttgcgagtttgactgtctgctgactgaggagtgtgaaaccaagatttggtgtgcagagatttcgcttgagagaagaggtttaagagagcttcggggatttgttgaatggtctaaagaggtttttaccattgatagatgtgactatatttacgatttcatttcacaatacgttactgtgacttattgatcaatgaaatgtagtaaaaactccttagagattggtgtttgtatttatcaaatgacttcttttaaaattcttaaagaaataatatacaacaagaaggagaaacatagtggtagcacattcataacagaatcaatggaaagttctgttgggttcgtatcagacacatgacaaatcaaaaggcagaaccgctgttgttggattttccaagcatcatatctttggcttcattgatcttagaagcaagatagtgactgcctccagcgtctgggtgatttgcaaccatcactctccggtgagcttccttcaccttatctgccacaacactctccctgttataaaaaaaccaccacacaaacttagtcaacccattcattttaaaatcaataatctcctacacaaccaacaatgaaaaataggattcaagaacataatctatgtagtttgctttcatctaaagggtgttaaatcaataacttttgacctcaaataactagcagaacaacactataaccacattttcaaacaggattctgaagggtatatagcttctatgaatctcagcctcaggaccagttcaatctgaggagcaaaaacaaaaagatgaagcaggtataagaaagccggacgaacctaacaccaagaatgagagcagcttctcggcgggtcatagaactttggaaaccaccttcataaaacctgcgcattctaggaacacgaggtcttgccttgaaagcttgccaagccaatataccatatctaccagcaacagcagcagcagctacagcagcacctgcaatcattggcgtagcctgtgtatagccagaaccaataaaaaccaacgtcagatacaaaaaaaggaacacactttggctttggaaatcaaagataaaaaacattcttaattgatatcggcaaaccacagataagatcatctaatgtatccattttgttgtgactttaacataagacaacaaaaggatcctgatc

SEQ ID NO: 1399 - DNA, 99008 bp, Arabidopsis thaliana
cgcacacagaagaaatgtgcaaccaacggtgtcctttcttggctcatgtcaatgtacagtgaagccgaatgtgaactaatcggatttcgaaaacccattcacatatggcaggtgagttctgcaccatacaatgcatcagttagtttgtttagtaaagttaatcaaaccttgatttctgtttctttaaagggaatggaggatcgagtggctccaccatcaatgagtgactacattagcagaatgattcctgaagcaactgtacataagattcgaaacgaaggtcacttctcgttcttctatttctgcgatgagtgccatagacagatcttctatgctttgtttggagaacccaaaggccagcttgaaagagtaaaagaaacagaggacactgtagtggaaacagaggcacataaggacacttagtactaatacaaccaccaaaaaaagagtaaagaagtaaaaaaggaaaggtgaaaattagctatagctagaaaatcaaaaactagatattttttgtttcatattttttaggggttacaccaagcagaattttatactagatggcattttacattcctaaagatgatttatcaatggttttattagataagtgagctatatttaatgacatgctcaagcaacctttatatttcgttgttgttctcttgactttcccatgctaaatgttttttagacgtgtgcttttgcattcaccgcctaggaaataaaaagttgataatataaccgtaataaaaaatatttaaaaattaattacgataatctcgaaatatattttaaaaactatcataaattccccacaatatcataagagatcacagagatacaaaaattctattcaataaaagcttccgaaatctaggcgtagtaatcagaattttagttttaacctgaaggtgctccataataaataaataaaatctcatattttacaaagcacagaaaccctaagtcatctgagagatagataatgaaaacggaagagatgaatgaatcatcagagtctcctcctccttctcgtacgttttcttcgttaccatacgacatcatactcaattgtttggctcgtgtctcgagataccattacccaactctatctctcgtctccaaggagttccaatctctcatcgcctcccgtgagctctacgctacacgatcccgcatcggaaaaaccgagaggttcctctatatctgcttaaacctgactaagagcaaccctaagtatcgctggttcacacttcccccagttcccaacgaacaaaaactactacccgtccctttgtttacttatcatctcaattcctcaaccgtctcctcaactgattcagagatttacataatcggaggcctcgtttggggaaatagaagcaagaaagcgtccatttttgactgtcgatctcatcaaacgcgtagactcccaaaaatgcgttttcctcgagcttctgctgccgctcatgtcattgacggtaagatctatgttattggaggcggcgagattcggggagaggtttatgacccaacgacccaaacttggctcacaacaccagtagatcacaccactgaagagtgtcaaaaagtttatgacaagcatggcgtgaatatttgctttgtagagatagacaacttgctgtgccaaacatttgtattcaacgggaagctatattggcgtcatccaaggggagatgattttggctgggctagggttaagggagtggaacaggaactcttccgtaatcatctttcttatgtggacaaatccggcggaggaagaagagtgacagtgtggtggaagtctgtggtggtgtttggctgtcaaggtcttggctattctacggaatttgatacagagatttggtgtgcagagatttcgtttgagagacgcggtttaaaagagctttggggatttgtagaatggtctagaaaagtgttcacatgtaagggatgtgattctcctacggattttgttatggattctgtccttgtgacatattgatcaatgggatgtatttttgttttttttagattttttctgtgaggagtctttttagtataattcgagaatttaagagacaataaacagcttgtgtgtctcttaataagcaaataatttaagaacataaacatcaacacacttgtgaaagaatttggtaattagtcctcgaatttagaccttcaattatgtgaaaattttactaacgttccttcgtttcaatacacaagattagactattatgactttgtttggtttgtgagcacaactcatatataggggttgtatgcttggttggtatagaaatattggattctgatttttgtacatcaataacacttcctaggggttgcttctttacatgaaaccggccgatagcaaaacaaagcctatggccggtttcgattgagagcagagctggccctgaccacagccaattgaaataattgctatggcccattaattctcaggaccggccctgattgagagacgtggtctgacagagctttggggatgtgttgaatggtctaagaatgtgtttacctttgacgggtgtgaccctcgttccgatttcttcttgaattctgcgattagcacacattaattgatatgtccaagtatttttaggatcattagatagattctgcttatgagattttgttgtagtatctgagagagttttatattttctttgtcgggaatgtttttgaacatcttgagtatgttttcaagagatgcatgatgataaaaaaaattacatgaatgtaactctaaattactaaataagcatgtggcctaagaacataaaatatcgacccaccacttgtgaaaggttttgtcgttgggttaggtaatggtacttgaaatcttgtttgaaatagtgttctcgaatttagacctttcacgatatgttatttattattgttccttcgtttcaattcttctttctcacacaagatttgactacgattttttctttttgtatacacagatttattttgatcatataattccttggccggtcaaaaaggctcatttaaataaaagcccatcagaccttgaattcctctctaattgatgattaggtttttttttgggtaaagtaatgatgattagggtttaaagactcaaatgaagaaaaaaaatcgaaacacaaacgacgacggaagagatgagctccccgaaatcatcatcatcagagtcctcgtctcctccgacgtcgttttcgtcgttaccgttcgacgtagctctgaattgttgggctcgtgtctcgagaatccattatccaactctattcttagtctccaagaatttaagatctctcatcgcttcgcctgagctcgaggccacacgactccgcattggaataacagaagatttcgtttgcttagacctcaataagaaaaaccctaaccctagctggttcatactttcctcaactccaaaacaacagaagttactacccatcccttcgtttccttatcaacatcccaaatactcgaccattcttttagtcgattcattgatttacattatcggaggcatcgtgaatagacaaaggagcaatagagtgttgatactcaattctctatctcaccaatggagtagtctcccaaacattgcgcctacctcgagtttctccagccgctgatgtaatcgacggtaagttgtacgtgattggaggctcttcgtccaaaaatatcggggattggggagaggtttatgatccaaagacacatacttgggagccaatattgcctacaacactagatctcacagctcaaaagagtgtggttcaagatagattagtaatgggtggaaaggtttatgccatggatggtttgaagattgagctaaagacgaatatttgtttggtagagaaatgtttgcgtctagtgtcgtattccaatcatagtctttattggaatgatccaacggaagattgtgtgtggaggttggttcgagggcttgaagaactttgtgatcattatccatatttttttaataatcataattcgcttgcaaactccggcggagaaagaagcgtgacattgtggtggaagtcggtggtgattcaacctccaaattaccattgcactaaggagtgtaaaacagagatttggtgtgcagggctttcgtttgagagacgtggtctaaaagagctttggggatttgttgaatggtctaagaatatgtttacctttgaagaatgtgactctcgtttcgatttccttttgcattaattcacacattaattgatatgtccaaggatttttaggatcattgatagactaagaggatttaaggttttcttttattttattttatttttaatgattttctaatagagattttatatttactatatattttgtcacagatatcaaaaactgattgtaaaaatttatttattgttttggataaatctaaattaattattttcttgaagtttataattcaccatcaatagtcagtaactaataaaaatgcattaaaacaacaagtctattaattctaggttttcttcgtaaattagtttgaaggtataaaaccctaattcgaaaacctccccaaatcaggaaataatgacgacgaaaaagaggaagaaataatcaaagtctcctccgacgacgtttctttctttaccagacgatatatatcgctttcaattgtttggctcgtatctcgagattccattatccaactctatcactcgtctccaagggtttccgatcactcatcgcttcgcctgagctcgaggccacacgttccttcattggggaaaccgagaatcacctttgtgtctgcttaaacctcaacaagaacaacaactataatcctcgctggttcacactttccccgatagccaaacagaaattgaaatccatcccttggcatcgtcatcaatatcccaaatcctcaacagttgttgcaaatggttcagatatttacatagtcggaggcttcgtttgcggaacaagtagcaagagagtatttgttttcgatagtcgatctcatcaatggcgtagactccacgacatgcgtttacctcgtgtttctgcagttgtaaatatagttgacaagaagatctatgttattggaggctacaagcccaggaatatcaaagattgtggagaggtttatgatccaaatacccaaacttgggagccattattgcccacgacagtaaatctcaccattcaaaactgtgtggtttcaggtggcttggtaatgggcgggaaacgttatacaacgaatggcacgaaaatgaacacttgctttgtagagttagagaacttgctgttgggtctaagtgaaacgtatagagatctagtgtggcgtgaactgaaggaagatgtttggcgtgtggttaggggacttgaacaactgtctcacaatcaaaattttacttatgtgggaaactccggcggagggagaagagtggccatttggtggaagtcgatggtggtgtttcgccctcgaggtcgtagccactcgactaagaaatgtaaaacggagatttggtgtgcagaaatttcagttgagagacgcggtttaggagagctttggggaagatttagttttagttttcgagatagttttatatatatttttttgtgggagtttttttgaacatcttgaatctgatttcaagagataatacacaaaattaaattggtgttgtatctctaaattactaaataagcagttgcctaagaacataaatatcatcccacgctacttgtgaaagagtttatcgttgggttaggtatgacctttaactcttgcgtgaaataatgttctcgaatttagaccttccactatatgtcccttcgcttcaattcttgtttctcatatacaagatttgactatggggttttctttttgttcgcaacgcacgaatttattttgatcatattccttggttggtaaatatttggattataatgttgcatatcaataacacctccttggtttgctttttctaatgcatctatgaaacccggtagcgagaatatctctctattttatattataaaagtttaatcgtgatattcttaaaactatcttagatctcggaaattttcctaaatttccatttataaatgtttccgaaattttagggtttagcttagtcgtagtaaacatgcgttgatgctagacctagacggagtaaaataaataaatagatcgaaggtaaaaaaagctcctatctaaaatcaaagcacagaaaccctaaagcctcccagaaaggcagaaacagaacaccatgttttgctcgtgtctcgagattgtttttttccttgccggaagacatcattctcaatttccatcgttaccggacgaaaatgagacgaacaaatcatcagactctcctccgacagtattttcatcgttaccggacgaattaattctcaattgtttggctcgtgtctcgagattctaccgtccatctctgtccttggtcaacaaggaattccaatctctcatcgcttctcctgatctcgaggccacgcgctcccgcataggagtaacagagaatcacctctatgtctgcttggagtcgaataagaacaaccctaatcctcgctggttcacacttgcaccaattcccaaagaacagaaagtgaaacctatcatcccttcgtttccttatcaacatcccacatcatcaacttttgtctctattggctcagagatttacatcatcggaggcttcgttaagcgaaagagaagcaggagagtcttggttctcgattgtcgatctcatcaatgtcgtaggctccccaacatggctctacctcgagtttctgcagccgctgatgtcatcgacggtaagatctacgtggttggaggatcaaagtctaaaaatatcgacaattggggagaagtttttgatccagagacccaaacgtgggagccaatatttcccacaacagttgatctcaccactcaaaagagtgtgtttccaggtaaattggttatgggtgggaaagtttatgacatggatgggttgaaagttaacttgaacctgaatagttgcgtggtagagatagacaacatgatgtgccaaatatcagtttgcaaagggatactagtttggtatgattcagaggaagatttggtgtggaataaggtaagaggacttgaaggactactgccccgtaattcatattttccttgctatcttgtttcggttgcaaatcatgaccgaggaagaagagtgacagtttggtggcagtcgatggtgtttgaccgtctaggtctcgattggactaaggaaggtaaaacggagatttggtgtgccgagatatcgttggagagacgcggttttggagagctttggggattcgtcgaatggtcaaagaaagtgtttacttatgacggatgtgattctccttcagatttctttttgcattccgctattgtgacttattgattaggatttgttggaatgtttctagaacatttattactattgactttgatttcaattattgaactttttcttttcgtatcaatcatttgctttcatttgtagtttctttacacaagattgtctttgaatgttaatattttgtagtggctacaaaacaagtaaatctaatcaatagaggcccatttaaggcccattaaaccttgaatattaaaaattgattcagagttagaaaaagaaaagaaacacatgacccctaaatcgagaggcttcgttaggagaaggagaagcagaagagtgttggttctcgattgtcgatctcaacaatggcgtagtctccccaaaatgcgtcaacctcgagcttctcctgccgcgtatgttaaggatggtctgatcattgtgattggaggttgcaggtccaagaatatcgagacttggggagagatttatgatctaaagaccaatacttgggggcgaatactgctccaatcacatgatcccacagttcaaaatgcttacttgaatcgctttaaacctaacttgcagacgaatgcttgctatgtagagattgacaaggtgtcgtgcctgatatttttatccgatgggaagctattttggcgtgaaacaaagcaaggttttgagaggtgtagtgttatattgggagatgatgagcaagtgtcctcttatcaacttgtttcggtggcaaacgccgccggaggaggaagagtgacagtttggtggaagtcggggttaaaagttctggatctcttaagtggcactgagacttgggaatgttacacaaatattcggtgtgcagagatttcgtttgagagaagaggtttaagagagctttggggattcgttgaatggtctagagaggtgtttaccgttgatggatatgacgatacttacgatttctttttaaattctgctattgtgacctattgatcagtgggactttatcttacttgtactgtgggaattttgagtatgattttaatagataaataaatgtgatttgctaacaacattacaacatagatctaagcattcaaggttgtgtggtgcctgatggcttttgatgaaggggaggttttctactttgtatcagacttttgcttgctagtgaaagagagaataatgggcacaacatttttgttactccatgggaaagataatgtagagtggtctcaaggaaaaaatggtgtggagagtggtcaagggacttggattgccaaacattgtgtttcagtttggtggtgtacaatgttggatcacccctatggtcgtaaagtgcagatttcgcagagctttccaagggaatcatagaatcgtcaacagagttgtgtttcgaaccaaaggatgtatatttcgttccactttcttcttgcactctgctacagtaacacatggatttgtatgctctcatgggagtgtacaaactcctagtgattggtgtttttatttgtcctttggaatgcttaaagaatgatatacaacagcaggaagaaatcatagcacattcattacaaaaccaatggaaaatacatactttttgttgaggtcgtatcagaaacatgacaatcaaaaggcagagccggtgttgttggattttcgaagcatcatatctttggcttcattaatcttagaagccagatagtgactgcctccagcgtccgggtgattgatgtaagtcttaggtctaagacatgagtaatagaggaaagagttgtataagtatatgtgaaagaatgtgtaataagatttaacaatgtacaagttaagcaaagcgtttcccttgttgtctctgtagaacaaagaaactaaatctgtgtgagagatagagatgaagagaactaacctgagaggttagaagtgggaaaagaaaaccaacacaatgatcaatgtgattttaatcttttattcagattttaattattaaactttttataaatacatctaaatctaataaactgttttttttgtctcatcaacaaacaagtcaatttatttaaatcaataaaataacaaagttaatcaatttattgcgtaaaatgtatttctaaatttctttaagaagaagaaaaaagtcacaaacatttataatactttggatatttttcctttttagtaaattaaaaaaaaaactgatataataataataaatcaactgatattttattaatattgatcttatttatgatatgtttatgaattattgtctaaatattttgaaattttgtagtaattaactggtatcaaatatctcaacggtttgatgcttataatcgaattgttatagttatgcaaaaaaataatatcaaaaatgataattttgtaatttttaaatgatattaaatattttggaagttttgttttagtaactaatcgtgtagttaatgtagaaagattttgggaagatagttaaatgtcaaatatttaattcgaagatttactttctaattatcaaaaacaattattaaatgctagtggcagtcacagtaaataagtctcaacttgaggatttatttcacaaagtgattgcaaaaatgtatatgtagatgatcaatatgattttatttagattttatttttttagcaatacatctaataaatagttatctcatcgacaatataagtcaatttaattcaatcaataaagaacaaagttaatcaatttatcaaaagttatttataaaaattatcctaaatttctttaagaaatagacaaaagtcaaaagcatttataatattttggatataacttttggccatatgcatggaccctataaataccatccttgaagaagaagaaaaaaaaaactccgatgacggaagagatgagtaaagagtctcctcctcctcctccgacgtcgttttcttcgttaccggacgacgtcgctctcgattgtcgggctcgtatatcgagattccattatccaactctttctctcgtctccaagggtttcagaactctcatcgcctccccggagctcgaggccacacgatcctttatcggaaaaccagagaatcacctctgcgtctgcttgaggctgtataaaaaccctaatcctctctggttcatattttccccaattccgaaacagaaattgaaacccatcgtcccatggtttcctaaccaacaatatcctcaatacccgaccgttgtctcaaatggttcacagatatacataatcggtggattcgttaggagaaggagaagcaacagagtgtcgatttttgattatcgaacttatcaatggcgtagactccccaaaatgcgtcaacctcgagtttatcccgccgcgtctgtaatcgacggtaagatctatgtgattggaggcttcagaggctccatgcccacagatattgagaactcaggagaagtttatgatccaaagaccaatacttgggagccaatattgctcacatcacttgatctcactgttcaaaatgttttcaagaaaaaacattactttacgaccaaggcatgcttagtgattaataaggtgtcgtgcctactatatgtttccgatgggaagctatattggcgtgaagacaaggaaggttttgagtgccgtaaggtttatggacttgcagaacagtcctctaatctgtttcgtgtggtggcaaactccggcggcggaggaagagtgacagtttggtggaagtcgatgacaaaaggttgcgagtttgactgtctgctgactgaggagtgtgaaaccaagatttggtgtgcagagatttcgcttgagagaagaggtttaagagagcttcggggatttgttgaatggtctaaagaggtttttaccattgatagatgtgactatatttacgatttcatttcacaatacgttactgtgacttattgatcaatgaaatgtagtaaaaactccttagagattggtgtttgtatttatcaaatgacttcttttaaaattcttaaagaaataatatacaacaagaaggagaaacatagtggtagcacattcataacagaatcaatggaaagttctgttgggttcgtatcagacacatgacaaatcaaaaggcagaaccgctgttgttggattttccaagcatcatatctttggcttcattgatcttagaagcaagatagtgactgcctccagcgtctgggtgatttgcaaccatcactctccggtgagcttccttcaccttatctgccacaacactctccctgttataaaaaaaccaccacacaaacttagtcaacccattcattttaaaatcaataatctcctacacaaccaacaatgaaaaataggattcaagaacataatctatgtagtttgctttcatctaaagggtgttaaatcaataacttttgacctcaaataactagcagaacaacactataaccacattttcaaacaggattctgaagggtatatagcttctatgaatctcagcctcaggaccagttcaatctgaggagcaaaaacaaaaagatgaagcaggtataagaaagccggacgaacctaacaccaagaatgagagcagcttctcggcgggtcatagaactttggaaaccaccttcataaaacctgcgcattctaggaacacgaggtcttgccttgaaagcttgccaagccaatataccatatctaccagcaacagcagcagcagctacagcagcacctgcaatcattggcgtagcctgtgtatagccagaaccaataaaaaccaacgtcagatacaaaaaaaggaacacactttggctttggaaatcaaagataaaaaacattcttaattgatatcggcaaaccacagataagatcatctaatgtatccattttgttgtgactttaacataagacaacaaaaggatcctgatctgaattcatctgaatgtgacaccaatcaaacccatctgaattctgaaattttttggtgttgtcaacgtcgtttttgctgtaaattttaagtttaattcgattacaaacgaacaagactgactagaatttcaagatactcctacaataattcagagcgagagagagaaatagattaatccagcttaaacggaaacaagatcagaccaaaaaaacttaccattattcagctaagtagttgttcggagaaaactcaatcggaataaaaaaaacaaaatttcctgataaattcttcgattgtcgagtttctcgatcgaattggggaatgggtttagggttctgggaggagagaaataaaaattcgctgctgctttttttttgttttttttttgcgtgggcaggaggtcggtttgaagagaacttccttcttcttttctatttaatactgtcggttcaacaaatttgtcggttcaacaaatttgtcggttaagtaagtcaaaaccgaccatttttgtaagaaaaggtcaaaacccctcttcctctaccggagggtttggtatacagttttgttcctttcatatcgccgccaaggcaaagtactatacctaatcttccagagaatgtttgatttctcgccaagtaaataaaaaaagggaatcttcaaagattctttgacaggattatgtttgcgattacaagtaaaaaagatatgaatattttttgaaggaaaaacatacaagcacagatattcatagttcatagtacatacaagcacaacctaacgtagaataagatatttacgactacaaataaaaggtattacaaattaattaagctttaaaggatctgcattacaatacaaataacatcatcatattccaattcatccaacattaataaaaataacttaaatattcaaagaaacaaaagaacatgaattttaaaaggttataaaatttattatagtaaaaaaataaatgactggcgcttacactgcacaaatgaattacgaaatgaagggaacacataagagacaacaatctcggacacattcataagtgggaaaataattatattaaataaaatacctcagctgcctgctccgttggtcacggtaacgccgccactctccaccttagggggagctgagaaccgccgtggtttaggcaatgcaggcgaagttggatacgagagccgtttcttagctgatgccttgtctgtgaacccttcgttttcctgtgtggtaccacctaatgggctttggggcttgagcctggctcgagctgatttagttggaaccatgtagctcgggagagctggtgagccagcgaggctctcatcgtctctgactgatgaaccagcaatgctgtgtctgcggttcctctcggacaggaccgagattgtgcttttggagtcgtcgtcattggatttcctcgaggattggtttagccttgagggagttggaggtgagaagaaactgtttttgtttcttggggtccctcttgcggatgatggtgtgtttggttgagttgagccattgcgggttagagattttgcagcttcgttgcggttaatagagcccttgaccgaggcagcattgtcattgttgctgttgcttttgttctttctcggaactctctagtggcctaccagccatccatctctctaaccagctccaaccccatgtcgggttgcttggatccatgaacatcgggtttccagatttagagttgttcttccagttttgctgcaaacatgaacatataggatcattacaacattcaaatgaaccacagattcaacttcaatggatgtgttcactttttaattgtatctttccacacattcagcattataggtaacgactggagtacctgatgagagtatgaataagccaatgccctttcccttctcattgttgcctcgtacttgcttagcaaattcgcttcaactttctcctttgattgaatgctatcattccagttatccccgttctgtgagcagcaacaggaaaaatagtacttttataagcaaaggcccaaagattccattttcagataaaaaaagagacagtaaattgatagtgtaagtaaacatctatttgatatgaatggtaatgctactattaaccctttccagactaataagcagaaacataatagcaactgctaggaagaaatcaacagttcttacttcttagcaatcctctcaccaaaaacaacggaagaaactttgaataacaagaaaaaaactgaatcagatgaatatgagagacagaccttcaagccagctagctctttagcatgtttctgaaggagttgtttctggcgagcctgattctcttctgacatcctgattctcctagctcggatctgcgactgtacacgagagagagtctgcatacattttagagtatttgcagcttgccgcttaacaacagatccttccatcaataacttaagtctgaccaaacccctcattgcccgcaacgctctccttgcctgtatttcagatattacacaaaataagattatactcaacaaagcagcttccttcacacaaaatcaagtgcctcggtcaaactcatacgaaattccgaaggaattaagtttctgcagataataaagccaattgcaagagtagaattacataccaaataacctctaaatatagtctggatcaagatagcagcggcttcttcgtttgactttccagcaaatcgagtaggtgtagcgcgacgaacaacaccaggagcagatgaagatggaactacaggaacatcagtagctgtaacattcacagcatctgctgtagaaggaggtgaaagatccctgttccgttcaacaatcacttcagctactctcacttcacgaggagcaagagcaggaggaggagaagaagaagattgtctaacattatccacaacaggaggattagagataacaccattttgtccctcagccaatttttgcttcgacttctgaaaacacatcaacatgtcaatatatacagactataacattaagtcacatcaatatacaaaaaaaaaaacttcacctttgaatctgggctgaatgctttcttaacacttgaaaaccatttagcttttttccccatctctatgtaatccttcacagagaagaaacaaattattccacaaggaaactgaatctactgatctcagtagctaaattacgacagatctcgaaatctagagctaaaattcaccaattgatactgaatcagggagagaatgaatcgtacctatgagaagacagtgacaccagatctgatagacgaaaaagcttgaagataaaacctggaggagtcaactaaaccacaacgcggcttctaagtagtgaccttatcggagaagacgaaaaagcttaagaatcgaatcgattggatctttgctgaggtgcgaagataacttttcttcttcgaattgctttcacattatcataattgcaaatggagaagagagagagaggagaagacagatggattcaaagctgtgtgaagaagagtatttgtgacggtgtgtgtttgtgcgtgatgccacttaattgggcctcttttgtgggccccattctactcttctttttttccttttcttcttcttaatttaccaacttcgtctctcttttactctattcttttcactttttttttttagtgatgagttttatttcttaagtttcataaacactgttttgttaatttttctttttatagtatagtatctttagatttattattatttggtgcatttcaaaaatagtatacatagttgacatggtatattggtgttttctctaaaaatgtttgaaattttcttaaaatatggataacgtgtaaactggaaaatgtattggattttgtaccttttttgaaactagataatttaatgaacaagttatgaggatcgataaaacagtgaccatataaattttaaattaatttataactttatccggtaagattggtctttaatttcacctaataaaacaaaattgttgcaataaaaagtttttattcgtctttaatttttgtctttaggcgggttaaaatataacactatatttttgccgttaaatatctgttattaatcgaattaagatttaagatcgtattttttgtcgtcaaataccaattgtttatcgaattaattcatctgcataatccgtataaagtatgtgtgttttaatacacgcttacattactacaaccgacaaaacatgtgaacaaaatatgtccaccagtgagacagcctttatcattttaaaatatactcgttaacaagccaccatatacgatacttaatactttctggatttgataaatcatgaaaattagttggtcattgtacttgtacaccatatcatattttatgttcagatccacccacactactaagttaatctccgatggatgaacaaagaaaatatttgactcataatacctagtgacacaaaccataaataatgctttggaaaaactcgttttatgcaacagctattagcagactgtattttgctctatgatcgtgtatatccaccacaaaagcaatttcccaaattatatggattgacatacagtgaactagaacgatgattgaaagagtatataatttttgtccactggattaagtattatctgcctgaaatcattgacttttttcggagataaacccaaaaggttccttatcggtggccagcttgtaccagtcttcctgtaatttttgtggttaagaaaaaaaaaaaaaaaaaaaaaaagcatatatatgtccaatcactccatgtggcgtcttctctgtttcgttagtataacatccctaaaattattttcatataaaataagtgagaactagccgttggaatttgataatttattttagctaatcatatgtccaacatatcaaagtcctatgtataactgtttatataaagatatgcctctgataacttataatattaataggtatctgtatatccaaagtcggtagttgaattggggatatggacattccacctaatgtataattcaaactttgtcgttgccaataaaataaaaaataattataagctattatgaaaatttctctccccgtcggtcaactttgagttggtctttgcattctagcaagtgaaatttataagttaattaaaccgggggaaaaaaaagataactaaaccaaaattgaaccgaaaaatccatttggcattatctgaaatgtaagtggggcatggaaataaggtcagggccgttagcgttttaaagatatttagatgagccagtgagtttggtaacgacccgacatttaagtcttgtcgttttgtaacagagcaacggtagaagattcctatattggctaacacctaaacctgaacccatgataacgccatacctttttcttcccagtgaatttaattgaattaacagtttacaacttcatatatagattagtccatgtccatctatatcacctcagagaatttaatttcaccactattcaacttttgttactacttcagttcatctattttttcagttaaacatacacatttaaaataatatttatagttataagaaaacaattttataataatattttttaaaagatagggttacgttcagcatgagagtttttgggagattgagttgaaacaagaactgagaaaaacatttaagaattgcaaaagagaatgaagagttactggtttttgatcgaactagagatatgagtcattttctatattcactccaaaatctaataaagaagcaaacacaattctggttttaattagctgagaaaggttcatgataagctatttctatgtttccttcaaaacatcataaagtttttgaaactgaagaaatctaaattctcaaaccaaccatatgttgatctaaagttatatatatgacttcttacaccactggacgacagaagataatctattcttagtaatggctgatagtacttcttgatagggttttagactgtttacctcattgctcaatgctaggattctgaatcagatagcgagcgttgtgtaagagggaagtagtctcctcgtttgatgcatcaagcaaacgcaactccttgatctcgtcctgccatttctcaacatgttccttgtgtatcctgtttcataaatgtgaacagtgttacacatgtgagtgtataaacatctcaatcatggtacatacagaaacattatagaatctcttcaaactcacatgatcaagcgttcttcgaattcgttactgagttccttgagcattgttttccctgtttccagcaagttagaaacctaccacaagaagcatcaatcaatatcagattcttcctaaacttaagcaatcagggaaatgataagagcagcttacagtttgtgtgaagctctcaatcttatcgagaatttgcgcaatgctaagttccatctcatcagaagcaacaagtttcgtctcagcttcttcattctcaatggtatgatcaaggctaattccatctctcgaatctccttttccctcttcatcctaacaaatttcacaggacaaaatcaaaaatctgatccaccacaaaatcatcatcaccagatcaacgacaaattcaaaaaaaacttacagatgctctcatgcgtttccgaaatcctccattccctgcgtcttcttccatttcagtgttcatcaaaactgcagtaatttaaaacgatgctcatgaacgcataaacagattaagaattaagttttctactcgatgcgattgaatccactagctaaagcatcgcagcagattccgatttcaaaatctaaaaaccgtacgattacatccccaacaatctagcttaggattctacaatagaacggaagaaactagatcgagatcgacgaaaaaacctccgaaagagattaacagagaacttacgcgatgaagatcgaagaaattgctcagtacgaattggagagaagaagatgaagaagttttagagagagtccagtgagtgtagagaatgaggaagaaaagccaatttgtttattccgagaatccatttaaataagcgtttagatttaagacttattttattttattgtctctgtttcataatcatcactaattaagtaattatgcttatacaatgctattggcgttttaagtatggaggagtgactcaagaatcaaagcgatttagatgcgatttgatattaagccgagtaatccaaacattttacaaaaaacatacagccaaaatattcacctaatcagatactaatcgttttttttatctatctcgtccaaaaaatgttacaacctccgggacaaaacaaaaaacaataaaccggaggatcgataagatataccttaaactagcttaacttaagagtgagcaacttcttctggctcagtgatcactgcatcgagaaaggttcaagacttgttataaatatcccgggaccttttaaagggaagctcaacgaatacatgttcaactgatgatgatgatgatgatgacgacgatgatgacaatagacgatttacttttgatgagcttggtccagctgattgttgttcttgttttacatcaacagaattttcagagattatgttactctctcttggatgaggattatcattttcagcatcactctcgtcaaggatcacaatcgtatctgcacacaacagaaaatattcaaataaattttcttacaagagaggttcaccaacatatcaagaacatacatacatacctgttggagtgttattcacattatgatcatccaccataataacctcattcttgatagtcacattataatcctccaccacaataacctcattttcgaaagccacatcgctactccctagaccggcgagattctcagcatcaaaaagcgatttcaagaatgaacattgtgattcagccgcatcaaatctctctttcaattcagcatacttgttctccatcttcttcagcttctccacttcttcctctttcgcaatcaaaagctcctgattcttaacactcaaatcattgataatggcctctttctcactgatcattcccttcatctccttcatatactcctctttctcacttctctctttctctaaatccttaagcaagcttagaattttctcctcgagttccttaatttgcttctgatattgaaacttcattatctcgttcatttcattcatctgcttaaaactttcctctatacttttgtaatctttttccagattctcataattctccttgagaatttcatgttttgtcgccaaaatctcctcctgaacaaccaaatttcttcttgtcggagtagccaccgacgagattttgttcttccccgatttgtttgaacgagctgatgattttccagtcatgacgtcgaaaccctaaccctggatatcaacacaaacagcggtcaagcttttactagagcttctttatctttgccaaatttacaaaatttcacagatttctaaagaaaccctaaaactcaaattcgttctaagctccaccggaagaagaacggggaaactaacactagcggatctttaaaccaaaatgtacaacggaagaagaagaagaatcttacccagaaaatcttttgaatcttcttcttcttcaaacgaccagaagagagaaagagctagctactggaaaatgaaagtagctacagagaagggaaaaagcaaatccctagaaacagagaaaatgaagcgggaatacgaaaggacaacatattcatgatcaagttaataattgaatctttgtttagtgttaaattgaacttaatccaaatttttgttctcttcccattcatgtcctcaaacaagtaaaatcatttactttagtttagcttagattaaaaagataattcgatattcaaataaaataccaccgtatctaaaaatcataattacattgacagtgtatcttataattggatttgaagtgacaaggaggatacgacaaaaaggaatcaaaccttcggtgagacaaaactgtattacaagtagttacaacaacaacccaaaagacaaaacctaaagactattgtctttctctctcactcactatcgttacaagcaaacgctaagatgactagtttccttttgatttcatcatccgactttctttgtattctcaccctaaaatccgaggcgatttcattcatcgattccataatcttcaccaaagtatttatccacaagactgttcgccatgactctcagctcttcgttctcatgaaactgaaaccgttccattgcatcgataccgtcttctccttccacaagctttggcccttccccgtttggcattcctcttaaaacctatccaccaaagaaatcaaaaccaattaggatcattcctgttccaaatatgactatgcgacatcaacatataagcaaaactcgtgtctcattgagcttttaagagccatttaattagttgcttaccagctcaatgaactgaagaccaagcctagcagcttcgatatcaggagatctgaccagctcaatgaaaccccggaggcaaccgccactgacaatagagactaaatgctcttgaattatccttggttttctgtctccttctgcagattctacacagagatttcccaagacataggcaacttctttccttatatcaaagggggatgtggaaagaatccgtagcaacaatggcattacttcagtagaatgtatcattctcttgtgttcaatagatcccgccgctatattagatagcacccaagcagcttcctacagaatcgagtatagtgatgaaagcttcatataattgtaaaaaattaaaaccacaacgggaatgtgatactgaccttctttaaaacacggtgctcgcttcttaagcactttgcaagcacaccaatgatgctttctgaaatttagtttgcaatataagtatcttgaatatataggattaaggtgatgatgtttaacccggaaaagataatagatactagccttcagtgttctgttcacggataagaattgttaatactgctttgggatcaacagcgacaaaattgcctaaacttcggagaacctggattcacatttttgttttagagataatcaagaatgcaacatttgaaaattaaggaccacgtagtgagtattctgattctaatcattcatgctaatatgagtataaatgacatcgatgggacttggaactggaagcaattgaatagcataatctgaggtaatattttaactagaatcctgtttcttttggacgataaggtctatctgaaagttaccgggatgagaagttgtaggctacttgaggttgctaatctgtcaataagtagttgaagaatgcctcccttcaagagcatacttgtagcgatatctgagagggcagataggtaaacaatgatccatgcaatttccgtggcagtttcctcatccctgaatccaacaatcaataatattttgatcaaattattcaccaaaattgaacaatagaatatcaatggcataaaacagacccctataaatctaaagaatcactaaaaagcaagacaccacaacacgctaagaaattgttgaaattcagagagatgtaactttgctcacgttttcttcaagtgtcgaagaattgcatccagtatcccatcaattttaacaagttgtgctgctgcctttgactcaggtccctgtattaaggtataatgaaaatagtttgtaacaaaggcttgtaaattataaccaaggtgataatatccgtgccaggtttttccccaccttaatcagatttgacaatgcccatgcagctgttctcactgttgaacccttgtcgggaaaaatcatacgtgctagaggtggcaaagccccttgagacaaaagaacatttctcaaatcttctccttcaccggcaacattaccaattgcccatgcgcactgctcagccaccggtgcggagctcttttctgaatataaacttggaatcatatgaaatctaatccaacaaaaacaatagagtaataacagacttggttggccagtacaacaaacctccaaggtgagcaatgagtaacggcaatgcaggtaatagagcttttgtttcttcaggttttccagcagcaatgttggtaagacaccaagctgactcaagtaactgcagttagacagaactgtgatcaaaagattacaactctccttaatatatcttctttcaatgcatgagttacttgtcaaaatctacagtaaagtgccggacgaatatataagcaaataaatgcaagaacaaaggtatagtattaaagcatatataaggcaaatgtaacctgttcgtcgggggagccaaatgaaagacactgcacaagtaaaggtattgcaccagcacggagcgcagcttcaacaggagggaactcagattttgataataaacgcctgagttcccgaagagcagtcaccctcttctgcattgcaccttttcccctgaaaattgagataagaagtagatatcagaaaaaaatcacgaacaatacctgaaacagtgaagaaaacgaaaagaatgacaaacaaaaattgacagattcacttactggtattgaacagcggacttgagctcttccacagatttactggcttgagcctccaatataggctgctcttcatcaaccatcatctcattctcaacaagagcatcctcaacatcgccattagtacccaccctacaaagccgctttgccctaaccagtaattcccttctttccttcgccactgtaacagcttgttttcgtcttctttgtcccgcaacatttccaactacacaccaccatttccagaattacaatcaaatccatgccaccaattgtaaatttatatggttctgaactaatcaatatacatgaaaaaccaatactaaaaggaatgaagcatctaaatttgttcctaccctaatcaccaactaacctaattatctcgagaagcaaacaaaaacactacactaacactactcaggtgccaaaatcaagttgagggtttacagtaaaagtcagaaggaaaatcacctgaagactttattgggtcccttcgattagaggcggagccatcatccgccattgaagaagcttgagcacagcaagtttcttcgagagtagggtttttgattcggtaatttcaccggagtaagaataggatttcgccgaaaacgaattggttaatttggatccgttccctcgcgcccgcccagcaaaaaaaagaaacacgaaaattttgccgactcatatttgcatataatttcatattagtccctagtatttccaagtatacaataaatagcccatttaactttattaccaatttccgaatggatcaacgatcgtggtttcacgaagtctttgacattcgcctatgttgcaaactaaaataatgacatggcgactcatcattggttctttacgtacaccgtaatctaatgtgacgcatgtggtaataactcttgtgtcataatacacgtgtcacgcatccacatgatcctcttccctgaacatgatgagttcacaccggctggctttttctcacccacttttccgtcactttctcggttcattttctcgagaaaataaagaagacgaagacgaaacctgaaaccaaagccaaattctctcgattaacagaaattcctttggatctatcgtcaatggacctaatacctcagcagctcaaggccgtaactcttacacacgtccggtaccgtcccggagatcagctcggacatttcctcgcctggatctctctcgtcccagtcttcattagcctcggtggattcgtctctcatttccttttccggcgtgagcttcaagggatcttcttcggtataggtctcgtgatctcacaattcatcaacgagtttatcaaaacatctgtagagcaagcgcgtcccgagacatgtacgttgctcgaagcttgcgattcacatggatggccatcaagccactcgcaattcatgttcttcttcgctacgtatttcagtttgatgggatgtaaaggaattggattctggtttggtttaagaagcagatggattatgaatcttcttcattggtctttagctgttgttaccatgtattctagggtttatttaggttaccacacggtggcgcaggtttttgctggtgcggctcttgggggtattgttggtgcgagttggttctgggtggtgaattctgtgttgtatccattttttccggtgattgaggagagtgtattggggagatggctatatgttaaggatacttcgcatattcctgatgtgttgaagtttgaatatgacaatgccagagctgctaggaaggatatggattctgctaaatctgattaatttggctaatttgatttggtaagtcgaaattttcttcactgtttcattgattttgatctgattaggtcttagaataagcatttttgggaatcagctttagcttttgatacttgtaggtcaagaatgtttgttttgctatatgagtaggtagtcacatttgtgtataatgtaccactgtagcattagaaaatacaggaagaacaatgtttgtgtaaaagcagtttaagtcattcttcttggagtccattagttgttctgctcatccctcatgacattgaatctgttttctcattgcttaatgccgacaacaaatcagttctgtttgagttttttcttgtcttcttctttgttccgcaagcacatctcatttgcttcatccatctgcaggtcgagaactcgggtattagcggtcttgttatcctttttctttgttacattatatcaggaatggcaaggagatgggagattccatttatgctaccgttctatgattagctgctcacctgaacatttcacaaaatgaaacttcttcacacttatgttatgaagtgatctttgtatcttttttccttttctttctttgcatattcacttatctattgaaagaaacagtttcgtaaattaaagaaagttatagaggtctgtggttttggcatctaaattgatgttctagtttgttaaattactgttacttattaactcgttgcaaaaaaatagtcttactaggaacaagcttcaatgcaatgcaagtttcgagttctaaatgatacacttcattatgtgatgagattcttatttatttaccctatgtcaatattctaagatgagaatcgagaagattggaataatgcatttttgtttaaatcatgttgacaaaattagtaaataaaaactatgtaaactatagttaaaaaccatttaaaatgtaaacattttgaataatcaaatataaagtttttaaaagtagtttttacatgaataaatatatttttttaaaccataaaaattaatctaagtattaaatacattcgcgtgaaaagcggttgaactaataacattctcttacagacccgtcagatgggaaaagtgcttaaccggtttattttcaatgcattgaaattcaacacttagattttttgaaaacaaaaatattttctataataaaaaaacttagttaattctaccaaaaaaaacttagttaaacgaaaaaaatattttcataatcaaaaaatagtttacataataaagatattgaaaaaacaataaaaattaatctaaacattacttccatgataagagattgaactaataacatctcttacagacccatcggatgaaactaataacacctctcacggacccatcagcatcggatgaaactaataacacctctcacggatccatcagatgggacggggtgcttagtccggtttatttttaatgcattgaaattcaacatttagattttttgaaaaccaaattattttatataataaaacaaattgttgacaataatcaaaaatataactaaaaagatagtttacataataagaatattttaaaaaaaccataaaattaatcttagtgttaaatttacttgcgtgaaaagcggttgacctaataacacggcttaaggacccgtaggatgggacggcatgcttagtccgatttgttctcaatgcattgaaatttaacacttcgattttttaaaaaccaaaataatttatacactaacaacgtttagttaaaaaaaatatatacattttatataattaaaaagatagtttacataataagaatatttttaaaaaactataaaaattaatcttagtgttaaatttacttgcgtgaaaagcggttgaactaataacacgacttaaggacccgtaggatggcacggcatgcttaatccggtttgttctcaatgcattgaaatttaacacttagttttttttaaaaccaaaatagtttataaaactttagttataataaaacaaaacaaaaaaagcatattcaaaaatataattaaaacatagttatttaataaaaaaataatttgcttaaggagagagaatgataccaatttatgatcgagattgaagcattcttgtgttatcaaacattcagaagaaccctagatttgaagaagaacggaagataaaataccacggaagagaggaaactactttctgcgtttaatgtctcgttacaataatcctgcataaaatagagcccaagtaggaaagttaattgaagatgaacagctgatgataccaattcacaacgaatcagaatcaaatctcaaaaataattttaaataaaaaaatctcttaccataagtttttggatttaaaggatccgggagaatcgtcgtccttgcttttgcttaaagcagaaacctagatgaatcatacctgttgacgtgcaaaaatcagaaaacagagtcacgtaacgataaaaagagaatcgatgaaccctagaagaccccaacatatatgaatcatcaacgacggagtgaaatagagagagagataatgaatttaagttaacctgatcgtagagatggctctctcagactgagatcgctgatcctttagtcaatcagaataagagaattagagagaatgaagacgacgaacaagtgtaagaaattgttgttgcaaaaattgtaatattggggataaatagaagcatagcattagtaaaaaagaaaaaaggaaataacaggagcgtggaaaatcactaacgttaataattggagtcaaatcaaccgactctaccaattaataaatatagcattcagttctctctctctagtcgccgccgcaaaccagaccccttttccaaacgccttttgcctctccggtgatcggcttcggccggcgccgtgagagggcttctcttcctctcttctctttttagtttttcttttttctttgtgtcgttttcttttagtcagcggcggctcctccttctttgtggcttaatcagagacttttaagctgacggcgagcggttgttgttctctcagatggaggttcgttggtggatctacaatggggaacattggctctcgacgactgcagcagatctgatggtttccttcttcagccccttcacggaggtacctctcctccgatgagcctccttggtggtggtggttcagtgttaagaaggtacagagggaggtggatcgtggttttcgagcttggctgtgaagatcttaccgatcctgggcagatttacatgtttcaaggccttctagctatgctgccgccaacgactcctaatggaaaaataatttgaagtgggagagaaaagaaaaccatttggatggttgaagaagaaggaaagctctccaataaagccccggcttcaagaacttttgtctcagcccggtattcggttgagtttcagtcggattagtatatccgttttaggcttaggaccgaaatagtgaaagccaaggagtcaaaacctttctgaagttgcgcttttggcgtagatgctattaggacacgttctacactcggatcttgagggactaatagcttggaattggattggatctcaggataggatttgatgtgctttgtgttagtaattgtttttgtgtcattgggtgaatttaggtggtttaagagatgatttcacttagagtcgtggtgtaatttatctcgttatggttgaaaaaatacagtgaatttcagttgggtaacgttgaatccatcttagtgtttcagggtgatactagactgattcattgtatttggttaaaatatgttgtggtctaatgatttgtacctttgaattggttaatggaaagttgttgttgagccaaaaaaaaataaaaaaaaatcaaccgactctgctaagaaaaggaaaatcagtcgattactaacggctacttatggaaacaaatggaaattaaccgactttaattttaagctaacagtaaaaaaaacactgacgttatatgttgaaaatttgaaataaccgactttggtttattatttgtatcatcactattcaaattacctttacggcccaactaaataatatagggctttgaagaagcccatctagaagttaatataaattaagtttttaagggcacaagaatgacgtcatattagtaaaccccaattacaactctgattctccttcccggcgatatgaaacgagccggcggcggtgtcgacttcatcagctctctacccgacgaaatcctccaccatatcctcgccaatacacctaccaagctcgcgatcagaacctccgtcttatccaaacgatggaagcatgtatggtacgagacaccttctatctcaattgtttgcaatagagtagatcctgattcgctaaacaaaaccctaagtagctactcgactcccaaaatcaagagtttcgatgttactataagcagagatgtcaccgtacctgagattgatacctggattaatctcgctctgtcacgcaaggctgagaatgtatctctcagattcacatctcattatagattccgagatacattcttcatcaattcctctctgaagcagcttagtttgactttggtttattgcattctgaatcccaagtgcgttgtctcttggtcatcgttaaggaacttgtcgttgaatcgttgcaaggtgtctgatgattcaattgccaaaattctcactggttgttcattgctcgaaagcttgacattgaatctctgtgatagactcaatgatcttgatctgagcaagtcactaagtttgagaagactggagatacttggagaccgttggacaccagagaggattgtagcgccacacattcgttatttgagattggaaaactatcagcgaccatctactttagtggatgtctcatctttaaccgaagctaatctcggtctttcaaaacatgtacttgactatttcacatgtgaaatggagactgaatcgcttcaatacatggtgcgacagacggtggttaagttgcaaaacataaagaagcttactattgggggaatttttcttcaggtaatgatgaccaattctctaatgcctacgattttctatgtcgtagagtcgtgctataggataacttagttgcacattcaaatgttggattatggataagttttcaactttaaggagcatatgaagtctctctgtggaatatggaaacttgaagttgttcggtatagtagagatatatgtctctgtagtcacttactttttgtgcttttgtcattcttttgctagattctatctcttgccgagctctgtggtgttactcttccagtcttccagaattcaatatcgaagctttgactgttgaaacgaggattgatcagtctgtgattcctggtctagcaaggctgctacaaaactctcctggacttaaaaggataacagttaacataacgaagtgcaacaccacaccggtatcttttctacagattattctttttaagaaccgtttccttcactttttgggctaatgcagatagatgtgagatattttgtagaatcaaagatcacttctagtagtttgcttgagcattctttttttatgtcgacaggataagcatcttgacagacacttgaaattgcgaggcttgaatcctgatcaaagctggatatcgaaatatggggtctttccaactgtggagcagacatctgcaaagatgaaacatgtggattcgttcataaaacttgtcatgggaaacacaaagacattagagaagctggttttacagtttggagattaccttgatgcagcatatcaaatggttccaacattatcttacgacgatatccaaattgtgatcaagaaaagacgatcttaaatagtactagtatattagtatatgctatggaccaccgtagatggcttaattgtcttggttaacgtgtctacaaattaattgttttgatcttaaatttatgattcagagctttaggtttctgtgttcacattgaagggaacaacagttatagctagtcttgtaggttagtctccgtgtgattgtcgtttttgatgtgtcttcactgatcagtacacgcaaaaggcaaaactttcctccgtccaaagcggatctctatattacgtttctgtagaaacttaaggtctctctcacacatgtggtgaaaagtgatagttgaagcaatgtttgaaaattaatatctaaagcttctaattgacaaataaaaagtgtcaaaaaggaaaaaataaaatttcaagggttgattttttttttttttttttttttttaatatatatatatatatcatgcttttgctttagtttgatttatttgacttcttggtatagtttttggtttattccattcacgaaaattaatttgaagagaaatcttttgacttttgctttgaatgtttagatgaatgaaatctagaaaccaaacaacaacttgaaatttaatttggtttaatatagattggtttagttggattccatttcccccattcgttatttttgtttaggttatatgtggctaaaaaggaatatatttgcatccatttgtatttttgggttgatatgtttgatgggtttagtgagaatattggtagtgggagacaagagttgatttggatagttgagtgttgctattgtttgtctcaaaagatttccactttatgtttttagtcatttccaaatcattaacatcaaaagctaggtcaaattcatacttcatatgtcccaaaatatttatcaaggattctgcttttagaccatcaacttctagtgatctcttattattattggccagtatatagcaattctggagttgggtccattctataatccatagacaaatttctttcaaaactttgggtagatttttgtaatatcgtctttaagtttattattcagaacaatgttacttctagagattgtaattttacgtatgtagattgtagatccatcatatttatttattatcgtagaattatcctaaacacgtgtatgaaatattttggtttaaatcgaacgagtcacaaaaatcaaaatttgtggacatgcaaattttgaaatgtactcatatttcttttggatataagtcttcgtccaaaacaaagtcttgtttgtgtatgatgttgaacttcacaaatgactgataacgtaacgtaatttcacacgagtgacctcaatataaaaaagggattgtgttccatattcaacaaaacgacactaatgacccatgattaaactaagaaatgtagatttaaatgttctataagattcgtttcaaagcagtcaaagactcaaagtcgcataaaagcacaaattaaagaagattagtctatagggaatcttaaagaataagttgttgggtttacccatatatgcacttattaatctatatagtagggaaccacaaagaaatttaaaaaccaaagtagattaagaagttaatctccaaaataagtagagaaaaattaaaaatacattaatcaacctataaagtgatatcataaagagcctaaaatcgattcgtccgttgaggacaaagacaaataaaagaaatgttttctttaaaaccattaataagtgatgcataaaaattaaataaaaataaaaaacggaaaaaaaaacaagtgcagacaaaacgaaaccagaacacggtgaagagaagaggcgagagagagagagagagggaaaaggaagacgatgatgatttctcggagacccgtttcaagtccgggtcgggtagagaaatatccaccgccttttatggggtttttgagaagtaagagcaacggcggaagtacaagcaggagtagaagtcgaagcagaggaaggtcacgcgctagtcctcttttcgttcgccggaataaatccgcggcggcggtggctcaagaaccgtcgtctccgaaggttacttgcatgggtcaagtccgggtcaaccgatcgaagcccaaaattaaacccgaatctcgagataacccgacccgacgacgatgtgagtggctccgaaacgcgtcgttttataacaaattcgccgggaaaatcaaaacgatgacgttttggcctaaatggagactctgttcgttttcgtgtgcttgtcggaatttgaaggagaaagattctccgagaagtcaattagatcatccgacaacggaatcagtcagagaaatcaaagaagaaatcgaaggagaagaaaatttcgaaatccctaaattatttgtgtctccggctactactccgcctataaacgctctgttgttgacgagaagcagatctgcaccgtatagatcgtcgtcgttggctttcagattctgggaagaaaataaccaacgagaagttgaatcacagcaaaatgtgagatcggagaaaactgattcggaagttcccatcgagaaaatcaatggttttcacgagccggagtatgttgacagagatgaagaagaattcacgaagttaagatttgtacggcagccggtgttgacaaggagcaaatcggagccggcgaggatcggcgagaagatgatggtgttgcttcccgatgaagaagaaggttaggtagggtttaggtctctcacgtgattagtcaataattgcactaatcttaattaattaatcgctggtatgactaatttaatttgcattgtttaggataatttgactgtgttttagatatagtagaggaaacaaatttgtataaagatttgtaaccatacatataacgtaaggtgtagatatgtttggcattcaaaaaaaaaatgtttaacaatacactatgtaatcattttcaatttgtaaatttacattatctgtttgattttagtatgctatttaaattttggcaatcaaacaaaacataactttttctagcttctagagcaattcaaaacaaaatttacatattcgagaattgaaccgtagtattattcttttatgttttacgttattgtaaagtactaaaatgtataaatgtttgagcaaaccatgtttgacttgttgttataagaaaaaagaaaaaaagagctaattctggcccaacgtatagatgggcttatatattgtaggccatttgttcgatactaaagaccaattgaagacccaaaatgtaaatatgtttgtaaattcattttattactaatccgatattagatcattgatgcataagttaatgcatggtaatgacatatgaaaaataagacaaaaaaaagatgggtgggtgtgaaaatgaaaggaggcgtgccttaaggaaaaacacagccatgaaatagctgtagagatggatatggacccattacaatttatgatttatgaataagagaaccacgaagatgttagacaaaattatttatggagttctctcactagcacttataatatatagtagtactatatactatataataccaaatatttaaatttgacttccccaagactgagacatctctgatcacctatattcttgaaaattcaactttttttttatttgtgattttattagtatctcattttatgaaaccacaatgatttgaaaacggatgtcgttggatttttaagattatactgttcaaggtttgatggttttcttaaaaaggtttcgaataaatatgaatcaaaatatagttcttttcgcatctcagtacggtgacaaggaatacaaaatgaagaaagaaaaaaatgacattttgaaatttcacttataagtcaaaaggttttcttttgttttaagagtatgagattctcaaaaggttcatgcatgcataattgcatattcattggaatgtacggatgtacttcggttatatataaactatataatatttcaataaggatttaaagctttcaaacaagctagttgatgatttttggagtcaaactttcttaaacatgactacatgagtatagttattggtccaatttgtacgcgtccattttctataggatcggatagtctctggcttcaattagtgatacgttggagtttgaagtaaaaaaacgaagatgaatgttttgctctgtttaatattacagtagcattaatattatcatcctacacatatatgtttaatgatggatgaggaatataaaatatgtgttgatagtgtatattgggggtgcacgatccatccatcgaccgacttgaaataaatggaaaggtagagagagtacagagatgtacagttgtaagaaataagtgggggatagaggaaacattataacattatcatctcctcatttaattttatcattaaactctatataatgtttcaacttcataccagcgatttctccaattaataatgatgtttatttaggagaattttataaaaattctatatttgtatatcaccgccaaattacaataactgtgaatggaatgtacttacctgtttttctaacgacattttctaaaacgaaatggaatctatcataaattttattttctagctatgtcagtttttgtactgtaaactgtaaagtaataatacgacccaaataagattgtcattggactaaagtcatcacaaaacatagttctagcagcgacttggatcttattgatccactatcgacttaggtttactttggaacgaacttcgtaactaaatgtttggtttggtatggatttgttattgtatgtgttcaatattaacaaagcaacatttatttttcaatagagtaagtaatgctatatataagtcgtccttcgacgaaaataaatgactactactaatggtcaataaatacgtttggatgcaagaaagatgatactagataggaacacgaattcagcttggaagccatgagattgaaagctaatattgtccctcacacatgaacttgtcttttcttatttttatttttagatgaatggtcgtgaaaagaaaagaaaattaatactatgttccagtctttttaacccgccataacatgttgcccatctatacgaatacaagagcacagtgttcaagacttcaaatacaagtggcatacaaattcaataatacgaaagacacaaacattattcaaatggccatgtaataaatcaaaattttgcatatattgaaaaaacggatacaatgtaggtacctctttgcatggacctctaataaattgttttttcttttcttttcagttgatcacctagaaaaaaaagattctatgttatagtggaacagaactagctactcacaatagacagagtgattggggaaaaatatatagaatacaaagttagacatatttacttctctattttaattattttgaagaaacaaaaaacatgacacgtttttcagtccacgttatatataaatatggccatcatgtacctgaaatatcaccattcaaattgattgagtttgttatacaaaaaaaaaagagaagaagaagccagaagtctgagagttttataagtaacgaaaatgaaatcgaccgtcatgatgattttcctcattatctacctcctcatcgccgtgccttgcttcgctaaaggtatttttttagttctttgtttttcttaaaacgtttaactaggatttttatttgtatattatatcgacgttgtactataaaacataattcaggatcggagcaaacggattcagaggtgtacgagatcgattacaggggaccagagactcataactctagacctccaccggaaactatgcacggcaagccaccgtacatccaccataatacctccgccgctgggctcggtgctcatgtaggaggaaagagtaagttgccatctccacctttactaatatttatttatggcatttacgtaaatatgagtctttggttttttaaggggaaaaaggtaaataacagtcattaaatgatatatttattattatcaaatattcaaattgtatattttattcttattcttcgaaattattatgatccaatcaaatgaagtaaatttccctttcttgcatataatggtgaccaaaacatgcaggattaattaattaactctgaatttgtttccaaattccatgtattttgatatgttctcttctccatatatcagactagagagagagcgagaccttttccaaggagaagactcagaagttgaagaggaagattacgagagttgtgatatatatatgagtaattaatgatgttaattgatacaaatttatactttaattatttatcatatgaagatgatcatcgatgtgtgatcagtacagttagtgtgaataacacactactctcctgatgtcatgtccggtcttttatttatttcatttttcaattctcatgcaccgttctctatatcatttttttcggtctgaatcgttttgaacttttttttttttaattattaaatcagggtaatgtgtcactaaatgaatatcaatatagtaattgtttaaatgtttgtttaaaacgataaatgtataataattttgcactctccatatacaaaatgtttgggatgttgttattacaattacaaatacgtttattatatcatctattttgtatctatgtttacaaataagtgtattatatactaacataagaatattggactatattatatttgatattaagaaaatatttagacactccaactccaagaatgcaagattgcaactttgcaaggtgccaaggtctgaaacaatccaaacacttatcattgacaactgacgaggtttattttggttgttgtctttcttttattattctatgaaaattataatttaaaattcgcaagaaattgtttgtattattgtaacttgtacatgatattcaacaaattaaaattatgatatagatgatcatatatggagtaatctaagacactggctccttcggacccaccttttaatcacttcctcaatcattttcatttttcaattattcattcattttaaaactggaccatgtgtattatttatcacaatttttagccagtacagtaccatttctttcgcctgagagaaaagtttatgaattatgaaaactttgtaatagagagtttgatttgatttattttatgatctgtcaatgttggagtataattatttataaacatgactttttaatgacacacgaacacgagtacacgacaaatgttctatttaaaatctatatctttgtagtttttaatgacacattactattatttatatctttgcaaacgctttttattttaattaaattttaacggcatgcttagtcagttttttttttatgtaatataaactttaattaaaagaaaaaccttttgcaaaaaaaacctaaaaagatgaaaaacacttttttatgaaaatgccaagaataataacattaaagagaagaaacaaactagggatacatcggccgacttatgttgaaaatactataggcctcataaacagaatgggccgtggctttaagcccagttaataactaatgaaactcgttcagctggggttgaacaagttcttgatgttggatgtggagttgctagctttgcagcttatcttcttcctttaggtataaagacaatgtattttacccctaaagatggtcatgagctctgccatagccaccaatgtcttttgatatggttcactgttcgagatgtagtcttgattggcatgaaaatggtacgactcttgtgttcttctttctgtttctaaatgccttgcttggttttgtatcaattggaactaaagacagtcatctgggcttgattctgcagatggtatcttgatattattattttgtttctaagatttgggaaattctttttttgttttgttttgttgtagagaggttggtccaggagcagtaaagacaaacataatgcacgagctccttcatatatatacaagccattgcattttgtggtctcaagattcttggactcatgcagtcttcggaggatgcagctaaatctgtcattgatgatgtagtagctccacctgtaagatctgctctttaggatttcttcatcttatctacataatgtggttgatctgctccattgtatcttcagtactttcccgtgaacaaaaatttgctaaagaacgttgggacacatcatgtcacttatttaacgaattgcagcaaactcacacttgaagatcaaagagcttctagtggttgcttgcttatgacataatcctagcatccaaactctatcaacttctggtttcttgtagtacttgtaaacaaacgcacacctgcttaagtagaataagggccaatgcttcaccactaaaaaaaagtttagttaaagttttgatttgatttattataatattttgtatattgattgatgttagaaattagtaagattcccatttagtgtatgccaattttttatgattatgaccaacctccattttctaacatattttatttagttagactttgccattcttctactcaatctcttgctcactttttgtattactttttctttctattgcatgagataatttgtctgaattttgttagtaaaaacacttaccaaaatctagacgttaacttgaacttgaattacaagacgtttttattactaatgccagagtttatatcattcaagccaactgtatgtaagccacacaacgctctgcaagctatgtattcttattatgcaaaaacaacttttttggtggacgcaaaagaacaacattttgtgtgatatgatactacgagtggtctacttgatatgttggtatgattaccaaccaaattatacaggttatacagtttttttctctgctcccacttgtagttaactaattatagacatgggaccaatttccaaaccctttcttatacagtagaactcttatcaaattcaacgtaaagaaagcgacattcaccaaactttaccatccaaagttgaactagtaaaagtgtcgaactattatagtatttctctctactgaaattgaactattttatacacattgttacaaactgtagtcttgactcttgaggttccaaaaccaagaattattaaaatcgaacagaaaatatacatgtaaatccaacatttttacaattagtatgtttttggtttttgtttattttcaatttacgtacaaaattgtgcttcgtattttatattaattgtcatttgaataatttatttcaaaccgatcggtccttgccgacaatgaagatgtcgtgttccgacgaggaacaagaagtcgttgaaatcggagccaaaacttcattacagtccgatacactgtcttgtaacgtaagcaataactccgacgtactaaaactcatcgacgacgacggtttcgcaatcggaacttccggcacatcagcttcaccaacaagaatctgaaccacacttctcatagtgggcctggtgaccggatcgggttgtgaacaagcaaggcccaccatcataacccgactcatctcctccgggttaaactcactcaaccgctcgtccacggcggtcaataacttcccttctctatacaaaccccaaacccaatctaccaaactcgacctcaaaccgggtcttaaaccgggttccggttcgggtcgggttatgggtcttctaccagtgcatacttctaaaacaacggctccgtagctaaaaacgtcggttttctccgtcgctcgaccggttaacaaatactccggcgctaaataccccattgttccagcggcggcggttgcgtccggcgatttatcgtgctccgtttgcctcgcgagtccaaaatcacctaacttcggattaaaattcgcgtcgagcataatgttacttgttttaacatcacggtgaatgatctgattctcgcactcttgatgcaaataagccaaagcagaagcgactccaagaagtatttttctccggtgaggccagggtaatgtagtcggagactcgtagagtgctttatcaagtgatccattaggcattagatcataaattaacagaatttcgcctttttctctgcaatagccttgaagacggagaagattccggtgacggagggttccgattagagataattccgataagaattctgtgtttccttgagaaatgtggctgcatcttttgattgcgataatttcgccggaatcttgtaagattcctttgtagacggtgccgaatgctccgtttccgatgactctcgatgagctgaaacagtcggtggctaatttcagctccttgtaagtgaactctctcggcgatttcattatttccgatgctaaagattcagactttcgagtgtatttgatctttttagagtaaacccagattatcactccggcgaataatgctaagaaaaatgctccggcggttactactccggcgacggcggctggtgattttttacagagtttgttacggcaagaggacgatggatcggcggtttttctccggacggtggatagggatggtgtgattgatgaagacggtgacgacggaggaggagaattaggcatcggcggtggtgattccgatgattcttcgaaagatgaactaaagctccaccaatcgacactgtgaatctcagtgcttccttgtgttgatccagagaatccaacaaacattgaatcgcttacgtaacgatcaagatcgagaggaaccgacaaaatcggcgatttaggtttcaagtttgagtaagagacgtaaactgttaaaacccgacccgacccgtcataagtgatccatgaattcacggcgtttccgctcttgagatcgatgtcgacgtttcccaaatcggctaccgcggctgaaacgacggcgtttagatccaatcccacgtggttcccgttaacgtctttgaattgcacatccattaacgtatcgaattcaaccgccacaaaacccgacccggatccggtttcttcggttagaccgagaaatccaccggtggatcctaagtaatcttcatcaggggagattacgaaagctaatccaccgccaattgaggaaggattgagattcgttaccgagaaggagaagtaagtagtgaaactcgccggagatttagtttccgggtgccggaattttaccggtttcccataaagagcttttccggcggtggaagtgggaacagagagttcacgagtgagcttaatagttccgttgttgagatgagcatcgccgagaagtttgaggcttgagagagtcaacgttccgagatcgaatctcgtcgccgggaaatcgcctctgacgtcggaggagcagaggaaggaggcaagaatgtggatgagagttgagtaaacagagaagaatctcggaggaagtttcaacattagtttaagtttttcattggattcctttggagatctgaggaagaatttggaggttgttgggttctctcactgatacaatcatacaaaagagagacgatgacaaatctctactgaatcagacagaggaagacgaaagacgacagaagagagtgggaaataaaaagcagaagtgaagaagacaggtggatctgctgattgacacgtggaattatgaactgttttaaaaaaatggaattttccagcgatggagaaggtcctcacgtgcaagcgcgtgttggcttctgtttgagatctcgtcaaaaaagtctttggaagtctttagtaatgttattgactttatggaacttatgatcaaagtacttctcgaattaaagcacttatttatttcagcgttatagaaaaaaattttttaaaaattcattagttgtcataatagttacagatttttttattatttattattctatgtaagaaataaacttatatcgttgtgaaagttttatgtcatatgattctttttatttgacttttatgttgcatattgtacccgttttcttcaaagatacttccttttataatttttcgaaaggaaagttcgtatggatcatcatatcagcataaacaaataatacttcaatgtcttaatcattatctctaactaatccacaagttcacaacgcagccactcgttgtcattaccagctcgtgtcgatatttgtattccttgttgcttttgttttatgtgtatttctttatctccaaatgtactaagagactgttaataaatttacttggttggtagcaaaaaaaaaacaagggaaaataatcgccaatctacgagacatcgtgtcacagtttgaagtatttatgtctatctgacgtatatttattgtggtcaatattagatttaagacatctctttttcttttcatttccttactcttttgaatttatagtctaaattttggttggtgataagatttcctcaagtcctaccaaaaaaaaaaagatttcctcaaatggaaacgtactagtacaaaacttaaaaagcctcaaacgtatcttatggacttgggcctgatataaacaaacttgttattaacttgggcttcagcccaaattggcacacaagctaacgttgtacaagagtgttatctcgcggaggtggggataatcctgatgaaaattaaagagcctccatattagtatgtttatgtgggcttttaattgcgaagaaacaaaacagatcaattactatctgggtttctattgggcctaaggatttgggcctatcctctttatctactagcccatattgtttttcatacaaagcaaagtgaatattagtctttcaaagcggggatgtttaattaaaatcatgtcggtccctgaccttgtgttctagttgtaacttgtacttgtaacatactaacattgaacccacaacgtatctgtctttcaaagttccaactaaaataaactagaaaactaatgctgaaaaaagaagaagaagaaaatgtcgatatttcatgctcaaaataatgcatcactatagctttcaaagaacagaatagaggaatgggacctcatatccgaaaaacatacctttatataaaattctgatgtaatgtctttggtttatcaaaatcatgtttttctctttaaacgttgaaatgatagataatgctttacaatgacgtcgaactaatttttttgaatattgaccggttgagtttaataagaccggcgtccatattcaaatagaattgtgacacagtaataattaataaaatacaagttgagatataaaatgaagtttgtaacaatattaattagttgctgctcatttcataattgtatgcatatctattcaaatttaactatacatctaagcacttttatggttgaagccaaaataattaattaagtttgtatatttgtgtatatgcatataattaatgtgtgactatgataataattataataatacgtttcttaatcgtagacacaaactttggataccaagaggggaatatgatagcatccaatggaccaaaagaaggcaaacacaaaaggccaaaagagaggttgagttgcattatttatggaatttttaatgtaatctaatctaatctataatatatgataattattgtactactagttcattttatttaatatctagacaatcgtctttcataagaaaaaaaaacaaaaattaaaaactacggtcggtcttcatatatctgtatgtctgcgttaatatttatacttttttcaagacatcttttttcttctttttttttgctatttagaaagttcagacccattatcttaatattgtgatgcgtcaactgtatttggtaactagcaagtggaactagaagcgtttaagaaacccatcgctattagacttgaatccaaaatcatattcatagtagactcacagtcactattatcaaaaggatgataatagaagactgatatgctcatgagcttctatatgactgaagatgattgatgaataaaaaaaactatgattcaaagggatgataatagaagaccaatgtgcatgagaatcatagctccaaaaagagggtcctacagacagagagacaggcgtcacggactgtcctatcgtcttcatcgggaaatgccaaaagatcctctctctctctctcacattacacaaataacatgcaacatgctatgtttggtccaacttgtaattatgccttaatcatttcttttgatctatttccttaaaggcaattcccttttcttgtaacttcctcgattgcacaaaccaaaagaagaaaagcaaaagatgatcacacttgaatgagtaagaaaataatttgtagtccattcaagaaatccaataattttattttgtccaaagcacatgatcaatcgcatatttcagatctgtttgtactctttttttgggtgctcgaattagaagaaaaaaacaaatcaatcgtcaatgaacccatgcttgttctacttctaacaaaactttcgttatgattttggctaactatgtacatgtttttattttattttttgaacaaagatgtacatgttttactaggtgaagtttattactagactatcatttcatcgcttctgaatttatttattagtgaaaatagaggttagatttagtgccaatatattgttcgatatcacattttgacttctctcgggtgtacactaaattacgtttaattcttcgtattacttttcttggctttaattttgtttacgagtaatttgtacttccaagttttgtaaaatctttatataaaaagtagtggaaaaataaatacaaattacaaaaaggcttttttgagttcctaaaactttttgggagtcaaagatggtgctctctttaaacaacgggaactttttgcatcgacctatatgctttgttcttgggacacagaacattttcctttgccaaatacaatttcttgggtggataaaattttccttttatattaaaataggagttgaaactatgtccaattaaattaatatgtagatccgaaacatagctagtacatatcaacgtagattttttataaaataagtaataaataaagagctactgtttcttagtctcaaaataccttataaaaagatattgttttgttttataaagaataaaatgaaatttgttaagaagatatatatatatatatatatctcaattagtctatatatagggagtatatatatatatagttattgattactgcttctaaaatatgcaacaattatattggtacgtatataaattgtttttttttaaaaaataaataaattcaatttgtagaaaaaaaaaacttattacaaataacataaaacaataaaatgccgaaactaagaaaccctttaaagttatgaccgtaatagttaaatgttgtatctacaatcctttgaaactatatctatgtgaatgaagattttagttgaataaagaataaatccaaaaatatcatcaaattatgcatcaacattaagggtgtcaaaatggatcaaaattcatggatcaagtcaactcaactcaatccgtaaactctaatgagttcaaaattttgactcaaatgagttgatgagtcaaatgagttgatgagtcaattggtttgatgagtaaaatgagttgatgagtcaattggtttgatgagtaaaatgagttgatgagtcaattggtttgatgagtaaaatgagttgggttgtaatggttaatggtttcaatggtttacccaattaacccatcaagttttgtaaaattgaattaaaccaactaaaatctctaaaccaatgccaatttaagtttaaccaacacaactaaaccgatttaataaaattaatatttttctaaatttcttaaatatacaagcgatgaaattgagaaaaaagtaaactcgtaattttccaccaaaaaacataaacccgtgattttcctgccaaaaatttaaacccgtgatttttcccccaaaaacgtaacccgagatttttctgccaaaaatataaacccgtgatttttctgtcaaaaacttaaacccgtgattttcccgccaaaaacgtaaacccgagatttttccgccaaaaacgtaaatccataatttttccgccaaaaacgtaaactcataattttcccgccaaaaaacataaacccgtaattttcccgccaaaaacgtaaacccatgatttttccgccaaaaacgtaaacccgtgattttcccgccaaaaacgtaaatccgtgattttcccgccaaaaacgtaaacctaagattttcccgccaaaaacgtaaactcgtaattttcccgccaaaaacgtaaatcttttaaacaccgtgattttcccgccaaaaatgtaaatccgtgattttcccgccaaaaacgtaaacccgagattttcccgccaaaaatgtaaacccgtaattttccgccaaaaacgtaaacccgtgattttcccgccaaaaacgtaaatccgtaaaaagtggaatccgtaaatatcctaagtttgatgataatgaattaataatgataattatttattattgttttataatagtaattaattaaattattatttaaatgggttaatccatttaacaactcaacccatcaaattaaatgagttatgggttgacctaacccatttaacaaaatgagttgggtcaacccataactcatttaaccctaaactcatttgattatgagttgagttgagttgggttacccattttaacacccctaattaacatacactaattgatgatatatatttttcaaataacaatatcatctaaaatataatttagattacatcccttaaatatttataccttctcccaacttataaacacaccatagatgtacacatgcacgtgtgtctatctaaactgcaagaaaggaagagactggccttttcgaagaaaataattatttacaaaaaatcactttcccttttagaaaataatttactagtcgactacaaaaaaaagggtagatctctatatgtacatctcccagatctctcaacattatttatacaattttttcttttattcctgcaagagtttttttttgtttataacaacaaatcctctttcaatataatctttatatatacgtatactttcgtgccttgaaattttcttcctcatcttctttggtcttttcttgtcatttggcataaccaaagagtcaagcacattcaaacattctcaagccctaaaacccaaaaaaaacttatatgctcttgttcttgttcttcttctcccctcagcatattaaaccctaattaactatctcttttgtttgtatactgttataaacctcctgatcatcttcttgttttcttgcaagattttataaaaaaaaaacaaaacccagctgttcttgttcttgttctttagctccgatccgttttaaattaaaacacagatatgcagatgattccaggagatccattttctatttcatcctccatgggagggtttgttcatcaagaaacacaccttcatcatcttcagcagcagatccctgaccttaaccctaattctaaccctaacccaaatgcgaaaccaaactcttcatcagccaagaagaagagaaatcaacctggcactccaggtataactcattccacaccataatatactcacatgtatacccaaatctatgtgcatgtgtgtgagtcatagatacttgtatgtctatatttctacatatacataagacgtagaaagcagctccatatatttgcagatctgttttctgatgaaaataacatctccatatatattatttgctgaaataatcacaaactcagtattcacatatgcatatacatccctctctatatttcttatatgtatatttcctccttttactgtatccggatggtcatgttacatatttgtttatttataatctctacaacatatttggagccattagatcaaaatatgcgttgatatatcatatttaaacataaatatggacagatccagatgctgatgtcatcgctctatcgccaacaacactcatggcaacaaacagattcgtgtgcgagatctgcaacaaagggtttcaaagggaccagaatttacaactacatcgccgtggccacaaccttccatggaagctaaagcaacggtccaaacaagaagtgataaagaagaaagtatacatatgtcctatcaagacttgtgtacaccatgatgcctccagggcccttggagacctcactgggatcaagaaacactacagccgcaaacacggtgaaaagaagtggaagtgtgaaaagtgttctaagaaatacgctgttcagtctgattggaaggcacatgcgaaaacttgtggtactcgtgagtataaatgtgactgtggcacgttgttctccaggtaatatttactaacgagattaacagttggtattggttaatgtataagttgagtttttttctacatgaagtattagaactcggtattctattcatatatagcaatatcggatgaaagcaatgcaaaacaattcatgtgacagtgttagaacctaaaagaattgtgtaaaaaactcaaacagatataggtgtatatatcaagtgtcggcatgcatgaatgtgtgtgcaatgtcttgtgatttgttatatctgttgcgaaagttggaatagagcagagcattaattgaagacattctgacttatgggagcaatttctatttatttttgtttaagattttgaaataatagctgcatactttatgagtatatgatattcgatgagattttgatggcatgagcatctattcattttgtgtggttgtatgtgtacatgtctatttggcttcattcttttcttctattcacaccatatggcaagaaactagatatcatgcatatattttgtcaacaaacacatacacacacatgcatatatattatatatatatatatatatataagttctatgtttttgtatatagtaacaattaaggtttttgtgctttttttttttctttttttttctagttttatgtttatttctgtcttcatgtcgcgagtttgcataggagaaataaatgcttactccggccaagaatgtttttgttttgcaaatgatttcaaattcaatgctctattgaataataatcaatgcagttgtctcactcttaaaataattatgtctttatttttattatttattatctaataaataatcgatctctgttttataggaaagatagtttcatcacacatagagcgttctgcgacgcattaactgaggaaggagcgaggatgagttcacttagtaacaacaatccggtgatctctacgacgaatctgaattttggaaatgagtcaaatgttatgaataatccaaatcttcctcatggatttgtacaccgaggagttcatcatcccgacattaatgctgctatctctcaattcggtctagggtttggacatgacctaagtgcaatgcatgcgcaaggtacatcacataccaatcctctttctaaattagttattcatatatatgaaatattttttttttttgatgaatatgttataatactattatcaattcaattgcgttaatttaggtctatccgagatggttcaaatggcctccaccggcaaccaccacctcttcccgtcgtcatcatcatccctccctgatttctccggccaccaccaattccaaattccaatgacttccacaaaccctagtctcaccttatcatcatcctcaacatcacaacaaacctcagcttcactacaacaccaaaccctaaaagactcatctttctcaccactcttctcctcttcctccgaaaacaaacaaaacaagcctctctctccaatgtctgccacagctctcttacaaaaagctgcacaaatgggctctactagaagcaattcctccaccgctccgtcattcttcgccggcccaacaatgacatcctcctcggccaccgcttctcctcctcctagatcgtcttctccaatgatgatccaacaacaactaaacaacttcaacaccaatgtcttaagagagaatcataatcgtgctcctcctcctcttagtggtgtctccactagtagtgtggataataatccctttcaatcgaaccgatcgggtctaaacccggctcaacagatgggtctaacccgggattttcttggagtgagcaacgagcatcaccctcaccaaacgggtcgtcgtccgtttttgcctcaagaactcgcaaggtttgctccattgggttgattatgtgtttaattaggtactgtgtgggggggacaagattttgggtttaattaggattggaagttcctttgaggagacaagtctaattaagaaccgtacccccttgtgaagcggtcggaatgtggggacaaaggttgacaagacatcatcatatcaatttacattgaatgttatgtacttttttactatgtttatgattatcgcaattcacataatatataccaccatgacatgcatggatatgtatttccgacattgtcgttttgtaaatgttgtttattttttctcgttcttgtaatgacattcaaaaaattggtaaatcttcaggcttttccaagtttgttaacgaagacattgcttaaatcgaatattgtgatatatatgttcaattctctaaaatccatggttttctgttttagacacttctttgattctattgtgatgcgatcactacacttatacagttatattctaaatttagatatgttgacaataaccctacaaaacgttccccaagaacagctcaaagcctcaaagaaagtcgcttcaaaagttttaaaacaaaagtaaactcattttataaccaacattatgcgttcatatataactgttttctttaataaaatacaaaattcttacataaagtataattgaaactgaaccaccttgttgaaacttcctttcaagagaactcaagttctcgaggtgtgtgtcaatgtaaccttttggattctgcgtaaattaaaatatttttaactgatactcttttcagtagactgataggcttgtgcttgtctttattttgacttatctctaaccccacacatacaatagtataactaaatagctagtattattttcctagaaaatatgaaatctgtcgtcttgtggatccatgcgttattcgtttttcattgtcaaacactaaaagatttagtatgtatttatgttatttgcttccccccaccaatggtaaatcctattataagtgccactaataggattatttaaatttaaattttgatgcatgtcaaaatcaaaatcacaaaacagagtaatatttattttacataacatattattctttccaaaatctgaagcaaaaaaaaaattagatgcaagttttgtgatactgatccggttaattacacttccaacattttgggcccatcaagtattctgttaggcccatatttatctttcagttataaggttggcctttaaggcttcaattctaataggcccaagaatcgcagttatcttacgtggcagagtaagagccagcgtggaatagttagtcatacgtgtttaattatcattggttactatttacgaaattgaaatttacttaaaacaagttccacgtgggtcataacgattggatagaacaacgtgttgttataactagttacacttaaaacatgcaaatcaaaataaaaaaaaggcttcgaattcgatcgaagaacgataattcgaaacacacaaatttgcttgaatcaaagactcttcttcttcgttcgttcgtttcagtgattccaaagattccaaatttgtcggtgtaatcttcgttgtattcagaggtgtatgtatatgtattgaaatcgagaatggatctgttccgagtttggtcagggatggatttcttagcttggagaggaatggcttacacacttcttcttctcaacttcgtctttgcttgccaacttcttcttctccaacctctcgtttccgctctaggtatattttattctctttgattttcctatcttcgcttcgttttcccctggtgagattgatgtttgttgtttagctgatttgggaatcttagggcttagaaatttgctctaaatggcgaattgcttctgtacttttcgaaagttttctccttttcgtgttgggcttgtcgcaaattgaggttccctgtgatggtattgaaatcgaatttaggactctgtttttgctgctccacattatgaattgatctaatttggatactaggttatgagagtaatgcatctttgtatactcgttgagtgttagcgttgctgtttattttggtacagatggtcaatcggtagatgctgctgagttattcgagagagcttcacaaagtatcaaggttaagcgttatagtgatgccctcgatgatctgaatgcagccattgaagcagaccctgcgctttcagaagcttattttaagcgtgcctctgtgcttcgtcatttttgcaggtataggaatgagctaaaggtcctgtcggtttgcatttttattcttataaggcgttaagccagaagttgatttctcttctatttctctgtgttatatagatacgaagactctgagaatagttaccagaaatatctggaattcaaatcaggagattcgaatgctgagaaagaactctctcagcttcatcaagctaagagtgctttggagactgcctcgactctgtatgaatcaaaggatattgcgaaagctcttgaatttgttgataaagttgttcttgtcttctctccagcttgctctaaggttctcttcttgattgctatttgcagtatatctttggactctctgatcatgcagtttcttattatttacattgttttttcacttcaggcaaagcttctcaaagtgaagctccttatggtgtctaaagactactcaggtgcaatttctgagactggttatattctcaaggaagatgaaaataacctcgaggcgttgctccttcgtggccgtgcctactactatttggcggatcatgatatcgcccaaaggtttggtctaacttcaaccttattttcaatcagagagagtttggggtccaaaacagatatacttaagtaaactttctgtttcaggcattaccaaaaagggcttcgtcttgatccggaacacagtgaactgaagaaagcatacttcggattgaaaaaactgctcaagaaaacaaaaagcgtgagttctgcaaacctctttgtcttcttttaacactgagctttagctgccaatttcttgtgttgaaaacatgtgctctattgcaggcagaagataatgcaaacaaaggaaagttgcgagtttcagcagaggaatataaagaagctattgctctggaccctgaacacacggcaaataacgttcatctctatcttggactatgcaaggtctcagtcaggctcggccgtggaaaagacggcttaaatagctgtaatgaagcacttaacatcgatgcagaactgattgaagctttacatcaggttcaaatcatcaagtgttaaatcataacattcataactattttaaccaacagggttctgattactacttcatcagagaggagaagctaaactgttgcttgaagattgggaaggagctgtggaggatttaaagcaagctgctcaaaactctcaggttggtgaaagattagtgttcagtgtttctgatatctaaaatgtagcttagatcttgactcaactaaaacacacatctaattgtaggacatggaaattcatgaatcacttggtaaagcagagaaagcactgaagatgagcaaacgaaaagattggtataagattcttggaatttccagaaccgcctctatctcagaaatcaaaaaagcttacaagaagcttgctcttcaatggcatcccgataaaaacgtaggcaatagagaagaagctgagaacaaattccgagaaatcgctgcagcttatgaggttcaacaaaattccacatcactctttcatattcacacacatggtcatggtctctctcattctcttgacattttaaccttttaattttaccagattcttggagatgacgataagcgggcgagatttgacagaggagaggatcttgaagatatgggtggaggcggcggtggaggatataatccgttccatggtggtggtggtggtggacaacaatacactttccatttcgagggtggttttcctggtggtggtggcggttttggtggtttcggtttctaacttgaacaacatgatggaatcatgtaacttaagactaatcttttcaaattatactcaatatcacattttcctttctttcatcaaaaaaagttgtgtgcaatcttaatcaaaacaatcacacgtaataacacatctataaaacaatctcaaagtacaacaaaaacttaaagctctcgttattcttaaaattccaaatgtggagactcaagaaaagctctctctcgagttatatccacagagaagaagaagcagcaatggctgcaacggtagtgattctgatcccaaacccgaatccagtcctctctgcatcagatgaatcagtagaatctcctccatcatcgccaccggaagctgagccttttgaaacagagccgcctttctcaggggccggagcaggagccacgcttgatccaaacatggctaatggcagcaaaacttgatcaacctgataaacggccagctgcttatcgctgtagacagagttagccacggtggcgctgacaactccagtggtgatgttaacttggttaccggagctagtgatgttaagagggaatttaccgttttggccatctccagcttgcgtgcgtaaagggttactaacggtttgaaactgaggcatggttatgagtgtaggtaagacatggaactgaacaagctgaactttttgttggtcagacaatgagtttaaggttccggatttgaggctgttgaaggcgttatcagtcggggcaaacacggttaagccattactcgaggaagaattgagctgagtgttgatttggtctgaggcttgagtgcttttaagaagtcttatgaacaatgtgaattgaccagccttttctaggattgcggttatgttcgttggacctgaagggcctggagctggagcctgaccataagtagtggctataacgaggaagaagatgaagagattagagaaaatgaatgttcttgaagtagccattgttgtagttgttgtgtgtgtatgttgagatgttttggggtttgttatatagagagagatgtagtttggtgaagagtaggattctcttactagtgtgaagattattactaggtaactaaatgagattctatcaactaagtcattagagattggaaatgtttcttttaggtttaataaagtttgtttgaattgagaaagagagaggagagacattgctttgaagggagagtttgggtgggtgaggattgaaaatgaaaaatgaactgaaaaaggtgttatagtgacctgtcaaaaaagctgtgaagaagtgttatccaagaaatatggattgctaatcatactactgttcattatgattttatgtgtcatgtgtgtgcctatcatcattccttatattttagttggcaaaaaaaaaaagacttggaagtattgaaaaccaaatctgatctcaacctagacaagtcgattaaagctaaaccgaaaaccgaatcccgaccggttaattgaaaaccgatccaaccctttagggactctagcttcactcaaaagatctacgctgctgtcaaaccacctgagtacttgctggctcttctggcaggtgggaattgcttctcctccatttcaaatactcgttaatagctgttgtgccggtcatggtgagtccaaatccgatcatagtggctaagacaatgcacattaccggctgcttcacctacacacaagttaatgagagagagtgtgaggaatcaaaaactcttcaacaaagtaaggtttctctgtgacaacaaagtaaggtttctctgtgacattacatcaaatcttacaactctgtagaaaagctgagcgaaaaggaccacaaaaccgaactgaacggtggcgtagatccatacatagttcttcttcactgcaacaaaccaaaccacttaagactgatgatcaatatagaatacgaaaaaatatataatttcgaagtagcttctttattacccattgttgttgatatcattgatgcaagaagaccgataatgcaagagaacggtaaagctattgcaacggcgctagatttcatatctataatcagaagctgttcaaggaaacagaagtatgcaagcatgcttacaatgacaagaattggaatatcttgccatacattattgaaccgtgaaatctcgatatccctggctgctctagaacggttttgagaatcctgcacacgtagaagggtaaccgggagatttctcacctcttgcttacacacatcacatgttatgttccctttaattgtaaaccatttgatagtgcacgttttgtgggcaagagctagttcccctttgcacatacattccatcttaaaagcttcttcatcttcttccatttcaaccatacagattctacacacagcttcttcttcaggaacatcttctccaccatcatcattttcatctgaacacatatcacatagtttgttacatagagtcaaaatatggcatcacaaagatatgtctgggaaggtgatttgtaaccgtggagtttactcaatttcgatgcctgcgtcatctctagtctcttctcatccccacgagacggagtaggaatcacgcggaaaacacttgacggctttacacttccatctttgttgaagaatgtggggacagagcgtgtacgacgaataggcagtaaacgctcccctttctagtaaaaagaacagtaaaatcaagtaaagcagaagataaacagcttctctaaagctaagacaaatggaaaatgaatcaattcatcaactgaaatactcaacaagataatctcccttattaatggtataaccaagttttgtaagatagaatactgaccatggatgtaaccggatcaacctcaacggcatacctcccgttcatggactcagggtttgagtgagttataaaagactctgtcttcttagattttctaggagctaagagattagtgagagaccatgttcttggaatataagacttatcactaccatctcctaaaggggacacaacaccttcctcaatatctgcactgtggttcctgtttttgaaattcttctgattcgttctgtttcttgacgaggaaggactcattgatccaacacgtctcccagttctagggctggacattggagaaaacttgaaccttttggaaacggggctatgaattaaggaaccatttgctctcaagaaatcgccatgagcttctctcgattgtatatctaacacaaggcctcgccatcgttgatgttggctcggtgatagcatttctgttatctcagtagaatctccaacctggaaaactcaaaagaagacttttgtatcagttcctcacaaagttggatccttgaaaactcatgttcctcaatgagcaattacaatccctagattttcacaaaaatgtgtgccttaaacctggaatctccggaaaacataattgaagcagttccatgatttacaagtgacaattcaacaagtactaatgatcaaaacaatcccttaaaccctgatcttataaccctaaactctcaagagctaagctaaatcagaaagaaagaaaaagaagatcaattttgagatacccatgaactaaaaaccactgaaattagcttaaagcatgaatctttcaggaaaaattcaaaattttgggaattgagttaagacttaagagtgagaaaactcaccattagagctggagaagtaccttcgcaagaccaatgttctactacttcgcgatatttatctttatcatccatcaccatcaaattacaaaacccagaaacagtgaagtaaaagaagaatctcaggaaaacaaagtatcaatctttgggattaatttgcttaaaaggactaatttttaggagaaatgataatctgagaaagaagcttttgatcaagaacactcatataggttgcttcaattttgtgtgcttactcagtgcctgccccgtttctctcaactaaagaagtaaattggattcggcggtttttatttttattgttttgtctctattacttacttaagtaataacctcttttttttttctaattttggtatatatctttaaccagtggtgcatataattttgaatcaaaatttccagcttacatgtcaaataaaaattgtcttcaacattcttgtgaaagaagaaaaagaaaatcatgtttctattcaaaaatttgaatgcatcaaatgtgtaaagcaatagtaagaaggtaatcaagtatggcagcccactcaaatgtatgtacagattacagatattcataacattttaaaaaatgattcaaaaatggtttatggatattatctgaacttctgctgaatgttttagaacatttcacaaataggttatgtgtatttctgatcatatttggaacaaaatctgattaaacaaaaaaaagaaacaatgaattttttaaaaacaaaatctgaacatatttataacagaaaaagagattaggaaaaaaatattatgtatgaaaattttgttggaagaaaaatacagattgtctttacttatttagatgtgcaatgctgagtttatcttatactgcttttgaaagataaaacaacaaaaaaaatacttttgtaatttatttattaattgggaaaaaggagaaaaagtataacatttcgagagaaagaagtaaataacattgagagtgataaacctttggacaacaatttaaaattctgtcgagataagaacgactcataacgcaaaatatggtagttacgctgacacaaacaaagaaataatggataaggcaaaatgtaacacgcatcacacctaagtaggatcgatgtctcaacaaacacatgtacaagtgtacatcaaaccgactaaatgtatagattatgtttatgatatgaatgactataagatggttaacaatgtgaattttttttcacgaaactatatcaacgacgtgtcgaaagagcatgtaatcttacaaatctgatagcatttttagtgctatactctgaaggctgaagcacatgaaagatgaaatgaaatcatgcttgacagaaaatgggacggtgacgatatcaaaagcaaaaaaataattgtggaaggcccaactcggcccaacttagccaaaactgtgtggccaccactcgactcgtgttcgatccaaaacataataggtttacattttacaaattttcagagtttttttttgctaacttaaaaaaaaaaaaaaaagagagtttatctatgctaggttggatgattaatatgattagcgtacaatattatttcttttttacaaccattcaaaaaaattagtttcctaaaaactttttaagaaaattaaaacagaaactacttgggatcaacacgtatgtgttcaccacccacacggatatggacactgtgtagggacaacagccaaattcaacatcaaataattatttcgaaggcacagacaataagtgggagccactcgtttttgtcaaaaatattgaataacaaattagcgatataaacaattctcacttattctgtttaaaaaaacgattattggtagtttggtactactactcaataatcatagaagaccatgaaaacgaaatccacgtagtatgtgtataatcacaaacggtcaaacatttaacattagcataaattcttgtcacgtggcaatattgtggcggtagaattttaacattgtggttagcttcaccattaaatctgttaaaagcgcttcctcactcactcttcttccccaaaaaaaaaacaagacagaggaagagaatcacgaaaccatagtcccaaacccttcgaatctataagcatttctcaaacacaatcaagaaactgtgtttagcttttagatttctacaagcatgtaagacgagattttgtttcttttttttctgcatggtggatcgaacggtgagaatggggacggaggtgaagtcgattagggttccaagaagggtctggtttggatcacaaatatctatagttctcctcgtgggtggaaaccatacctcctccaggttttgtactcgctagattcttcgattttctctttgcgattcttctttgttcttaagatctgtttagcaaatcgtactagacattaatcatattttaagattccatcggagctgaagtatttgaagaaatcaatgggtataaagatcttgaagcttaatatcttccgtggatctacgaataggcatgctctgtttcgtgctctcatcatcgcctctgctctatctgttgtccctttgttggagttaaccgctaaaaatcacgtctttggtgatcatggagcagtggatttggtcgatctcggccgatttgttattccaggaccgaaattgttcttccataagctcgttcaaccattctggggtaaaattgagacagagaagtatccacaagtggtaattgctgatctcgttgatgagctcatggggttaaagctattgcattatgatgctaagattctctgcattggtcagggatcggattctgctgtttcagggttcaaagagatgggtttctcagttgttcaaggggttcctaagcatccattgttttcctttttcagtaggaagcatgtcaacgagcttgagcttagtggtgacaagtcttttgatttcgtgctctgtggggatgttgatcatgttgcttcccctgctcttcttgtgcttgagatggagcgggttctgaagcctggtggaaccggagcagtccttgtgagtactaatgccaatcgtcttgtcaaatccgtgacttcggggcttaagcagtctgagatagtgcgtgtgaacaacttggataagttcaccgtcattgtattcaagaggaatgtaacggagactgcttattgtattggaaagtctcagctaccaagagattgcaaatctgttgacaccaatagaccttacacagagttcatggaacctctactggagcaaaagcctgctgatttcccaaaatcagtagcttacttacctaaattccttgatctctctctgaaaaagagccttgtctacattgacattggagcagccgagcacatggatgctaatttaactccaaactggttctttccgttatacccactcgacagcaaagcattcaatgtctactttgtcgaccacaacacttcagtaatgctatcctatgtcaagaaacccggcgtcacctttgtttaccatccggatttggctgagaacaactcgacagggaaaaagataactccgcttgaacagctagaaccatttccagaagatgagagattcgatttccttgcttggtttgaggaaactgcgaaatacgcagactttgtagtccttaagatgaacacaaaccaagtggaaatgaagttcctaactgttttactggaaacaggagtcatatgctacgtggatgagcttttcctccgctgttccaaccacaagtcagactgcatcaacatgcttcaaactctgagagccagaggtgtgtttgttcatcaatggtgggaagactaaaccaatgtaaaactcaatctcgcttcgccttagtcttatctacgtcgattcgtgtctgtctttgtctcagttgtaatgccatcaccttctgtgtttgccatagttggtcctcggccaccacagctcctggccaagcacctataactaaataagaagctgcctatctgtttatcattgctatttaagaactcagtttccacttataatatattgaaccataacgttttacgtcttaattaagcatggcatatattacacaagtcgattgcttaactaaatttgttcattctccatctccatttcatccgttcttgttaatctccaaaagcatctcaacaggttgtctgcaaactgggcacagatttgtctgaaaccttaacgcctttgcgcacccgctacacatacactgccaaacagaaatacacaaaccatttcaaaagaagttcaattttttttttatatgagctaattttaagtatgatgaacactataccatgtgtctgcaaggaagaacagttgtatcgcgtggttcagacaagcatacaacacattcctttccctcatcggaaccatcaaccgtgttctcaatcccataaatctcaagcagctcatacctcctcttattcacccatagtatctgcttcaccacttctattttaatctctcctttctccttggtatacaccacttgagtaatctgcacattggtggaaccagactttccttcttccgctggagttgcctccgccttaaccgccaacgggaagacatctgtatccacctccttgaatagctcggaatctttaaacgccgtcaagtctatacccgttccagatgattgtatgaacttctgaccaagtccttctccgaaatcaaaagtgattggaggcaaagtatcttcctttgtagctctaagattacattctgcatcttctgtagcaaagaaaacaactgtgatcctgttctcgccaaccaaaacaacaaaagctaagtcatttatattactccattgattgattcaaacaagattcaaacttttaactaaatttgatcatttcatagtttgaaagtaaaaccttccgggcatggatgcatcaaatgtgaaggagacaagaagtcgattcggattctccgggtcgggtatgagcgttaaagtcttcttcttcagattaacatcgttacgaatcgtgacggctttctggtggacgtacgtaggaggcggcagtatagggtatctaccgccgtgaaacaaaggatgaggtagttggtaactgttgggaggatagtgatgcaaatggttgaaattgtacggtagcatcggcggctcagttactggcggaggaaggcagttacctggatactggtcaacgtagttagggttagggttcagatatggtggcacggcggcgaatacaaatctgttcggtgggagttcaagaggagccgtttccatcgccggaggaatattgctcctctgccttctcccgcagcagaagatcaaactgatcagattccccatgatcggaaaaagaaaaaaggtgaggtttttcggtgattcagttgataaggagtagaatcgaagtaggttttatgatcattgagaaaggggagtaatgagattggagatagcgacgtcgacgaagaaacaccaaaacgtttatttgtatatattataaattagtattaaacttgattaattaccatgggaaattgattattacttttaatcacataaaacaaagaaatcattatcagtagcactaggcaggcaataggcccaaggcctcacaacaatatcacggttacaaaataagaagaaacgaaatgacaaaaccggagacacgagattggttttggaggttgatcggaaaacaaagaaacacatccattaataccggcgattacaagaagcactgctcgtcattaagaaacatcttgcactgatcgtcattaagaaacatcttctcttatgtctgattatataggagatcataataacgtcgataaaaaagagtttaaagtggaaatcaaccaagaaatagaaagcactatcaagatatatttcaaaatgaatatttcattaaaatggattaaaaaataattaaacactcgagttttgatcttgtcttgttaaaattttactcatcgtgttcctcataaattgtccccagcgaaggcgaagctgaaaccctcatcggataaacaagaatcgccggtacagtttcgaatggtccgatcatcctagccatgatttgtaaatatactctttcttcgatttagacttcggcagctttcgactgtgttgagaagatctatgtggaaattattgttattgctgatatttatagagatagagaggaatagtagtagtgtaattaactaatcatcaagtgatctttatatatttgtatacttttttataggacgcagcttaatacttatcgcacgtgatatttatgtttcatatttaggtgatgctcgaaagttgaaacataagtatgcgtacactgctttagtttgcagataaatcatacatgtctttattaaaaattaatgtaaattagattcttttggttgagaaaatgatcgcaccaaacagaaatagcggtgagactggtttcaggtttaagtttggtttgatatttgaagatactgattttttgtcgtggaccggttatcgtcccggttcggttagaaagtatattaagatttgtctttaattaccaactcgtgagcatataacaacagatcaccgagcgtacaagatgtgaaagttgaatgaaaatttcacaaagaactgagatttgattgtacaaaagatacaatacaaaatctcatcttatacagttatagaaaaaacaacaacaacaacaagagtctatcttaaacccaagaccgagtaacaaaatgatcattacaatttacacgtcctcgttttcttgttcttgattgtcttcttcggtctctccgccttctaaaatcgtctcaagaatcggagaaaccgatggcttcgccggagaaatgatttgtggaggaacagcctccatccaccacgccacatccaccaccaccgtcagattctgatcgcaccgattatcaaagaaacacatattcgcttcactagatattattttagatttgcggaagtaattcaaattgttactttttgagttgaattgatacgtgttcatttgttcgtatttatagagagattgacgcgtggagatatgtggaacaatgatgggtttgacgtaagagtcggacaagtggacgatccacaatgtttaagttagtttgttgacttggtcttatttgctaataataatgaaaccaacacgaatattctagaacctcttgttgtcgtcattatcaacaagtctcgaatgtgcaacacgtgtgagctcttgtctcacacgtctatatctccgctaagatttttttttgttgttgtcaatgttaggatatttctttatgcgtcgtatattgcaaaatactagacacacacttagggtttgaagtttctcagcaattgtgtgggtacgctttggacaaatacactactctacaaattagtttagaccgcgtttgactcggtaacgttagaagcagattagacactaattaggcccaagttaaactatcatgggctcattcgtaaacttagttctaatgggctctcaacatcagatcttaatatttatagagagcatgaggtcaaatgcgtagttccgtatatgagaattatgaaactgaacccataagcattttaatcacgctgaggaaagtagccacttctcgtttaactaatacggtaatacctcattctgcctgttttattgatttgtttggatattttggtgcaattcgattaaaaatgtacctagaaaacaaaattaaaattgagaaaataaaaaacgtaccaattgatagaaaaaaagattattgtacgctgaaaaagtagaaagaactagataatttttagtgatgacaaaaacgaaaatcttctttgtgaacttaaatcgctggaaaacatgccatatgcagagttaatcaaaacattattagcaatcaattgatatatgtatatataaatataagatgccttagctttttcttatatatataattaggttaattagaaaataagtcaatggcctgaaaaggattggataagataaggatatttgaaaggttgctttcattcttcttgcaatttcccccttattttagttttcttagcttatagaattcatccctcattttccgtcatttgatattataacataagatgcatgaggacgacaaaaatagaaataataagtgaataggtaggtataccatgtacttgtcactagacgattcgatattttacatagagattaatctatttctagggaattattggcaccttatgatcgaacatgtcacctaaaaaaagtgagcttatcacatcgcataagttttgcaaaaatattcttaaactaattttttaatgtatgtcagaataatgtttcatcaatcgagaatatggattagagatataattcactagcaaaattttacaaacggattcttttttcttttttttttgataaccgaaattgatatatgcttgtatagggtggtcgaagctaaggtctaccatagttaattgctaatttaattattattagttgtaaaacacacaagatgacatcattatttgatctaacacaataaaaatagaattaggcaaatgaaaatcggtttagtaaacgacaaatcaacaatgtcatgtgttttgttttctgattttggttcaatttaattatttcaaaataattttcttgatatccaaagatccatttttaattcttttatgagagaggttagagcttttaccctcaaaggcctcgaagctattttttatttttatttttttttgtaatgtgtcatttttaggagtccatttttcgaacataacataagcatagatacaatacggagctgatcatttgacataatatgaaattttccaacagttatttgttcggtgataaaacaataattgaaatcccaacaagtagaagatatgcaactaacaagaaagattacgatcatacggctgaacaatgagaatttgatgtttcttaatcacgtaggattctatgcataattagaatatataggaatattattaaagacaagagaagatttaagaagctcgattattatcttactacatgcattattattatttgttttttttcttggtacttgtgttttgttatgtatctcaaagctccaattatgtagaggtcatcgaccaataattaatcaattgaccacactactctatattttaaatagtaattggttcaacaggcaaagacgctcttttatttgacgattattttctagtataataaaatctcacaaacgtcataatttagttgtaaggaaagcaatagtataaaagaagtataggtagtgtgagtgcgacaaaggaaataaaacacatacaagacttgaaactatttatgaattatgacttctttgttttagtaagctaaagtgatacataaatataacatattatatgtggatatgtacaacaacaaatctacaatgaatgtctacgtgcatggtggatacacatcttctatacatgcacgcggcatatatgataattcatgcaaaattaaaataaagtatcgttataggagttattaggccatctccattggtaagatactttaaaagtttctaaaaaaaaaaaatataataatattttattatgatttagtttctgtccaattataaacacacatatacacatagtctctcaatcattactcgaaagtttttctgcagagaaactattctcaatctctcttctatctctctcctactctattattattttatattttttagttaataagaaactatgtgacagactactaatggagatgctcttattatctagttgtgaattttgtagaattgacatatgtattatacacaactagttatgaatctagattttttaaaagattttataaggattaaatccacctattttcattgctatatattaacctacaattatatctataatgcataatgcattggttatttatgtttattgtttacaataatggcaatgaacgtctatacaaaattacaaagaatatatctaaacaaaaagtgaatgtccttttatatatgaccctagctataaaatttattcgagtcccccacatgttttgttatgttcagattattgtccaacagatttaccaattataatatgtttcctgtttctacaataatatcatctacttgtaatttgttggctattgcattttcattttgtccatcatgcatttggtaaaatattagtagtatttcgcaagatgtaccaagcgtcgttaatatctggtctcttttgtccattttcgtctttcagcatcaagagaatgaaaaaattggagagctgagtgacgtgtcgcgatactgacgcctgaaatatccgtaattttcaaattgagatgaggtccagtgggccaacttatgttgacaagtgatatctcacctattattggcccacgtaatccttttattatcaggtgtattttaaattatatgtaattattttgtattattataatttaaagaaagtcatatcaaacagctgaacactaaataaataaattataattcttttttaaacactatgtttttgttttatcttgatatatggttgacaaaaatacaagattgataaagaaaatgagtcattgtggaaacaaaaaatgattccacaatttgctatttattttgatagaaactatttaagtaagtgaacaaggcatgtccctatttagtccacgtgaagtaatcggacgtgtcaattttgtttactgaatagaggtgtaataatccgacgtgtcattcatctttggactatccaataatgtgtgcacagagttgggccatgttcctctgtggacaatcccactagtaatcctcatacacaatagagtcatattattgaaattaactgcaatgagtttttagattggataaaactaaaagaaatgaaactggctaattgcaattggataaactgaacatttatttttaatttgtatttctatgagtttctaaaacatcggttcaggtgtcaatcaactgcttaaatcaaattctttattcgagatattgacagatccattcacatcaaatgtatgttcgatatatcatagttccgtttcggttgtatcaccggtttattctttctcttttccttcaaaagaaaacccggttaattatggtctaattaatacaatcctcatactattcagtcttagttgattgtcaaattaactttgttttagtgttaacaaattataataagcttcgaaggtcaataacaataacagacagattattaattgctaatttacacacacaaaaaaagactctattgaccatctaaagtgaggtaagcatcctttagaagtcgctgtgcttcttctcttcttctgcgcacaaccaaaaacatcaaacggacccataagaactaccaacaaagtttctgaaaaatctttgaacagatgatggattgatataagcacaccattaagtacagtatacaaacaaaatatgcacaccttttaatgtcttccacagcttgtttcctctgttgaatttgaagttccataatgtgaataagcgttgctctcgcctggacataagagaagatgatcaaaacagtgaaaacaaaaactgatgaaatcatgttgtagttaagcgaagatgagatcttctttacttggtgaggcctcaaggaattgagaaggtgatgcaaattcttgaagatagaagaaatttcaccaatcctcttcgcatattgagaaggtctgtcaacaagaacatcagcaagctccaatatatgtaactgtagttctctattcagtgacctgagttcattcttgtaatctacacacaaagatatttgaaactttcttcaacgaaacaaagaggcaaatgaactcatgtaataagtttgattccaattaagggaagaaccaaaaaccgtactctagaaagcaaataacaattgggttttgagtttgattcacaaagctaaaacaatgacataccaagattagaatctttgggataaagttgaggcactccttgttcttctaagcttggaagaacatcttcagtctacgaaccaaaaaaaatgaaaactactaaaacacataaagatgaagattttaaagagggggaaatgtggaggagactcacagtatagttgcctccaaaacagacgtaggtgccttcaatcggaggaggaggttcaggagcagaattagggttttctgagtaatccttgtagagtctgtaatatggtggaggaggcggatacgtagctgtagccattattccctacagatccaaataaaaaactaagcaaaatcagtaacagattcctaaaattaaggtttctaatcgatgcaacaaacgattcaatccaaaatctaagactttactccaacgattctggataaaatttgcaaccatggtacaaagagaaattagggttaacaaaaacacgaacctattgggaatgcagaatcggaaattataaccagacgagaataagatcgaagaagcttttgattttgctttggagaagacggcgtagagcaagaggtcaataatgacgaaacgagttttgattttctcgtaaattttcggttacgtgttcggacggttcgtataagtctggtttcttttggtttagtttcggtttaattaaaacaatggcttttcagtttaattcgatttctgctgtttggatgtgattaatcaccccactaatgatgttattcttacgtttttacatttaaaaaatagtaaatatttttactttataataaataaatatattttttgtgtattctagatttttttgtcaatttaaatagaaattaacaaatattttaataacaaaaaaaaattaaaacagctaaaaaaatcatatctaacaacattaaatcttaagataacttaaattaaatcaaagacgaagataaaaattccattaacatcatcattttgatcataaactcataaagtttttactatttaagaaaaagaaaaacaaaggacgagtgaaacaaaaaaagagagctcacgataagaacgtgagacttgccacaccttataaacttttttttttatcttcttttgtacttttgtcgtttactgtgtaagtcataaactcacataagtttaacccaatgagagagcttatctctttactacatttctctataaaaatgatcatctcaacacatttctccttcaatctcaaatttcacaaaaaccctctcagattttttctacaagctgatcaaaacccagaatccagttttcataaaaacatcatctttcttttattcttctttacacgctctgtttttcatcaatggcgtcaaggaagcttttttttgtcaaacctaaatatatctatccagaaccaaaaccagagatgtccgatgagaatgtctttgaattcgacgaatctgatattcataacttaggcgatcatcaattgccgaattcattcgacgcgaaaagatcgatatcaatctctcggttacggagaaaaccgacgaaaaccggagattcaggtaaccgggagattacaaagaccggttcgcttccggttaatatccccgattggtctaagatcttgaagagtgagtatagaggtcatgcgatacctgacgatgacagtgacgacgatgacgaggatgatgacgatagcaacgacggtgggagacggatgattccgccgcacgagtatttggcaagacggagaggatcgtcgttcacggtgcacgaaggaatcggtgggacggcgaaaggaagagatctaaggcgattgaggaacgcgatttgggagaagattgggtttcaggattagtaatataataagtatgtaattaattataactctctataggtaaacttttaattacttagagatcttaagtaaggacttggtgtttttttattggaggggtttagaggatcgttatagtttcggtccgaaggagaatttttccgatttccttttggcgttatttttgttttttggagtttttgatcatcgtctatttttctttttcttttttggatatgatcaataatattttatatttttgtgtgtttcaaatatgttgaattttggttgttgtgtggttacttcaatttttacagaaatctacagagaaataggcagtggcggaactagaacttgcagctctaggggtcaaaatgtataaaggaatgatcataggggtcaatttatgtatttcattggtgttaatttaaaaactgtagcaaaaaaataactaaatttcataattccatgggggtcatatgaagaagataaacgaatgctaagatctattgaactcggtagaactaaggaaatttgaatataacaaagctggattgagtttaatttcaaatatgttaattttggatcaataataatccaaaaaccaaccaactaacgaaaaccggactagtcactacaacagttcaaactaaattcttcacaaaacatctcttcaaagtttgaaaaccttaatagtcacgtcttttgaaagtcgtaaattgaaccatatatttatatagtttggctctaaacgataggttacaaaagtcttcagcttagaaatgatgtgttttctacacttttctcttcttttttttcttttcatctcacatgaatcaaaaagagaaagcttaattacattaaaggttgatgtgatatttactttctaaatatttgctagaagaaattataatgataacattaaattaagttatagtcatttctatttcggttgtctcccactttctgctatgcttttacaacaacagttcaagatttggaatcgttttctttctccaccaatcgtagtaatacttctttttgtgtttgttgaaattttgcaagattctctcttcctctggttaatacacataacttacttggtaagcttggctgcattttcttttcaagcttttaatcaaagactcactagaaattgcaaaggcaaacataaaattatgtgatcaaactcctactgtgagtttttggttacaaacaaaagttaaaaacaaaagcttgatatttaaaagataaactcaacacatatgcatttgactggcgcacagaagacaattcaagacttgggaaaacagtgagccatcaaaatcgtcagataattcagggaatatattgaatgtggagatgtggtaatcacactattgcacacaaagagtggcaaacaagcggcgcccttggtttggtatagtaagagacaattgttttggactgtttgtgttgccatattcacaaaaatactattgagctatgtatgttaaacattatggtcaatgagtagtagtgaacattcaagtttttttttttttccacttcaagtttttcatcttattattatttttcgttgtgatgcagtagtacggcccatcttcaccagtagtatatcaaagccgaaacagatgacaaattgtttaacatgcacttggattattattgagagttgaaatacaaaggcccgttacaagcccaaacgaaggtacataaaagaaaagcagaaaatgaaaacgaaatcgatagggataagtttttccaactgacggaaacacaaactacaccaggtgaaatagatcacctcccaagtgcatgagacacgaaccaaccacttatcatcagatcacaaaaagcttagaagcttccaccacgaagacgaagaaccaagtgaagagtcgactccttctggatgttgtaatctgcaagtgtgcgaccatcctcaagctgttttccagcgaagatgagtctctgttggtctggtgggatcccttccttgtcctgaatcttagccttgacattatcgatggtgtctgagctttcaacctccagagtaatggtctttccggtaagggtcttcacaaagatctgcataccaccacggagacgaagcacaagatgaagtgtcgactccttttggatgttgtaatctgcaagggtgcgtccatcttcgagctgcttaccggcaaagataagcctctgctgatccggaggaattccctctttatcttggatcttagctttgacattgtcaatggtgtctgaactctcaacctcaagggtgattgttttaccagtgagggtcttgacaaagatttgcataccacctctgagacgaagcaccaaatgaagggtcgactccttttgaatgttgtagtcagcaagagttcttccgtcttcaagctgcttaccggcaaagataagtctctgctgatccggagggattccttccttgtcctggatctttgctttgacgttgtcaatagtgtcagagctctcaacctccaaagtaatggtcttgccagtcagagtcttgacaaagatttgcataccacctcttaaacggagaaccaaatgaagggttgattctttctgaatgttgtaatcggccaaggtacggccatcttctagctgtttaccggcgaatattaatctttgctgatccggaggaatgccttccttgtcctgaatctttgccttaacattgtcgatggtgtcagagctctcaacctcgagagtgatagtcttgccagtgagtgttttcacgaagatttgcatctgaaataaaacaatagaacaagtagaaaccaatcagcgaacatataccaaatcaaaagccgtaagagaaatcaaaacaacaccaaagagaaacggatctaaacataagaaacctaaaacagagagaatcgaacaaagaaaacacaaaaattgaatagatcgtccttgaaaatcctaatttcacaatcaagcaagaaattacacagatgtaaacactacgaatcgatatcttagtaatcaggacaaaatttagaagctggattgacgaaacgaacaatattgtcaaaagcaatttatacaaaagattcaataatccacataacaaaaattggagatcagatacgaatcaaaaacaaaaagaatcagaaaatataccttgaaagagagagtcgcgagagatttgcagagatcgctttaggctttgggagagattgaagagtcagaaaaagacgaaaggatgaattattatcttccacacgaaggtcttctttatatcgcaaaccaaaagcccaaaaccgtcttttctattaatgagaataaaatatctttagccaaaacaaaaaaaggaagatatcagttgaggattattatcacgaaactaaaggaaggaatcatatgatacgtgtcatattttccaccgtgcgtttttaaaagaccgactcaagtagaaacatcctatggtggtggttggattaggtcatccattacatctgcttcactgacatttttctatttttctttttgtatatacttttcctcaaataatttctttcttttctatagaagaatttaatcaataaggaaaaagttcaaaaaagattctttccattaagactatgtcttggttaacccaacccattaagaataagcaatcataatatatatagagaatactaatactatatatgagatttttcttttaatttcatgttgattatgatagtttatcttcttgatttaatttatcaatacttggcataaaagattctaatctactctaataaagaaaagaaaaaaaagtatctaccattgactaattaaaataaggaaacttatctaccaaatttgagtattttttagaacaatctttttggtttaattccaaaactctaaacctaattgttgggaaaaaggacctaatttttaagaaaagttaataattagaagatctgtatgtttttttttttgatccaagtttttatttcttttctctttttttcatgataaaatctatgtttttttagtctacaattaaagtaattgttattattttctttatctttttttgttgttgttgttaattccctttttttttttttaacagcaacttcttaaaaaaaaaaacagttgggccttgaatttatttcaggcctgcgttattaagcccagataataactcaaaacaaaaaaaatgttgaaccggaataaacccgcgagattaaatgccggttttcaggtaacatagaagaagaatatatgaggattgaagaagtattcaagaggcggaacaattcacaagtccaagagcttaaatttctcctcactcttctgctacagactcggaactctttctctttgctaaaataagatgttcaggatttttgttgcccgacaattcatgtatctcacactctctctcttctctgttcttactactctgttacattaccaccaactcaagactttcttccacaatggcgtttatgagacttggctccaaatccgaagctttccatcgtgaaggccaaacctggtattctttcttctgcattgaattagactaatcgacttataagtctttgtttccggtttcgagatcgaattctcttcaatgtcgttaatttctcttgattttatatgtaatcaagctctcatctttttgttgaaatcgaaatgggctcttcctagaatcgttagttattgatgcaagtttcaaagatcatattttttttggaatttagctctgattgatttgtgacatcaataatcaattttgtacggacaagtatattctgttttgggtggtggtttatgtctctctcttgtcttacaggctttgcactacaggactcgtgagtgatgttaccattgaagttggagacatgaagtttcatctccacaaggttaaattttctctatcttctctgtttatttagtcctagttttgatgtaattgcataaatgtgaaagcttgatgatctaactgtgtaatgtgtgttcttgatttgtgtgtagtttccgttactatctagaagtgggcttcttgagaggttaatcgaagagtcttcaactgatgatggatcaggctgtgtgttgagcttagatgagataccgggaggcggcaaaacgtttgagcttgttaccaaattctgctacggtgtgaaaattgagcttactgctttcaatgttgttagccttagatgtgcagctgagtaccttgagatgactgataactatggagaagggaatcttgttggtatgactgagactttcctcaacgaggtgtttgggaactggactgactcgatcaaagctcttcagacatgtgaggaagtgattgattacgctgaagatcttcacattatctccaggtgtgttgattcgttagctgtcaaagcgtgcgctgatccaagccttttcaattggcccgtgggaggaggaaagaacgcaacgagcgggcagaacactgaagatgaatcgcatttgtggaatggaatctctgcctctggaaagatgctgcaacatactggtgaagattggtggtttgatgacgcttcttttcttagcttgcctctctttaaaagactcattaccgctattgaagcacgtggcatgaagctcgagaatatagcgatggcggttatgtactatacaaggaaacatgttcctctgatgaatagacaagtaaacatggatgagcaagtgattgagacaccaaatccttctgaagaagaccaaaaaacttgtcttgaagagattgtcgggttgcttccaagcaagaaaggtgtaaacccgaccaagtttcttctcaggctgcttcaaactgcaatggtgcttcacgcaagccaatcctcgagggagaatctggagagacgaattggaaatcagttagaccaagctgctctagttgatcttcttataccaaacatgggatactctgaaacgctttacgatgttgaatgcgtcttgagaatgatcgaacagtttgtttcgtcaacggaacaagcaggcattgtcccttctccttgcatcatcgaagaaggacatttggtgaaggatggagctgatttgctaactccaacaacgttagtggcaactcttgttgacggttatcttgctgaggtggcacccgatgtgaacctgaagctggcgaagttcgaagccattgctgctgcaatccctgactatgcaaggccactagatgatggagtttatcacgcaattgacgtgtacctgaaggtaataaagatactgtttctaattttaaccagtccatgtattaagattttgatgctggattgcaaattttgcaggcgcatccgtggattactgattcagagagagagcacatatgcagactcatgaattgccagaagctctcattggaagctagcacgcacgcggctcagaacgagaggctgcctcttagggtgattgttcaggttctcttcttcgaacagcttaggctcaggacatctgtatcaggctggttctttgtctctgagaatctagataaccccgataaccaacatggcgctaatggcggtttacttaaacccagaggtgagaacgtaagagaacgggtttctgagctggaaaaggagtgtatgaacatgaaacaagagctgcataagctggtgaggacgaagagaagctggaagaatttcaccaggaagcttaacttcaagaagaaatcagaatgctgcaagccaaaggatcaagcaacaccagcaatttgagcaaaatcctctgttttaaggcagagctactagtattatcttcccgcttagattagctttgtttttctggttcttgatgctactttgttttcaaaagttttcatctttctcttagtatctcgctaagagttttgatgcttttaagataaaaacaagagctcttttcagagaaaattaatttcatttcttatgcaatttcggggtgtattatgttatgcagccccataggaaacaatctcagacacaaatcaacagaagggaaatacaatcaacaaagaatatcatcagcgaaacttaacaaataaagacgaagaatcagagtagtgttcccatctcagattcttaacaggacggatagtctttaggcggtggtagaacggaaagctcaggtgtttccccgttctcgacgacgaaagccatcttcaaaccccacattgtatggacttccaagtgacagtgcataaaccaaacacctgcaacaacacatgcattgatcagttgatctacttatcatatatggtcatcatcataatcatatatgtgcattgagagattgatttatacctggattatcagccctgaatctgatggcagcccaaccaccggtaggtactccaacggtgtttctctcaggcgggtcaacgagattgaacttagcaggatctttcttgggatcaaagtttccaacaccggttccaacgacaaagaagttgtagccatgaagatggaaagggtgtgactcaacggttaggagattggtgtcttgcaagacgagctcaattgtagtattgaacttaactcggctaagtcttgtccccgttgatgttccaaggttagccgtgagcggcacaccggtgtagttaaacgctttgggtggtcggtctgggaaatcagtcctgaaaacacctgagatgttggagtaatgtgctttcaagagtgcagttttgggcataatgaatgtgatattgtttatagaagctgcgagatttgtcccgttaacacaagtcgggcacgcgttaatgcctagcccgatcgtgtagaacaatcgcctgtcgacttttaaaggaacaagagccggaaaattcggtgtgttgaggctcttgagctttccgttatagtccaaagcaaatgatgtgtcgttaggcaaaggaagctttggtaggattggtaagaccgtgtttggtacgcctttgtattgaagaatagcggttactgttttgttgtctacggatacaggagcgtccataaacggactagctgccatgaagtagcggtttggtgaccggtcggttttgactaaaacattagtggtttgacctggtccgagtaaaatggctttggttgtgaatggtttagtgtagaccgcatcgatttccaccacggtcatgttgtgtcccgcaatcccgaagaatagctcgtcgtttaaagctgcgttgataatccttagaagatatgttttacccgcttcggcctctatgacgaacgtgtctgaaaatatgcatgtacgaaaaagatttaatgatatctgagatccggtccgatccgataacttacggtttaaaaaggtttagaacttttacgtttctcggaacatggaaatagcggtccaggttttccgttaatggtatgagcatccgacatcggaggcggtgcacccaattggttggcttggttaaccgcagtctcaacgtctttgttccaccattctcctacagtcaaataaaaaaccaaggcaatgagaaaaagaaaaatttaaggatgggactaaaccgaccggttttgttttattttcactaaccgaggattatgttagattcttggtatggctgtgggaacggatacggttttcccggtgcaggcaagataacaatagctccgtagacggtggctcgtagccagaggatgtgtgcgtgccaccagagggtcccgcgttgtccggtcacattgaaatcataaaggtaactctgtcctgtttggatcggacactgagttatgtatgctggaccatctgcccaaccgttccggtactgtttaagcccatgcctgttaaacaaaccgttatattttggttcagaaagaatgattaaactggttgcgccggtttgagacttaggaaagagatgttttaccaatggatggacatgttgtattgtacatggttggttacgttgatgatgactcgatcaccttctcttgcgtaaaccgtcggtccagggaacattccattaaccgtgacaatcggtttagcattgcatatccggcttatgttcttcacttgaacctgttccaaatttcaaacgttaatacaacaaacctacatatcttgggtttacaataaaccggtttagttaaaccagtataatttgtattccgaattatcgaacacctacatcgaattggtacttcttcaccgccgcatccaccggagaatagccaagaaacgcaagaagataacagaatagaaagagaaaacccatcttcatctccggttcaattttccggtttgatgcaatgatgagattttatttgtacttaatcttctactgcttttggttatacaaaatgttgtgaagaaatagtcgctggttacaaatgcttatatagagccatcatgaaaagaaaaggttggtgaatcactctggatatgaaaataataatgtgaaaacacacataaaataacattattaagaaaagcttagagaaatatagaatcgaagaagaaggcttgtaagcaactttctgaaagacgttggcgaatcagcgtaacgtttgttaatattatggagtaccttcgaagttgatatctcagctttctatttatgtttttgacttttcgttaacaatgaaaaataataatttcggtgtatagttatgttatcatcacaaaagccctataaatcaaagatgaaactattcttataatatttctttttataccaaagacccccaagttcgaatgaatcaatctattttcatattttttttctttcatataaccgatcgaattatgtatttcgagaactcaattagtatcagttaatatttctattttattttttatttctgaaaacttgctttgcagtaacatgttgcttagccattcgtttagtctgtaaatttattttctttttgagattatttggttccaattatatagtgatgttttggcgtaacggaaaatgactgctctttttgaccattttgtttttgttttcggccaacgagatcatatgtataattttctaaattaaattctcaacaaatgtattttaatttacaggtacgaaaagtttggtcaaattatttaaaatttacgctgttgattagtcaaaatcataaacgttggatcataggatcaaacactttgagtccaaaagcccataacgaaaagcccatattgtatcatttacaatgttttgtcgcgtataatcatattataatttttataatattttactttgtaagatcatcgcatttgttgtgaatgagtggtttagaatctactagaaagagaaatgtcaaaaaaaaaaaaaaaaaaaaataccacaagtttttggaacttttgattgtttgttattgggtgatactattctatgtttcatcttggtttcaatagctaatttagatatgaattaggggagacaacacattgctttggccaaagcgaaacgcgtcgtattaacgtgtcttaggacataagtaatatagtcaggtccaccaatgacatagtgacaaattttctcacgctttaattctgccacgttataaattaccatccgctattatgctgaaatatgatatactattgtgctaatgctacaaattaaccataatttcgctttgtcgtataatctgaaacataatatatctccacgttgtatcattaaaatttgagtttttattgcaaggagaaaatcaacactaaagcattttttgtcgacacccaacatatatacaccaatacatttgctaccctaatcatatcattgattggcacccaaaccaaagaaaaaaaacaaaaaattcatagctttaaacaatcacgagaaataaaatccaatcaaatcatacgtatcttattctttagcgtcgaacatatatgaaatcattttatgctggcctatccagaacaggaactcctattatcatcatgaacagaaacaatgtagattcaagaaagacaagattttcacagtataatatcaactttcctttccgtggccatgcatataataataacttcttaaattattgcggatatagacaaatatgcaactttttatatctctaggggatagattgtgaggactagtctctaaactttgacctaaaaggattttcagttattaaagaaactaacttttaagtaccaaaatttaaatatttgaaattcgaaaatattagctagcggaaatgcggaaatttagtataaatagttttataacaatatgcaattggtgtttggatgaccgattcatcaaatagacaattcagcgattcatagaccccaacaaagtttggaagattgcaaatatgaagtatatgagaaaaaaatatatcaaaataaaaaaatagaaagaaaaaaatagagaatgagtaaaaataattcaccgattactagacccccacaaaatttggaagattgtaaataatatatatgaaatatgaggaaaaagagcgtgtgagcaccacttgcatgcgattgtgctacttaaccgatgagttagaatactgttgatagaaagagctagccagagagtggaacactcgtgtgaccacgtttctcacgtgcctagcagacttgagaaagacaatccacactataaaacataacaaagggttagagaagaagagagttaattaaaacacacaaaaaaagagagagagagagagagttaactaataatagacttgtcttgtgtaaaaaaaattattcatttgtttttccataagaactagaaacaaacaaacgtagagaaaaaaaagttgcgactttgacaagttagccgaaacaatggagaatgaagagggaaaaagagagatgacgaagaaacaaagttcaaggtttaagagcatttgcgtcttttgtgggagtagcaatgggaacaaagctagttatcaagatgcagccattgatttggccaaggaactggtatgcatatatacaacttgcaagttctttataaaaattcttaggtcttctttaacaatgataaaacgttctgtttttgcaataacatcatgcatgaggattcttaagaaaccttgtatttattaatacagtctctaattaataaagagtttatatgtcaatttttatttgttttctttgacacaaaccgaagacaggataattaccaaattcggttttcaaaatttgatgaacaggtgatgaggaagattgatcttgtttatggtggaggaagcataggtttaatgggtttggtgtctcaagctgttcatgatggtggtcgtcatgttattgggtacttactctatgtttattctatagtacttactgcattaaaattctcatcattttttgttgagagttatgaaaataaaggtagataggtatggtttttaattcttattatgatgcagagtcatccccaagctcctcatgttgcaagaggtattaattgagttttcattagaaatcaatgttcagtggatctgaataaagaataataacaataatggtaatgatgatgctcttttttgtcactctgtcaatgtctcgcaaacaaactcaaagttaactggagaaacagtaggagaagtgaaggaagttgcagacatgcatcagagaaaagctgtgatggctaagcattctgatgctttcattactttgcctggtaatttttactctctatctctctctccatcttctatcttcattacaaataataaagataaacttatgaaaaattaaattattgatattcacttgtgaaaactttgccactacatttagagttccccaatgtatatgatgctgaaatattataaagctagatgcatatatgtatggtgatgttttagtgtttgttttttcccctacataatgtaatgttagtgcttttttataaaaacctttttattagtcattatagagagctttaaagagtgcgtttaataagtaataacatgtggttaatatgatatgtgggagattccaggagtcaaagaatttaaaagaatcacgacaaatagttttgaaataattaaagtgaataatcagaaaaagtccttgatccatcaacatccaaaagcagtgaaaatagatgtcgacaaaggacatctgtttcttatccaatttaagaaaaaatttatgttcgcaatttatatctgtaagatttatatttctgagcagacattaaaagatcgtaatatgagttgcaaaatgttgtttttcttttttgggtagtgctggtatattataaagttgaatattctgagagaaacataatggtaactattgtgatgagtgcactaacctttgacctttgacttaaaaagtaccaaagagaagagaaggactacttttcataaatcagatgttgacttttcttaagaggtcaaaaatgaaagtgaaaaaaaaaaaaaatcttcttgagttttactatacgtgccacttgactaagtcaacgagtcctcactgtcgaagtgtcaatcctcaggtggctatggtacactagaggagctacttgaagtgataacttgggcacaacttggtatccatgataaaccggtatgtaaaccggtttggtctggtataagataataaccgacattttgatagagttagctattgttttctttttcttgcaggtcggtttattaaacgttgatggatattacgatgcattgctgttattcatcgacaaagccgtcgaagagggatttattcttccaaccgctcgacatattatcgtatctgcaccaaccgcaagagagttgtttataaaattggaggtatatcgatagatgatacggatttaaccctaaaccgaaccatacagtatatccaagtcatgatcccgttatgatttattattttctagttgaatatggtatcactagatcgaatatctaaacatgcattatctttgtttcaagttatgtctaaagctggttagactagaccgagtttttgtttaataatcatgaaatttttgattggtgtgtattgcaggaatatgtgcctcaacacaagtaataatatgcatcaaaactgagctccaagacgattcataccaaaaaattgtgaatcgggatgagtaaatatttgattatttcttagtcaatctaaaagtcggatttgattagggagtacaaaatgtaaatttgttttgtgattttataatatatcaactagtgcatttcatttacattttaagttaagttcatatacgtttacgttagatactgtaaatttttggtccgatggttttggatataaggggctgttttgacatttccgattatagaatagatcatttgccttcaatttttctaaaaatgttacgtagacccaagctaaatttattatttgttgggccaacctaaacactaatatcgattgcaacacttggttgttgaaagacctagctaccacttatattactaatcaatttttcttggtttgaatgtgtagatcaaatcgattcaatttactaccaaaaacatttgtctgagctacaactttcgatctaaagtcctgagccaagcaatctttaattatagaaaatcattacataatctcgaattgtttaagttacttaaaattcatatgtctcctcctaaaacatccccgattcgatcttattcttctggtctccacgtaataactcacatacattaaaaaaagaacaaaaataaagaaaacccacttgattaaacgaaaacatttgttgaatcgaaccaattaattgaacaataaacgagttctgatttgtaactgacgtctcatgtttcgaggttaattactaaaattttcaaatctccaattcttatgaacccacccaccatgtgttttaagcccaagagagattcagtgaaccaagaaggaaaataatttaaattgtcccttacactaatgaaaggttatgttaacaaaaatccattttattaatagattgatagtactaataaataaatatttggacacaaagcccaaaagatcacaatctagttaaaaaaagatcgacaagaaagattctttaagctgatgaatgatctgtaccatgtagctttgttccctttttggttaactgcccaaacaacatcaacgagactttataaaaaaaaaacttccttatgaccaaactaaataactgaaattgatttattagtcaaaacatattaaagaacttatttgtatgatatcattatacattccatatgtaactgaaatatgactatcttgactctttgaagaattctgactttttttattcagtcaaacttttaaattgtgttggttactcatcggtacggataaaaaaattcgtatgtgttatttcaaaagtacttgaagaatattgtttctatatatatttatagtgttataaaaaaacaagtgtggtctctatgttatggttcattgaacatatacatcaacataggactgagaggagcccatgttcctttcattgatgcaaaattttagtttcttgtgttttaatttgcttcctatccaatgtacatgtatatatactttcacaagagaatatggataatgttgagtatgttaaatatatagtgacaagttacataaaaaaagcctaaagaaatcaaattggaaaaaatagtaaggtacaatgtatggttatcgaaagcccaagctgtacttccattgatgtaggagatgattaggaacacgtggattatatttgaccaaaaatagtagaaattctatttatatttgttttcttcttttggttttgggtttgattttgtgatttggatagttcggttaaggatggtttgatcaatcaatataaccatactaaaatatgattcagttaactaactatagtaactgtttcttcgttagtaaaatgatacatttattggaatctattgacaaatcttaatgacttattataactggtgataacaaaatctagctattattttgtatccaactacatattttgtataaaatggaaattcgtatatgatatttgtttagtttaaaagtagagtgtatttgttttttcaatgatgatttaatgaaatcaagctcttagttgagatcaaaagacaaataaaacaaaatgtttttttttgttttgtttcttttctatttgagggaaggccatgaattcttatttttgacaaatagttgttctatgcaattaatattgatgtctaatacatatacagcagaataaataaaaacttgctatataaagacgtattatttatagcattctgtggagtataatgtcgaatcctgttctcatttccgattttacatatttatggtactaacgccttcatttatttttccattttcgttagtcaacaacttcagcttttgataacgcctaattgtatcatcaactttagttagttttctcaaataacgtcattttcaaataaagtttttgatttctcttttattatatttatgcaaaaggaaaattataatttcagtattttgcagaacgctgaaatgtataatagaacctattcatgtatttttgtaaaattttaaagattgttttaatactaaaataagtaaatcattaaaaaaattcctagacattggtctctaatataagataaatagatctaaattatgtttggattttaattctaataaaaaggtagccaaaagttatatatacaatatttaaacaattttatttgtttaagatttgaattttatagtatgcgagaatcgcgtaaacttttctcgaatgtaacaaaaaatttcaaatcttctcgacacatgtaatcttttgcgagttagaagatttgattccttattttttgttcgtattcttaaagttagtcacgtttatattatttttcgctttgtaaccgtccctttaaatttttaataaaaattaaaaaaattgctagaaaacaacatttttgtattactcaaatcaaaagtacaaaaataaatttagctagcgtttcacaaaatcaagtaaaataatctccatttgaaactccataatcaagctgtttgatgtattattattacatgtaatgaggagaaagaggggtcgagaaatttaaagtaataataattctcttcttcgtccatggaataaactacgattagtttaaaaagattaataaagatggattaaagaaactatatgttaaacctggaaaatttatttaaaaagacgtttttttagctataagaaaaaaaagaataatacctttatttttacatgttatttacaagtaataattttttttttctctctctctctttgaaggtggcacgagcacccataaccttcagacctatagatacaaatatgtatgtatacgttttttatatataaatattttatataattgatttttcgatcttcttttatctctctctttcgatggaactgagctctttctctctttcctcttcttttctctctctatctctatctctcgtagcttgataagagtttctctcttttgaagatccgtttctctctctctcactgagactattgttgttaggtcaacttgcgatcatggcgatttcgaaggtgacttctttcaaaaaccctaatcctctgtttttttttttattttgctggggggctttgtacggactttcatgggtttttgtagcttttccctcggcttttgcgcaaatgagactttctgggttttttttccagctttttataatttcatcaggtggatcgaattcgtagtttcagcttagatctctctccctcttcattatctggactttccagacttggagttcttcgggattgttttcggtttctgggttttgttttaattgcgagatttaagcttttttcttttttactactgtacttggtttgtggttgaccttttttttccttgaagatctgaatgcgtagatcatacgggatctttgcatttttgttgcttttcgtcagcgttacgattcttttagcttcagtttagttgaaatttgtattttttttgagcttatcttctttttgttgctgcttcatactaagatcaattattgatttgtaatactactgtatctgaagattttcaccataaaaaaaaaattcaggtctgaagctgatttcgaatggtttggagatatccgtagtggttaagcatatggaagtctatgttctgctcttggttgctctgttagggcttcctccatttggaccaacttagctgaatgttgtatgatctctctccttgaagcagcaaataagaagaaggtctggtccttaacttaacatctggttactagaggaaacttcagctattattaggtaaagaaagactgtacagagttgtataacaagtaagcgttagagtggctttgtttgcctcggtgatagaagaaccgactgattcgttgttgtgtgttagctttggagggaatcagatttcgcgagggaaggtgttttagatcaaatctgtgaattttactcaactgaggcttttagtgaaccacgactgtagagttgaccttgaatcctactctgagtaattatattatcagatagatttaggatggaagctgaaattgtgaatgtgagacctcagctagggtttatccagagaatggttcctgctctacttcctgtccttttggtttctgtcggatatattgatcccgggaaatgggttgcaaatatcgaaggaggtgctcgtttcgggtatgacttggtggcaattactctgcttttcaattttgccgccatcttatgccaatatgttgcagctcgcataagcgttgtgactggtaaacacttggctcaggtaaacatttttctgatctctaaagaacaaactttttaaaataacaaactgggctctgtggttgtcttgtcactttctcaaagtggaattctactaaccaccttctctatttttctaacattttaatgttctttactgggacagatctgcaatgaagaatatgacaagtggacgtgcatgttcttgggcattcaggcggagttctcagcaattctgctcgaccttaccatggtagttacttacaatctttgctgttcttaatttttttattatgtgataaaattttgattcctctgacttgagcttctctattataaacaggttgtgggagttgcgcatgcacttaaccttttgtttggggtggagttatccactggagtgtttttggccgccatggatgcgtttttatttcctgttttcgcctctttccttgtatgactggtcttcctgtcttgttttttttctccacgttcttgaaatagcattattggaaattagctgacatgcatacaatttctgacaggaaaatggtatggcaaatacagtatccatttactctgcaggcctggtattacttctctatgtatctggcgtcttgctgagtcagtctgagatcccactctctatgaatggagtgttaactcggttaaatggagagagcgcattcgcactgatgggtcttcttggcgcaagcatcgtccctcacaatttttatatccattcttattttgctggggtaccttttttctctttatatgtatctctcttttctgttaagaagcaataattatactaagcagtgaacgctctattacaggaaagtacatcttcgtctgatgtcgacaagagcagcttgtgtcaagaccatttgttcgccatctttggtgtcttcagcggactgtcacttgtaaattatgtattgatgaatgcagcagctaatgtgtttcacagtactggccttgtggtactgacttttcacgatgccttgtcactaatggagcaggtttgttctgacggttttatgttcgtattagtctataattcatttttagggaaaatgttcagaaatctctcgtgattattaattatcttgttcttgattgttgatcacaggtatttatgagtccgctcattccagtggtctttttgatgctcttgttcttctctagtcaaattaccgcactagcttgggctttcggtggagaggtcgtcctgcatgacttcctgaagatagaaatacccgcttggcttcatcgtgctacaatcagaattcttgcagttgctcctgcgctttattgtgtatggacatctggtgcagacggaatataccagttacttatattcacccaggtcttggtggcaatgatgcttccttgctcggtaataccgcttttccgcattgcttcgtcgagacaaatcatgggtgtccataaaatccctcaggttggcgagttcctcgcacttacaacgtttttgggatttctggggttgaatgttgtttttgttgttgagatggtatttgggagcagtgactgggctggtggtttgagatggaataccgtgatgggcacctcgattcagtacaccactctgcttgtatcgtcatgtgcatccttatgcctgatactctggctggcagccacgccgctgaaatctgcgagtaacagagcggaagctcaaatatggaacatggatgctcaaaatgctttatcttatccatctgttcaagaagaggaaattgaaagaacagaaacaaggaggaacgaagacgaatcaatagtgcggttggaaagcagggtaaaggatcagttggatactacgtctgttactagctcggtctatgatttgccagagaacattctaatgacggatcaagaaatccgttcgagccctccagaggaaagagagttggatgtaaagtactctacctctcaagttagtagtcttaaggaagactctgatgtaaaggaacagtctgtattgcagtcaacagtggttaatgaggtcagtgataaggatctgattgttgaaacaaagatggcgaaaattgaaccaatgagtcctgtggagaagattgttagcatggagaataacagcaagtttattgaaaaggatgttgaaggggtttcatgggaaacagaagaagctaccaaagctgctcctacaagcaactttactgtcggatctgatggtcctccttcattccgcagcttaagtggggaagggggaagtgggactggaagcctttcacggttgcaaggtttgggacgtgctgcccggagacacttatctgcgatccttgatgaattttggggacatttatatgattttcatgggcaattggttgctgaagccagggcaaagaaactagatcagctgtttggcactgatcaaaagtcagcctcttctatgaaagcagattcgtttggaaaagacattagcagtggatattgcatgtcaccaactgcgaagggaatggattcacagatgacttcaagtttatatgattcactgaagcagcagaggacaccgggaagtatcgattcgttgtatggattacaaagaggttcgtcaccgtcaccgttggtcaaccgtatgcagatgttgggtgcatatggtaacaccactaataataataatgcttacgaattgagtgagagaagatactctagcctgcgtgctccatcatcttcagagggttgggaacaccaacaaccagctacagttcacggataccagatgaagtcatatgtagacaatttggcaaaagaaaggcttgaagccttacaatcccgtggagagatcccgacatcgagatctatggcgcttggtacattgagctatacacagcaacttgctttagccttgaaacagaagtcccagaatggtctaacccctggaccagctcctgggtttgagaattttgctgggtctagaagcatatcgcgacaatctgaaagatcttattacggtgttccatcttctggcaatactgatactgttggcgcagcagtagccaatgagaaaaaatatagtagcatgccagatatctcaggattgtctatgtccgcaaggaacatgcatttaccaaacaacaagagtggatactgggatccgtcaagtggaggaggagggtatggtgcgtcttatggtcggttaagcaatgaatcatcgttatattctaatttggggtcacgggtgggagtaccctcgacttatgatgacatttctcaatcaagaggaggctacagagatgcctacagtttgccacagagtgcaacaacagggaccggatcgctttggtccagacagccctttgagcagtttggtgtagcggagaggaatggtgctgttggtgaggagctcaggaatagatcgaatccgatcaatatagacaacaacgcttcttctaatgttgatgcagaggctaagcttcttcagtcgttcaggcactgtattctaaagcttattaaacttgaaggatccgagtggttgtttggacaaagcgatggagttgatgaagaactgattgaccgggtagctgcacgagagaagtttatctatgaagctgaagctcgagaaataaaccaggtgggtcacatgggggagccactaatttcatcggttcctaactgtggagatggttgcgtttggagagctgatttgattgtgagctttggagtttggtgcattcaccgtgtccttgacttgtctctcatggagagtcggcctgagctttggggaaagtacacttacgttctcaaccgcctacaggtaacaaaaaccgcagtagttcattgaaaatcacagttttgcagtttgaaaatattgacatgtatggatttaaacagggagtgattgatccggcgttctcaaagctgcggacaccaatgacaccgtgcttttgccttcagattccagcgagccaccagagagcgagtccgacttcagctaacggaatgttacctccggctgcaaaaccggctaaaggcaaatgcacaaccgcagtcacacttcttgatctaatcaaagacgttgaaatggcaatctcttgtagaaaaggccgaaccggtacagctgcaggtgatgtggctttcccaaaggggaaagagaatttggcttcggttttgaagcggtataaacgtcggttatcgaataaaccagtaggtatgaatcaggatggacccggttcaagaaaaaacgtgactgcgtacggatcattgggttgaagaagaagaacattgtgagaaatctcatgatcaaagtgacgtcgagagggaagccgaagaatcaaaactctcgcttttgattgctcctctgcttcgttaattgtgtattaagaaaagaagaaaaaaaatggatttttgttgcttcagaatttttcgctctttttttcttaatttggttgtaatgttatgtttatatacatatatcatcatcataggaccatagctacaaaccgaatccggtttgtgtaattctatgcggaatcataaagaaatcgtcggtttgaaatgttaaatctcctaaaccggatctctgcacgtagctgacacatcgacgctagattactgacacgtgtccttatcaatatttcttctcgaaacgtcttactgtttcataaagtccttcaaatttctggggaactaagaaaatccagcagagtaactaatccaatgggttatgtaatctacatatcgttcccggcgattcttctccttctgatcgtcgctatcgccttttatctcatcggacgaaaaatcggccggagagaagggattcaatcaacgtcgcagttacactacggaccgccgttggctaattttccggcacctgcaccaccgcataaagctatggagaagccaccggagccggtttagtgtatgtatgatgacgtaataatacttacgtattacgtaaacgttctatatatgtagtttgtgtgttaaataagatgtaattgggccgatgctgaaaccaattttaaaacaactctttattgggcctggggtttaaggaaacacttcgtgccgtttaaattccgtactcacctaatgcaacctagaaactacgcagcgttttgacggaagaagaaatattcgcttcttcttttacaacttttgtcccacaacgcagaaaagtcctctctttctctctctcgaataataatttttcatttgctgcgtccttttggtgcttgaagcgatgaccatggcagcaaatctagcgcgacggctgatcggaaaccgatcgactcagatccttggagccgtgaactctagctcaggtgcggctagttctgtcgctagggctttctgctcctccaccactccgatcaccgcaactctcttccctggcgatgggatcggtcccgagatcgccgaatctgtcaaaaaggtccctcatcctaatctcttttctgcgcagaatttcgagttctggaagtcatagttacgagataattgtttgattgaattttgtacgataatttgtgggaattcggcaattttgttgatagtttttgcgttttgtactgatccaggtgtttacaacagctggtgtaccaattgagtgggaagaacactatgttgggactgagatagatccgagaacacagagtttcttgacatgggaaagtctcgaatctgtgcgtagaaacaaagttggtttgaaaggtccaatggctactccaattgggaaaggtcaccgttctttgaacctgactcttaggaaagagcttaatctatatgccaatgttagaccttgttacagtcttcctggttacaaaactcgttacgatgatgttgatctcattaccatcagagaaaacacggaaggagaatacagtggccttgaacatcaggtttagtttgttttaagtctattgatcgaatatttcaggttagttcttctaataaatgattctaatgatggttttgttttctcctgacgcatataataggttgttagaggtgtggtggaaagtcttaaaatcattacccgtcaggcgagtttgagagttgcagagtatgcttttctctatgccaagactcatggaagagagagagtttctgctatccacaaagccaacattatgcagaaaactgacggtctctttctcaaggtctgcccgttttataactccaagcatttcttatacggagggatcaaagcaatgattgttatttctgctagtttttttttttttacattttgttctgagaccatttttattttgcttccgtttttcagtgttgtcgtgaggttgctgagaagtatcctgagatcacttacgaggaggtcgttattgacaactgctgtatgatggtaagctatgacaccgaatctactattttttcgttaattaagttagtggtcgggactcgggatcaccttgtagatttagaagtttggtttcttagcaacttgtatttgagttctgcttttccactgtttttacatgtggaatatgcgactgataatcttgagatacctgcagcttgtgaaaaacccagcactttttgatgtcttggtgatgccaaacctgtacggtgacattattagcgatctgtgtgccggattggttggaggactaggattgactccaaggtaaaaacacttgttccttcatcttgtgtaatagtgatctttagtatgattatgagctacatcatcttaaggccttattatctttgacgcagttgtaatattggagaagatggtgtagcccttgctgaagcagttcacggttctgcacctgatatcgctggaaaggttggtccttcaaacaatatatcattccaatttcatcatttacgggctaaagagtatcatttatgcatccaatgttgaaagattaatatgtgtgatttttaaatttgttgttgtctttctgttttgggtgatgtagaacttggcgaacccaaccgcgttgcttctgagtggagtgatgatgttgcgtcacctgaagttcaacgaacaagcagaacaaatccacagtgcaatcatcaacaccatagcagagggcaaatacagaaccgcggatcttggaggtagttcgaccaccacggaattcacaaaggcaatctgtgatcatctctgaacatcgtaaaatccaattctttatcgaatcttcttttgggagccttttttatagcct

SEQ ID NO: 1400 - DNA, 121552 bp, Arabidopsis thaliana
cttatttttgacaaatagttgttctatgcaattaatattgatgtctaatacatatacagcagaataaataaaaacttgctatataaagacgtattatttatagcattctgtggagtataatgtcgaatcctgttctcatttccgattttacatatttatggtactaacgccttcatttatttttccattttcgttagtcaacaacttcagcttttgataacgcctaattgtatcatcaactttagttagttttctcaaataacgtcattttcaaataaagtttttgatttctcttttattatatttatgcaaaaggaaaattataatttcagtattttgcagaacgctgaaatgtataatagaacctattcatgtatttttgtaaaattttaaagattgttttaatactaaaataagtaaatcattaaaaaaattcctagacattggtctctaatataagataaatagatctaaattatgtttggattttaattctaataaaaaggtagccaaaagttatatatacaatatttaaacaattttatttgtttaagatttgaattttatagtatgcgagaatcgcgtaaacttttctcgaatgtaacaaaaaatttcaaatcttctcgacacatgtaatcttttgcgagttagaagatttgattccttattttttgttcgtattcttaaagttagtcacgtttatattatttttcgctttgtaaccgtccctttaaatttttaataaaaattaaaaaaattgctagaaaacaacatttttgtattactcaaatcaaaagtacaaaaataaatttagctagcgtttcacaaaatcaagtaaaataatctccatttgaaactccataatcaagctgtttgatgtattattattacatgtaatgaggagaaagaggggtcgagaaatttaaagtaataataattctcttcttcgtccatggaataaactacgattagtttaaaaagattaataaagatggattaaagaaactatatgttaaacctggaaaatttatttaaaaagacgtttttttagctataagaaaaaaaagaataatacctttatttttacatgttatttacaagtaataattttttttttctctctctctctttgaaggtggcacgagcacccataaccttcagacctatagatacaaatatgtatgtatacgttttttatatataaatattttatataattgatttttcgatcttcttttatctctctctttcgatggaactgagctctttctctctttcctcttcttttctctctctatctctatctctcgtagcttgataagagtttctctcttttgaagatccgtttctctctctctcactgagactattgttgttaggtcaacttgcgatcatggcgatttcgaaggtgacttctttcaaaaaccctaatcctctgtttttttttttattttgctggggggctttgtacggactttcatgggtttttgtagcttttccctcggcttttgcgcaaatgagactttctgggttttttttccagctttttataatttcatcaggtggatcgaattcgtagtttcagcttagatctctctccctcttcattatctggactttccagacttggagttcttcgggattgttttcggtttctgggttttgttttaattgcgagatttaagcttttttcttttttactactgtacttggtttgtggttgaccttttttttccttgaagatctgaatgcgtagatcatacgggatctttgcatttttgttgcttttcgtcagcgttacgattcttttagcttcagtttagttgaaatttgtattttttttgagcttatcttctttttgttgctgcttcatactaagatcaattattgatttgtaatactactgtatctgaagattttcaccataaaaaaaaaattcaggtctgaagctgatttcgaatggtttggagatatccgtagtggttaagcatatggaagtctatgttctgctcttggttgctctgttagggcttcctccatttggaccaacttagctgaatgttgtatgatctctctccttgaagcagcaaataagaagaaggtctggtccttaacttaacatctggttactagaggaaacttcagctattattaggtaaagaaagactgtacagagttgtataacaagtaagcgttagagtggctttgtttgcctcggtgatagaagaaccgactgattcgttgttgtgtgttagctttggagggaatcagatttcgcgagggaaggtgttttagatcaaatctgtgaattttactcaactgaggcttttagtgaaccacgactgtagagttgaccttgaatcctactctgagtaattatattatcagatagatttaggatggaagctgaaattgtgaatgtgagacctcagctagggtttatccagagaatggttcctgctctacttcctgtccttttggtttctgtcggatatattgatcccgggaaatgggttgcaaatatcgaaggaggtgctcgtttcgggtatgacttggtggcaattactctgcttttcaattttgccgccatcttatgccaatatgttgcagctcgcataagcgttgtgactggtaaacacttggctcaggtaaacatttttctgatctctaaagaacaaactttttaaaataacaaactgggctctgtggttgtcttgtcactttctcaaagtggaattctactaaccaccttctctatttttctaacattttaatgttctttactgggacagatctgcaatgaagaatatgacaagtggacgtgcatgttcttgggcattcaggcggagttctcagcaattctgctcgaccttaccatggtagttacttacaatctttgctgttcttaatttttttattatgtgataaaattttgattcctctgacttgagcttctctattataaacaggttgtgggagttgcgcatgcacttaaccttttgtttggggtggagttatccactggagtgtttttggccgccatggatgcgtttttatttcctgttttcgcctctttccttgtatgactggtcttcctgtcttgttttttttctccacgttcttgaaatagcattattggaaattagctgacatgcatacaatttctgacaggaaaatggtatggcaaatacagtatccatttactctgcaggcctggtattacttctctatgtatctggcgtcttgctgagtcagtctgagatcccactctctatgaatggagtgttaactcggttaaatggagagagcgcattcgcactgatgggtcttcttggcgcaagcatcgtccctcacaatttttatatccattcttattttgctggggtaccttttttctctttatatgtatctctcttttctgttaagaagcaataattatactaagcagtgaacgctctattacaggaaagtacatcttcgtctgatgtcgacaagagcagcttgtgtcaagaccatttgttcgccatctttggtgtcttcagcggactgtcacttgtaaattatgtattgatgaatgcagcagctaatgtgtttcacagtactggccttgtggtactgacttttcacgatgccttgtcactaatggagcaggtttgttctgacggttttatgttcgtattagtctataattcatttttagggaaaatgttcagaaatctctcgtgattattaattatcttgttcttgattgttgatcacaggtatttatgagtccgctcattccagtggtctttttgatgctcttgttcttctctagtcaaattaccgcactagcttgggctttcggtggagaggtcgtcctgcatgacttcctgaagatagaaatacccgcttggcttcatcgtgctacaatcagaattcttgcagttgctcctgcgctttattgtgtatggacatctggtgcagacggaatataccagttacttatattcacccaggtcttggtggcaatgatgcttccttgctcggtaataccgcttttccgcattgcttcgtcgagacaaatcatgggtgtccataaaatccctcaggttggcgagttcctcgcacttacaacgtttttgggatttctggggttgaatgttgtttttgttgttgagatggtatttgggagcagtgactgggctggtggtttgagatggaataccgtgatgggcacctcgattcagtacaccactctgcttgtatcgtcatgtgcatccttatgcctgatactctggctggcagccacgccgctgaaatctgcgagtaacagagcggaagctcaaatatggaacatggatgctcaaaatgctttatcttatccatctgttcaagaagaggaaattgaaagaacagaaacaaggaggaacgaagacgaatcaatagtgcggttggaaagcagggtaaaggatcagttggatactacgtctgttactagctcggtctatgatttgccagagaacattctaatgacggatcaagaaatccgttcgagccctccagaggaaagagagttggatgtaaagtactctacctctcaagttagtagtcttaaggaagactctgatgtaaaggaacagtctgtattgcagtcaacagtggttaatgaggtcagtgataaggatctgattgttgaaacaaagatggcgaaaattgaaccaatgagtcctgtggagaagattgttagcatggagaataacagcaagtttattgaaaaggatgttgaaggggtttcatgggaaacagaagaagctaccaaagctgctcctacaagcaactttactgtcggatctgatggtcctccttcattccgcagcttaagtggggaagggggaagtgggactggaagcctttcacggttgcaaggtttgggacgtgctgcccggagacacttatctgcgatccttgatgaattttggggacatttatatgattttcatgggcaattggttgctgaagccagggcaaagaaactagatcagctgtttggcactgatcaaaagtcagcctcttctatgaaagcagattcgtttggaaaagacattagcagtggatattgcatgtcaccaactgcgaagggaatggattcacagatgacttcaagtttatatgattcactgaagcagcagaggacaccgggaagtatcgattcgttgtatggattacaaagaggttcgtcaccgtcaccgttggtcaaccgtatgcagatgttgggtgcatatggtaacaccactaataataataatgcttacgaattgagtgagagaagatactctagcctgcgtgctccatcatcttcagagggttgggaacaccaacaaccagctacagttcacggataccagatgaagtcatatgtagacaatttggcaaaagaaaggcttgaagccttacaatcccgtggagagatcccgacatcgagatctatggcgcttggtacattgagctatacacagcaacttgctttagccttgaaacagaagtcccagaatggtctaacccctggaccagctcctgggtttgagaattttgctgggtctagaagcatatcgcgacaatctgaaagatcttattacggtgttccatcttctggcaatactgatactgttggcgcagcagtagccaatgagaaaaaatatagtagcatgccagatatctcaggattgtctatgtccgcaaggaacatgcatttaccaaacaacaagagtggatactgggatccgtcaagtggaggaggagggtatggtgcgtcttatggtcggttaagcaatgaatcatcgttatattctaatttggggtcacgggtgggagtaccctcgacttatgatgacatttctcaatcaagaggaggctacagagatgcctacagtttgccacagagtgcaacaacagggaccggatcgctttggtccagacagccctttgagcagtttggtgtagcggagaggaatggtgctgttggtgaggagctcaggaatagatcgaatccgatcaatatagacaacaacgcttcttctaatgttgatgcagaggctaagcttcttcagtcgttcaggcactgtattctaaagcttattaaacttgaaggatccgagtggttgtttggacaaagcgatggagttgatgaagaactgattgaccgggtagctgcacgagagaagtttatctatgaagctgaagctcgagaaataaaccaggtgggtcacatgggggagccactaatttcatcggttcctaactgtggagatggttgcgtttggagagctgatttgattgtgagctttggagtttggtgcattcaccgtgtccttgacttgtctctcatggagagtcggcctgagctttggggaaagtacacttacgttctcaaccgcctacaggtaacaaaaaccgcagtagttcattgaaaatcacagttttgcagtttgaaaatattgacatgtatggatttaaacagggagtgattgatccggcgttctcaaagctgcggacaccaatgacaccgtgcttttgccttcagattccagcgagccaccagagagcgagtccgacttcagctaacggaatgttacctccggctgcaaaaccggctaaaggcaaatgcacaaccgcagtcacacttcttgatctaatcaaagacgttgaaatggcaatctcttgtagaaaaggccgaaccggtacagctgcaggtgatgtggctttcccaaaggggaaagagaatttggcttcggttttgaagcggtataaacgtcggttatcgaataaaccagtaggtatgaatcaggatggacccggttcaagaaaaaacgtgactgcgtacggatcattgggttgaagaagaagaacattgtgagaaatctcatgatcaaagtgacgtcgagagggaagccgaagaatcaaaactctcgcttttgattgctcctctgcttcgttaattgtgtattaagaaaagaagaaaaaaaatggatttttgttgcttcagaatttttcgctctttttttcttaatttggttgtaatgttatgtttatatacatatatcatcatcataggaccatagctacaaaccgaatccggtttgtgtaattctatgcggaatcataaagaaatcgtcggtttgaaatgttaaatctcctaaaccggatctctgcacgtagctgacacatcgacgctagattactgacacgtgtccttatcaatatttcttctcgaaacgtcttactgtttcataaagtccttcaaatttctggggaactaagaaaatccagcagagtaactaatccaatgggttatgtaatctacatatcgttcccggcgattcttctccttctgatcgtcgctatcgccttttatctcatcggacgaaaaatcggccggagagaagggattcaatcaacgtcgcagttacactacggaccgccgttggctaattttccggcacctgcaccaccgcataaagctatggagaagccaccggagccggtttagtgtatgtatgatgacgtaataatacttacgtattacgtaaacgttctatatatgtagtttgtgtgttaaataagatgtaattgggccgatgctgaaaccaattttaaaacaactctttattgggcctggggtttaaggaaacacttcgtgccgtttaaattccgtactcacctaatgcaacctagaaactacgcagcgttttgacggaagaagaaatattcgcttcttcttttacaacttttgtcccacaacgcagaaaagtcctctctttctctctctcgaataataatttttcatttgctgcgtccttttggtgcttgaagcgatgaccatggcagcaaatctagcgcgacggctgatcggaaaccgatcgactcagatccttggagccgtgaactctagctcaggtgcggctagttctgtcgctagggctttctgctcctccaccactccgatcaccgcaactctcttccctggcgatgggatcggtcccgagatcgccgaatctgtcaaaaaggtccctcatcctaatctcttttctgcgcagaatttcgagttctggaagtcatagttacgagataattgtttgattgaattttgtacgataatttgtgggaattcggcaattttgttgatagtttttgcgttttgtactgatccaggtgtttacaacagctggtgtaccaattgagtgggaagaacactatgttgggactgagatagatccgagaacacagagtttcttgacatgggaaagtctcgaatctgtgcgtagaaacaaagttggtttgaaaggtccaatggctactccaattgggaaaggtcaccgttctttgaacctgactcttaggaaagagcttaatctatatgccaatgttagaccttgttacagtcttcctggttacaaaactcgttacgatgatgttgatctcattaccatcagagaaaacacggaaggagaatacagtggccttgaacatcaggtttagtttgttttaagtctattgatcgaatatttcaggttagttcttctaataaatgattctaatgatggttttgttttctcctgacgcatataataggttgttagaggtgtggtggaaagtcttaaaatcattacccgtcaggcgagtttgagagttgcagagtatgcttttctctatgccaagactcatggaagagagagagtttctgctatccacaaagccaacattatgcagaaaactgacggtctctttctcaaggtctgcccgttttataactccaagcatttcttatacggagggatcaaagcaatgattgttatttctgctagtttttttttttttacattttgttctgagaccatttttattttgcttccgtttttcagtgttgtcgtgaggttgctgagaagtatcctgagatcacttacgaggaggtcgttattgacaactgctgtatgatggtaagctatgacaccgaatctactattttttcgttaattaagttagtggtcgggactcgggatcaccttgtagatttagaagtttggtttcttagcaacttgtatttgagttctgcttttccactgtttttacatgtggaatatgcgactgataatcttgagatacctgcagcttgtgaaaaacccagcactttttgatgtcttggtgatgccaaacctgtacggtgacattattagcgatctgtgtgccggattggttggaggactaggattgactccaaggtaaaaacacttgttccttcatcttgtgtaatagtgatctttagtatgattatgagctacatcatcttaaggccttattatctttgacgcagttgtaatattggagaagatggtgtagcccttgctgaagcagttcacggttctgcacctgatatcgctggaaaggttggtccttcaaacaatatatcattccaatttcatcatttacgggctaaagagtatcatttatgcatccaatgttgaaagattaatatgtgtgatttttaaatttgttgttgtctttctgttttgggtgatgtagaacttggcgaacccaaccgcgttgcttctgagtggagtgatgatgttgcgtcacctgaagttcaacgaacaagcagaacaaatccacagtgcaatcatcaacaccatagcagagggcaaatacagaaccgcggatcttggaggtagttcgaccaccacggaattcacaaaggcaatctgtgatcatctctgaacatcgtaaaatccaattctttatcgaatcttcttttgggagccttttttatagcctcgaattcttcttgttttcttgttttacgattagaataaaagaaaaagcaaaaaaacggctcttcatgagttttgaagttattgtttctgccttaaaatttctctgccgtaaggcaagaagattcataacactggaaaaagtgatgttctttctgaatcgatcagaagaattttgttttgttgcttgaattgtttacatactcttataacttcaatcagtttatcaatttcatacatacatccaaacctttttttttcttttcactcgtagaataaaatgagtaaattactatgattatgaatgaaatgacaaaatcatcaaatgaagaaaactcatacatttgtaaaccatttcaatacaaattagtcggtccacaaagaaaagagtactaatttagtttaaaaattatacttaaaaaaaatctaaaaagagaataataatgtgtcgttggtgcaccaacttcccctcgagctaagattataaaggcaagacgcttcactcagcagcagtaactaaacttgcctccaaaaaccaatcccagatctgaatctcaacctaaacctcagattcatcatcatggcttcttcttctaactacgatggaatccttctcggtatgggtaacccactcctcgatatctctgccgtcgtcgacgacgaatttctcaccaagtaaataaactctcagatccctctttttctatttgtttccaattccttttgctgtatccattgtcgctatctctctctgggattttggtttgaatctagatttgatagtttgattcttcttcagtggcataaactctgtgatttgtgtgcgttttttttgtttatgttgttctctaatcgtgttgacagatacgacatcaagttgaacaatgcgattctcgcggaagacaaacatttgcccatgtaagtattgatttatgctctgcttttggtatttgatgggttaaaattaggtgtggtaatcaagagtgttgatcatgttatttaaactttcaagtagagattgattcaatgcttcagaagtctggattgtttcagctaaatatctcatcctctctttataatatagactatatagttgatggtttgagaaacagaaattcactttgaaactttttttgtttctttttttaaaaggtatgatgagatgagtagcaagttcaatgttgaatacattgccggaggtaattaatcttttgtcctgtttgacgatcctgtaactcttttatcgtttatacgttgacaagattatgatatattggttattctattctttctcaggtgctactcagaactcaatcaaagtggctcaggtagattcttttgcatttttcttgcactttttatgggttataagtaaccactgctaaaaatcaaggttttttttttttactttctggtggctgcagtggatgcttcaaattcctggggcaaccagttacatgggatccattggaaaggacaaatatggagaggccatgaagaaggatgctacagcagctggtgttaatgtaagctgtgtttcctggttcttctttggttttcttgttttctgtttgagtcaatgcgcagctgctgttccgtttgtcttttgaggatagtatgaagttattgttgaaactgaattcggattttgtaatcaaagtgcattaaaatgacactatgcttttgtatcaggttcactattatgaagatgagtcggcacctactggaacttgtggtgtctgtgttgttggtggagaaaggtctcttattgcgaatctttcagctgcaaactgctacaaggttgatcaccttaagaagcctgaaaactgggcattgggtaaaattcttttcccatcgttgcatccttttaacacttctgtattatctcttcgtgatctgactgatcaaatgtgtattgggtagttgagaaggccaagttctactacattgctggattcttcctcacagtatcgcctgaatccattcagttggtatctgagcacgctgctgcaaacaacaaggtaattaagacatggtcctccatttcatgagactctgtttcagcagaatcttttatttgtttacaactgcttcttttattgacatcctctacatattcacctatccttcaggtgttcacaatgaacctttctgctccattcatctgtgaattcttcaaagatgtgcaggagaagttcttgccgtaagctctccctaattttattttatccattacagatgttctgattgcgtaaatgtactgaataacactctacattgatcttacagatacatggacttcgttttcggcaatgagacagaggcaagaaccttctctagggttcatggctgggaggtaagaagtttctctagcacgactaaatttcagcaggctgttctgttttgtatagctgagataagaattaaccatttatatgtttatatatgtatagactgaagatgtcgaacaaatagccatcaagatttcacagcttcccaaggccacaggaacatacaagaggaccactgtgattacacagggcgctgatccagtggttgttgctgaagatggaaaggtgaagaaatatccagtcatccctctcccaaaggagaagctggttgacaccaacggtgcaggtactaattttgataatcgaaagaccgagttgtaaccaaacctacattcaactttatgcttattattattatactagatagaaactgacatgatcatagaataagctgatcctttagcatttcaaaattcaaacgaactttctccttgaaactgatacaaaacatgttcttctctgtgtcatagacagaaccaataccgactatttttgttgatctctcttacaggtgatgcatttgtgggaggatttatgtcacagttggtgaaagagaaatcgattgaggaatgcgtgaaggctggatgctatgcgtcgaacgtggtgatccaaagatctggctgcacttaccctgagaagcccgactttaactaaacaattgggttaccctcagttttgtgatatcttccaaataaaacaacctttgaattattattgcttgagtgtactttttaccacttttattctcattattattccctaattaatattaccaccataggtttagacaagacaagtcatgtttaatcaatgaaggcttcgatgagaagattatatgatatctaccatcagctaatacctaaaaatggctcatttcacaaactccttaaatggatcctctaacattattaaaaaaacctaaacgttagtagtagaaccatcttcttgaatcaaagactcataacgaataacgaggagaagcgcaacggaggacctcgagaaagagagtttcgtcacaagcaatacaaagcttggaatctccggaagtgaaatcgtcgtaagcttcatcttttgattgatcaagcaaagctctgaagatgggatcgtgaagcaacgtgatctttataacgaacctcttataagtttcctcatctttaccaacgtacaccacaaggtgtccctttggtacgtcatgtggtatatgatattgatccttaggatttccggtggcgacgcggtgtttggcaactctgcttgacatttgcttccatgcctttgcgatcagcttgctcttcttcatcatgtttatgagagagatgagaaagagaaagagagagacgtttttggggtttagtactagtgccgtacatgggtatttatacacaaagtcactaacataggtctactatatatatattcaatgtatgtattatatggatgaataggtatgggtaatgattatttttggaccatgtcgtctttacaaataatacatgatctacattagttatcatgaaaaacaatacattccattcaatacatatatattaccaagaaatatgtataaatatttggaacgtcattatcaatttagttttgaaaataagatgtctttgttcatcatcttattttatttgttttttggggtcaactacggccaagctgtacttacgacatacgaaatcgtacgaacatgcatcttccctcaaacaatggccaatgggctttcgctttaatcattgcttcgttttgattatttggtttctttaaattttcatgaatacaaaacaaatctttatcggcatggcatgcacattggcactcaactatttggcatagagataatgtatgagtgtcgtcacagtagtagaatcacttaaagtgatttgcataactttaacaattagtagaatcactttaacgatgttatttaacgaaagcagaaattctttagagaagagctaaaatttgaaagatttgtttttcttataaaaaggagacgcattttattcaagttgtgaaattgtgggtcccagggttcgatcaaatgctggagaaagataagatttaaaagatataagaaaagggataagattcttggacaaagtgcaattccacttacgtaccatacatcgggatatgtaactcacatattacacaaattatctaatcctaactgatttgttatgctggatatatccattgtgatctgtcactggtgatttaccaaaatcacaatactttttaaataatatcatcaataattagactgagtagttcagctgtatatcatctaatacaaacgatgttaatgctggatctcatcatcattttgatgtatcacaggtgattaccaaaatcttaacgtacatatcatgccatcatacgtaagcatgttcgaaattggccattataaattctttataattcattagggattcatgatgtcttggtggtcgaccatatgtttacttttcaagaaatcaataaacgaatatagctagtggatatctaacacttgcgcataaacatgaaatgttttacagacaaatacgttatacatatttaagattgtatacacctatataatacatgtacgtgtatatatatgtaatgattgtatatacatgtacgtatatatgtatatcattacaaatcaggccggttggagattctgagacgaccgattcatcccccccatagagacagcccggtgcttcatcccattgcttcagtgtctctctttaaggaaacgagagattattagccttcggatcagaaaattagatttattcctagccgtttgatgtacatgacctccagctattgcacgtgaaatttaatggtaagttttaaccagaaacctacaaaattgtgtgggtgatatttaattgtaagttataacaaaaaaaaaaaaaaaattgtcctcgtcagcatggtctagttgtagtgatcagataagagatgttgtaataaggtatccaaggtttgatacaccctaaaaactactccacaaacgtgtgggtgtcaggaattttcacatagctcatactaatcccaagatcagtcggatttcatggcccgttgacccgagaactaactagggaaaaaagacctcgcgacctggctcagagctcagtaaaaaggaacatgttcgattaaaaagcttcatcgcctcggagctcagggagaaccatcattcttataggcatcccttgttcttctctaattcagcagaaacatgttcgatttgtgatgaatcaggaaaagaaacgttaacatgtgatgaatgcgaatttttcttgtgtctttccatataaggtgagatacaagaatgatgagcattttactcaactttacatatgaagaagacacaaatggagactactcgtgcgaagcgatcattgtgaggaatcaaccatattctatggatgcaaagaatgtgaagtggcactccatattaagaaatatgttaagattcaatctaaaaaaaataacatagccgtagggcaaacagattatttcatatcaataaaaagagattttacggtttttagtttgccaatctttgctttcaattattattcattgaccaaattgtcttcgtttttttctttttgttggtgtcgcactatacatatattctatcaatataaatattttaatctaaacgtcgtctcaacaaacctttgacttcaaatttgttcttcctcttattagtcttcgtcatattttcttccttcttccatcttttagttctgataagttaacattttcataagacctcaaaaatagctcctacatttgttatcttccttttcaagtcaacaatatttttttttgttctgttatcaaagactccttcttttggtgattaaactctgttcaacttctgaaaaaaagttttgatttttcttttgtctgtagtacacaaagatctcaaaggtgagtttgtaatttcctcgaaagttactttacctttcttctatcacgaagttcatacttctttagattcttgtttagggaagacccaaaggtttaatctttagtataaatcttgcaagttaggccaagaaacattctttccctaacttttcaaaattagggttcgttacagaatttggggttttcttgaatctctaatttgattcgacaattcatcaggttccttgatgttacagaatttgatcctttgtttttgattagttggattcaaagatcaaattttagaatgaagtgaacaaatgaatagtgcatttgattctcagtcttctagtgtagtcaagtggtttagacttagaatcattgtgatgattgttttgatgtaaatgctccaatgaactaaacttgctcactgtacttcgtttgtgtgtatatcagtggaggaacctcggtgttttaacatctttacgaagatgaaatgcttcttattccctcttggggacaagaaagatgaacagagaagccctaaaccggtttcaccaacgtctaacttcagtgacgtaaacaaaagcggttcagatttcagtccccgggatgtttctggaacgagcacagtatcatccactggtaggaactcgaacactagcatgtcagctagagaaaacaaccttagagagttcactattggtgatcttaaatctgccacaaggaacttcagcaggtcaggtatgatcggggaaggcggttttggttgtgtcttctggggaacaatcaagaacttagaagacccatcgaagaaaatcgaagtcgcggttaaacagctcggcaaaagagggttgcaggtaaaggtttcttcatcttttgttcacagaatttgttagtgttggttcatcaatgttttgggttttgcagggtcataaagaatgggtgactgaagtgaactttctcggtgtagtcgagcattcaaacttggtgaagttgctgggacattgtgcagaagacgatgaacgtggaatccaaaggcttttggtttatgaatatatgccaaaccaaagtgtcgagttccatttatctccgcggtcaccgacagtacttacttgggacctcagattgagaatagcacaagacgcagctcgaggtttaacataccttcatgaagaaatggactttcaggtaaaaatgaacatgaaatcctctgtttcttcacttcatcagttaactaaaatgtgttttctttttgtagataatattccgtgatttcaagtcatccaacattctactagacgagaattggacagcgaagctttcggatttcggtttggctcgcttaggtccttcaccaggatccagccatgtttctactgatgtaagttttgtacattttcacttgactggttataagaaatcgttacaagatcaagaaagttgtaatttttggggcttacaggtagtaggaacaatgggatacgcagctccagagtatatccaaacgggtcgcctcacgtcgaaaagcgatgtgtggggatacggagttttcatctatgagctcattacaggaagaaggccactagaccggaacaagcctaaaggagagcagaagcttttagaatgggtgagaccttacttatccgacacaaggaggttccggctaatagtagacccgaggctcgagggaaagtacatgatcaagtcagtgcagaaactcgcggttgtagccaacctttgccttactagaaacgcaaaggcgcgtccaaagatgagcgaggtgttagagatggtgacaaagattgtggaagcttcatcgcctgggaatggtggcaagaagccgcagctggttccactaaagagtcaagaaacttctagagtcgaggaagggaagaataagaaggttcttgatggtgctgaaggaggttggttagaaaagttgtggaacccaaagaatgtgagagcttgttgattcggggtctacgtcagaaacaaattagtgaatttcaatgcctttgtttaaatactgtaatttaacaaacttatgagttttcttacattccattttttggtgtgattattaaacgatttatttgatattcgagtgatttcgaagatttttgcagaacctaatggctatttgggcctttggtcacaatcttaataatcttatgataagcccattataaaggtcataacggtctaaatcggtttaaactaggtaatctcttgcccaccttttggaatttcccaataataagtggaataattttgataagattgcattcaactcatgtgtactaacaatggcaaacaatttgacttttgaagcattgattttggctgaaaacaggggaagccattaaatttagagatcaaaaagaagaatttcataaaaaagtaacgtgaaaagcgaatagtaggcaaataaaattgtaaatagcttaattggtgtaagaaaaaaaaagaatcctgattgcttttagtgtaaacgaacagaggaaaacaaaactcaattgagagttaatgatatcatatcagtgtcaactaatatagtaagttaagaaaaaaattcatataaaatctagttatagcattatcaaaacataaaatatttagtaagcattttatgtcaaaaataatatatactcctgagtccttgcgtaatcgaactctgaaaaaacccttgatgcattcgaaagcatgtgtcattttgttacatctcttggattatacgaaccactaaatactcttatgcagtcacattaatcagtaatcacgtattactttattttatcaagtagtattaacatagaattcttatatagttatatggcatgattgttttgaacatagaattcttagtaaaccacgcgctaatatatttggttctcaactatgattgctaaaagaatgcatgttgtttggtagatttgctcaatgaactaccacaatagtaacatttattcatattctaactatataaactaatggattgacccttttgaaatggactattttagttataatattcgattaattgacatgtaacatataatatgcagagaggataattgaaaactaattaaaaaaaaaagagtgttgctacttgttaatgacttcagcataatcttcacaactactaacgttgataaaaaacaccccataattacgtatgcgtttgattaatttttgctacctaacaaaattattttttcctaattaaattacacaaaaactggcttttgggtttctcaaatcattcatgacccatgccataaaattaaaatatactgtattatcataggctgattcaacataaattgactacttttctcatcttttttatttgcgaacaatttaacttattttatttggactaacccatttatattattctattgtgtaactattactcattagatctcatacttaatgaatttgtcaatctaggtttatactctatactaatattttaactaaaataaattgaagcattcgcaaagcatccatatgattcattcaccgccagaacatagaacctagttcatttattataacctaaagaaactttaattgtttttatgtgttcccaagaatattaaaatacagtacacaagtttgtcgacgagtctttgcgtgagttttaactaatcaaacaaagggggctgcctgaaagaattgaattcgatagttttggaattcaataaattgagtatgagccacgtggaattcttacactgacacaacaaaaactaaaataaaaaatatttattggcgccggatatgattgggaaacttcaaactatgcaaccatgtgttattggacccatttgcctctttaagaaaattttcaacatttaagcctaacactagttagattttttaattttaactaattacatttgcatgttaatccttccttaaatgctcatttactataaatttatttttggggatttggtacagagcagaaaatattaacaatgaaaagaaatcatgattcatttttgattatatcaattaaaaataagttgaaataacaattttaaatgtaaaaataaaaattaaaatctcccaacctttttttcatctcaaatatttaaatctatcttttacagtattgtcctagtaaatctgaaaagtcagaaagtcagaatattcaatctaatcacataattataaagtttttcatgccattcgattttgtttcttctattgcacaaattagtaaaacagaataaaaaatatctattaaacttaaaattttggaaataaatacacatcaatctatatattccacttcaattctatttaacatgaaaccaaaaccccaaaaaaacttgatcgatatagattccacttcaaatctatttatgataagaaaaataaattagaatcaaaattagattctacgccccctaattattaaatcaatagaatcaaggattatttttttatcaagttgattactattttccttagtagacacctctttggaaaatgttcttacaacattaaagaatgaatcaagtaataaaaaataaaagcgaagaactcgtgaccgttcatattaatgatccaacggttacaaaatctcatgacaaaatcactaaagcccagattttcatataaatattgagtggcattttgcgcgttttctcatttttctttttaattttttttaatttttctgggtttctttctcgaatcgaaaaagggaagaacagctttatttttattcgaatcattctcgatcctttttttttcatcatcagccaaaaaaattcagtctttttcagaagaagaaagttgcgaaaaagagaaagaaataaagagaaaaccaatttgaattatgtttatttccaacctaaattctcaatctttcttcccaaaactctaaaaattgtctatttttagtaaaaattcaattccgtcttcaagttgcagagattttagtaagtgaaaggtgagtttcttcaacttttgatctaacttcttcttcttcatttcaaccatttattttctcagatctaggtccattttattctcgattcatagccccccaaaaaaaaaactcctgctttgagttcattactaaatctccaagttggtctctttgttttcaaaaagcttttagctttgattttgataatgacttttagttactgtatctatctaatttaggaaaaatgaatttggacaattttggagtaacaacattttgtgttaattctttagaaatcacacattttgtcctctttgttgaaaagtctctgttgtttaattttcccgtcaatgtccagagaggtctcccaagatttacgcaactaaattaattgatatttttggagtgttaattaagtcattatggagtatttgattttgatttgttatggataagatttttgatttcctggtaacgtttctcttggcagttttttttgttgtttgaagatggtgtcacatgaagagaacacaagtattgtggaatggtttcttggtccacatccatacacgtatccgccttatggtattgagatgattcatgaggatgatgaagtagcagtagctcatcatcatcatcatcaccagagcggtgagtattacagagagtatgaagatcatcgtagtagcgatgtagataacgatgagatcattgctagaactctccaagacgattttttgcagcttgaaatcgcagaaagtaacgattattcgcatcagaatcaacaacaacaacatcaacaagaaggttatactaacaactatagtaataacaacaatggttatgcttggaatgatcagtctcctgctgtggattattcttcaggttattattcattggtttatgcttttcctctgtgttgttatggtattagggaatagattacagagatgcgtttttggttgttgtagaatggataggaaatgataatgatcaagatgggaggagcgatgattcggttaatgtcttttcgtgttcaagcccgagtgacacggatgagtatgtatactcgtgggaatcggatcagtgtgatgctgatggtgaatttggaaggagattgaatcaaatggttcccattccggtaagtactctaagatgttcaaattaacgttaatattgttcttatgattttacaatcgatcataatatgtatgcagtatataccgaaaataaatggagaaatacctccggaagaagaagcagtttcagatcatgaaagacttcggaataggtatttgtttttgctcattctatgttttctatcatatataaaccattcttgattgcattactttcccattgtttcaggttagagatgtttgacttcactgaggttaaggttccaggagatggtaattgccaggtatacttcttcatacgcagatcgttctggaagaattagttagattctgagtcatcattttgaatcttgaatgctctctcccgattttttcttttcagttccgtgctttagctgatcaactgtacaaaaccgcagatcgccataaacatgttcgacgacaaatagtaaaacaggtttggtgatctatttgctcttgagaatctttgctagcttccataagttgcatgaactcattctttttttttcaattttcatcttctggtttagctaaaatctcgtccagattcttatcaaggatacgttcctatggacttctctgattatctaagaaagatgtctcggtaaaatatcttctcttagtgaactccataaccgcatttgctgccaattctcttgttaaagcctagtgttaaaatttggaacaggagcggcgaatggggcgatcatgtgacattacaggcagctgcagatgcggtattcattcttaaatcttgtaaaaaaaagatgcagtgatcttccttttactttcctcagttcatagttaatcagtttggtgaaactttttaatattgcagtatcgggtgaaaatagtagtcctaacatcgttcaaagatacatgttacattgaaattcttcctacctcccaagaatccaaaggaggtaaagagttttctttcactgtaaattttgtttgtctactatacctctctcttgctggttattacagtgatcttttattttgctcttgttgtctgcagtaatcttcttgagcttctgggcagaggttcattacaacgccatctacttaaacagaggtaacttcgagaaaccttttgtttcacagactatgtttcgcttctttcctcttcatcttaattctcttcttcttctccatattttttggtgttcagatacatctgaaacagagctacagaggaagagaaaatggtggcgtttcggaaactagacagaccattggatcatcatcactgggttacattaatatttattgacttgagagagatgttcttagacatagtcccttcgtagagagagagaggatgctgaacagagctcacagcttcaaagccttacaataatattattttcttctttgaaagaaagaaaattttcttttaaaaaaacagaattaacaaattaaataaaatacacaaaattttgatcatttccttattcagcttgttaacgttccaaattctaacggttccaacgattgatttttttctcgtatattataacttcctaagaaattaacgttaagtaaccgatcaaaggcattgtgaatgaaataaacatagaaataatttgctcaagtgattataagctggcaaacccagatgattttaaactgtatcaatctcgacatcatccaaaagaacctaatttaagttaaagaaagaagaaaaacgatcactaagaaatcaaaatctaactgtagagatcgtcgtcatcagctgcagctgcagaagtggcaaagggatcggcggctgcaacaccagtggtgcgtccgacaccagcggttgagtcaaacctgaactcagatccaaaccctctggattgctgcagcgtctgagcaaaagcttggtacttgcgaatatcagcatcactcacacttctccttgcatatttcatcgactcttcgaaatgagcagctctaatctctgaaacttcatcatccaccatatcttcctccatggcctctggattctggctccttctacgctcgttctcaatatcctgaggaacaaaacacacaaaaaagggtcaagattagaacaattaaaacgaattggcacttaaggttccttaatcacatgtttcaggaggtaatcaaatcactgaccttttcgatgttttctctgatggcgtacttgcaagctctctggcagatctcggtgatatcagcaccactgaatccctgagtgtactttgcgagtgcagtaacatctacatctttagcgacgggagattttctcaagcaggccttaaagatattgagacgggaatcttcatcaggtagaggaatgtagataagctggtcgagtcttccaggtcgaagaagagctgaatctatgatatccggtctgttagttgctccaataatgaataccgtcttctttgcattcattccatccatttctgtcaaaagctgattcaacactctgtcagctgcaccgccggcatcacccgcgctgttccctctctgagtagcaatggagtctagctcatcgaaaaacagaacacaaggagcagattgacgagccttgtcaaagatttctcggacgttggcttcactttctccaaaccacattgtgagaagctcgggtcccttgacactgatgaagtttgcttggcactcgtttgctatagctttggctaacagggttttaccacatccaggaggaccgtagaaaagaactccctttgatggagacataccaaacttctcgaatttctctggatgctccacagggtattgaacagtctcctgaagctctctcttaacattctcgagacctccaatatcctcccaggagacatttggaacctccacaacagtttcacgaagggcggatgggttgctgtttccaagagcagtgtggaagtgttcattagacacagccatggaattgaggatttcggcgtcaattgagtcatcttccaagtcaatcacatccatcttctctctgatacattgaagggcagcttcagtgcatagagctgcaagatcagctccaacatatccatgcgtgtccttggagattctttctagatcaacatcttcagctagcttcatgttcttcgtgtggatcctaagaacttcaagacgtccaatttcatcaggaacaccgatatcaatttccctgtcgaatcttccaaaccttctcaaagccggatcaatactgttgggacgatttgttgctcccataacaataacatgggcacgtgattttagtccatccataagcgtaaggagctgagagacaatcctcctctcaacctcaccattcgtcttctctctttttggtgcaatagagtcaatctcatcaatgaatatgatagacggggcattcttctcagcctcctcaaatgctttcctgaggttgctctcactctcaccagctagtttcgacatgatttccggtccattgatacagaagaagaatgctccggtttcattagccacagcacgagcaataagagtcttcccggatccaggaggtccgtaaagcagaattccctttggtggcttcacaccaattgatttaaagagttgtggatgcctcaagggaagttcaaccaattccctaatctgagccatctgtttcctgacaccaccaacatcgtcataaccaacctcatcaagcctttcttcgtcctccctcttaactggttcaccctcacagaaaatctctgtatctggagccaccacacagtactcagcaggatcagtctcgatcactttgaactccacactcctcattcctcctctcactaggaaaagatctcccttcctcactggacggtacgcctccagaaagtaagctggtgaaaaaaacaatataagtttagaaaacacgaactccaaaagacaagctagactatgatatgaaagagagaatcaaaagattaaagcaaacttacgtttcaggtaagcatcaaagaggtttccagtaacgccttcaactgtatcatcaacaggcaagatgtgaacacgctttccatacttgacatctgggcattggtgaacagaaataacatctcccagcctaaccctcaagttagaccttacaaccttattcattctgatcttgggttcctcacatgtttcatcagcgagggcaatgcatacagtgtccttcctcttcttaccctgaaaatccaaaaccccaatcaagtaagtaatcacagagataaaaagaacaatccaaaccaattctaaactcaaaaaaaaaaacttcagacaaaaaagttgtaccctaactgaatatgtttacaagatcagacaaagtaaaaaacataactgaatatgtttacaacatgctcgtgatatacagtcaagacacagacgatccaaaccaagtctaaactcaaaacaccctaacatagtgacataaggaacaaaacctaaccttgatgagaattgtatcgcctcggaaaagctggagtttttccatggtagtaggatggagagagacaacagagttgtcatcgttaatagcttcatcgacaacaagtcggtttggagacttcttcctctctagaatcgcagtactgaaatccttcttagttttcctgaaacaaataccccaggaagacaaacaaaatcagctttcagatgagatcaaactaaaaaaccctattctcaatatcgaaaaacccaagtaaaaaaatcgaaactttatgatcggaaaacaaaaatcaaagatctaagtacttacgagtcggaggattccggttcgtttgacataatgatagcttaaactgacaagagagctctaagaaggaagttgggaaatttgtttctagagagatcgattggtgatgatgatgatgatgatgaatgggatctcaagggagctgaactcgggattttatacgctctgtgatttccttcttgttggaaaaataagcgacccttaacttttaagtttatcttgaaaagttccaaaaactaggtgttgtgataaatacacccatgttcccttaacatcatatcaattaatttatattattatatgatttatcgagaatcaaaacaaaaatctacctatatgaagaattaaaaaatttgatgtaattttaaacttattttaatagtgtggcgagggtacgtaaatgtttattaaaaacgttatgggggaaagttgaaaataaaagtaaaagagaggtgaggataacagttttactttctggttttagcaaacacaagaaaggaatagaaggttcttaggtagcggtaccaaagcaagctacatgtttttcttacttttttataaatagaaatttaatatcttaccatttgatttctttgttctaaaatagatttccgttttttttatacgaagttatcaacatacgattcaattcaataattgcagaaatttttgtttgcatatgaatatatcatcaatatgaaattctaaataaatattcataattatttattatacgaaaaaataattattttcccaaaagataaacccttattgttgtaaaaaagttatcaaactaactgaactttcatctaattaaaaatattagttacttaaaaaaaagtttgggttacaaaagattaataggaatctaggatatcatcaatctagaactacgcgccgttgttagtctcttcgatattagacgttgcgccgttttcactttgagatttgcgatattataactacatgccgttttaaactccactgatcgtcttctattctagttcgattctcgacggagaatactcgacgagaaaatccagatcgggaatcaacttagagaagaagaaaattaaaaaagagaacttctaaagatgaatttggggttcttagttggagttttcggcgttcttattctttctcatgccgcttattcaacaatccaatgtatgtctactcttcccaatccaattccagttccaattgagtcagatctactttaattttcgagataggatcttgatttgggtttctcttgtttatttcagatagaggattgttgaagattatggaggaagagttttctcgaccaccgattaatgtgagtatataatgataacggtttctcttttcctcaattgtgtttgaattatatcagcaatgattatgcttttatatgaatcatgattggatttatttaaggttattctggagttgatcattggactagctctgtgtatgtgggctgctttgactttccctggtaaatttctctcgatccatccggattctgatgaaaacaggtttgtgatcatgtttctctcgaactctctgttttgcatcagtgttaatcaatctgaattcatgttatctagtgagtgtttttactattgaatttttctctgttcgtactttgttgaacttggtgtagagttactacgggtcttatagaagcatcttctggctagatttggttcaattattcagtttaatcatgggtgtttctagtgaatatgttttcttttgactgagaaggtttacggatgtgttgttaatcaattgattcaaagaacttgtgctctagagatgtttcgagggtctagttttgatgtctctttaactctctgttgtgcatcagtgtttatcaatctgaaacatggaaatttggtagttattatatttcccgatgattgaatgaccaccaaagactcatgtttattgataagaaactgtcgtctagagatgttctaggtcaaacattgatgtttctttaatactttgtgcagctaaggttttctaaaatgcaggacattcaaagggacattttctagtttatatttggtccagttacgattatgggtttcaagagctttaaccagttctgctcctggctaattcaatcagtttatatttgtttcattggctctttagacccactttggttccttctatgtcgcagcctctcccctacctttttgtacattaggttcttgaattggttttgagtttggcttttgctagataaagtgaatatctcctgttaactggtttctttcaaaaaatttgcagggcggtgtttttaccagataattcggatttcatgatattcaatcaccgtggcagactgttcccaccgcagatcgacatgaagttttgaatttttatcacactgcttagtcaaacactgatctgtgtaatgttatgagatgtttccattgaaattctactctaagtaactactctgctttgcatcaatttttgattcttgaaacgagtcttgtgatgtttctgtgtgtcaggtctctacttagaatcttttagaatgaagaatcaacataacaacaagtgcacaggtcctagcaggataggatactgtgtaaatagtcaaatacaaacaattaaaacaacaaaatttgctattttattcattccggttacaactttctgatacattagaaaaagcataaccgaacagaaccggtttagattctcttggcactgttctggaaggtccaactccaaatgtcatgacgttcaacgccacggcccatggcaccagaaaaaccggggtacatattttgaagaaaaaccttagagagatctaaatgggcaacgatcaaaggcttcttaggtttcttaacggtttctggcgcgagagtaactgtaaccttggagtttctatactcaatccaagccttgtacctctctccattactcagcttgaactctttaaacgaccagtgtttcattttcccaattcctgtctgaacccaataaccagctttctcagcaacaacggaagtaacagagttgatattaatcccgacatggttatcattaatgtctccaaaacctttgtcctgaaaaacgtcgaattcgacagcaaagatgtggtttttggggttgccattgttggttttgttgaatatcccgaggtatccagcgggtccaggaccgtcactttcaatggaagggacgacaacaaaagcaaggccgtgaccaggggcgggtttgatgcgagtagagatggagaaagtgaaagaagtttcaaatggataaggagaagaagagtttgaagaaggcttgaaagggactggagtggaccaaagactttggccgtgagagaatgggttctcgtctcgtgtcatggagagagctccggagcggctgacgccatcagaagcaggaccgagctcagcgtctccaaggaagaccaactctgaggttttgaggttgaggttgaggttgacggcggaagtggtgtgagctaagagcagagcaagaaaacagagtttatgaatcttcattgcgttttcgtaactgctgtttactcaagtgagagtttgaaagagtgaaattattaacgtggtgatttataaagagtaaaacataagcccatgtacatgacgtcatattgtatgatgtcaagtaaacgcatcacctacaagatttccttatcctttccataaattgaactcgaccaataaaaaacgtgattgttaataatggaaagaaaaaaaaattaaaacaaaatcatcgaatggtcacatcagcacatgacattttgtcaagtaaacgcgtgaagacactgttgtgaatacactcattcagcagagtatgtgtacagtgtacgcatatctcgtatattagattgtacttgtcttttgcgatgtgaaagcatagtatacggtatcattatgtggatgaatgaatagaaaacactacgtcaaaaggataaggaaaatctagtgggttctttaattctttacccaccacatagacaacactacgtcgtatagaaatttacttagagagtattgaagaggaacatagacaaccttgtgtttcttcggtgtaattggtctagaaaaggaccaatgcaatgcaaagatcgattgctgtttatttttctacgagagatattttcaaagaaaattcactcaggaaaaagtaatttgctttgcatcccaaattctcatcagtttatcacacatatgaaatgttcaacaatcttaccattgatttcttagtaaatcgatctctgatttttcgtttgaacgatttttaaatagtaatcgtaatattgtagtttaacccaaaaatacttgcacaattggttaaaaagttcaaattttttagagagatcaaaggttcatattttctcaacaaataaatattgtgaacttacaataaaaaatagaaaatggagggttcttttgcaaaaaggagcaaaaacggattgagcagtgtagttgaggctttaaatatggcccatgagtcgttgtggcccacaacttaatatagaaaaaggtgcaagttgcataggccaacgccaatgtaaccctcattaacttcattattagtctaagaaaaactcttaggcacgatccgcaagctacggacagcttgagattgtcttgtcacactttatttttttaatctctaaaagttgaccgttgaatttgtattcgaacagcctgtaatatgggatggagagtggatagcctgtatacatgattatacattgtttggttagataaacatataccaatatagagagagcagcaaacataccaaaatcattcaaatctctcgcttaattactcagataaactctctatcggcgaacgctatggattcggagcagcagacggagctcttattacgcattagtcaactagtgtctttcgtcgatcctctcttttggatttcggatgaagcaacgagttatgtcgtattagtcactagtcgcataatcgatctcctcagctctatggatttggactcgctaccaaaaccggagaccaaactcatgtcactcactactcaaaccatagctctcttcaacactatggatttgaaatcccagccgaagccgctaaggaagttcatatcattagtatctgaaaacatccctctcgtcaactctatagattctgctacggatcagaagctcaagttgctcttttttaaaataagggaactcgagccggagccggagctcatatcactcctccaccaaatttactacctcgtcaaatctaaggatccagagtgggagaagcttatttccttatgcccacaagtacaagtaagctttcacgacggaaaatttcaggtgactggaaatgtccagcggtgcagcaataaaaagcgggactgccgatttgaacgctacaagttttcaggagaagactacacccattttcgctgctcggcttgcaatggcgacgaccatgatgaagaatatgacaaggctccacttgagatcattcaccctcttcatccaaaacattctctccagcttgtcttgattgaagcttcttatagaacgagggaatgttattgctgtgatgaagatctcgaacagatgttttattactgcccggcttgtgattatgctatcaatatagcttgtgtggagaaaccacgacgcttatctgtagaccatcccaagtggcatgagcatactctttctctgtttccaagaaagactcccttgacttgcagcgtttgtgcattgacacatacaagatgtcctttctatatatgtcccccttgtgactttgtggcccatcaaagctgtttcagcttaccacgtgtcattcgcatatctcgtcatcaccatcgtatctctttcactcattcttttgagaaaggagattggtcttgcggtgtctgccgtaaaaagatcgacaatgattatggcggttattcttgcatcaaggacggttgtttctatggggcacattcaagatgtgccacacgaagaagtgtgtgggatggtaaagaactcgagggagagccagaagaaaatgaagaagaacttaagccgtttgtcaggataagcgacggaatcatacaacatttcagtcataagcatcatcatttgagacttgatgagaacactgacagagattacgatgagaatatggagtgtcaagcatgcgtcagaccaatctatttcggtaacttctactcttgtatgcaatgtgatttcattcttcatgaagcatgtgcgaatcttcctcgtagacaccatcatccaatacatgcacatttgctaactctagtaacagagtattacaatgttatggtccatcgtagccaagtttgttcagcttgtccttcgttgttgagggcttgtttcttctataagtgcgatgaacaagactgtgatttccagctacacgttcagtgcgccgtagtttctgagccgctagtccatgaaagtcatatgcatcctttattccttacatccgaaccatatgaggcaagactttgttcggtatgcaaaaaagaatcatggcttcttctttccacaaaagaaacattcaattgcattgaagagtgtgattttgctttgtgttttggatgtgctactttacctcaaaagttgaggtataagcatgataagcatatgctcactctttcttatgggaacaagacaagtaccatggcttattggtgtgaagtttgcgagggatacttaaatccaaaagagcgattttatacgtgtgaggaggattgttgtgtcaccctccacattgaatgtatatttgctatgaccatgaaaccttattcgtggtggctcttctccggtaaaaaggtatacgttctaccaaacaatggtcatatgactcacacatttgcttcgtttgtgagaagcgttgtccacacaaagtagctattcagtgctctggaaaaaaatattgttccacgtattgtcttgttaaagattgatggtagagggaagagcaaatgttttgatggagattgtaagaaatgttattaatattgtattccgttgtattgattaatcaaaatatgtgcaaaaatagattcagtcagatggttgatctgtattaaaaacttgatcccggttcttcagtggaagggaaagcctctaaccatggctgcaggaggaccacggcggcacctctgatgcatctcatcaacagcttcaggtgatcctgaaaagagtgcttccattgaaccatccctgcggttcctgacccatccctataccccaagctgctcagcgttctcaacagtccagttcctgtaacacacttcttgtaatttttccctttattgccaccctcacctgcacccaactttgaatatttagtagacatctaaagccaatcagcatgttcatcacgcaaaggaacatttcgcttgaatagctgataaatggggataaagaagaacagaacgagcatgaagattccaacgaaacttagttgtagataaatatatcacatatgcagatgtacttcggttatagaattgcatctaactcaacctttttgatggtctcagactcttcaagtatgaaagtttaaatcgccaacattttaaccaataaaaagagtctaggatctgaacaagcatatcatagtttcatctatagtataactctctgtttcaatttttgacaaccaatgtgaaacaataacccattctatgtcctgagtggtcatggtggacacaggacgagatgagcgaagccaaagcagaggatgagcggcagagaacgtaggaagaggaagagatgatgattctgatgataacggcgaacggagagactacgaggattatagattctcaacaggatttgtggaaccttgccgaaactcaggattcttgttcgaattccgacgatggaggccaaactcagaaattttctcatgtttcagagttatttcctttggtttaataattcatcgccgaatcccggttatattatatttaaccaaccggttcgattgcatctcgttcggtctaatcaagattcattctttttttttaggcacccttaaacttgaaagtgtaaaggcccatatgaattaggcaatgatggcccaagcccaaaatactgcaaccgttctgcactgcaacaattcacatcaagacaaagcagaggtttacagaggaagaagacaggtagacaggctatgcaaagaagagcgtatcgagcgtaccatctaaccaatttgattacatgttttgtttatgaaaaacatgtaaaatttgcaaatgccgacctaaataactcgaatataatttgacatttttaacattgaactgttcaggtttctaatctttaaatccttcattgactttgcgctcagacaaccagtaaacttttaagatgatctcatgatttcgattttttaattatcttaataagcattacaacaagaaaagatccacaagacttattagtcacgaaactgtcgtaatttacacattatgattcttgaagtgcgcgttttgatttgttcttttattatataaagtaaacatctactgttaactaattattttaaatctctctggtgagctgtttctttaccacataatcagatttcgtgatctttgatcactaacagagatcgacatgcaaaagtgttcgtttgacgatttcagttatttctctgctttaccgttggttcactgtaacttgcttaatcaaacatattatatccttttttaatgtaatgagatgtttttgagtaactacgcccatttcgttaatcataacttcttctatctaaaattgatggttgactttgtattcagacagccttgaggtgttgtctcgtgatccgcaagctacgagttctatatatacatatacatacagagagcagtaagtttcttatacgcattagtcaaaataatcatctctcataccgctcataactattcaaataaaatcccttctcagcagctctatggattccgagtcggagctcatgatatctcttatttctcaaatgttaaccatctcattctccggggatgactcaccacagatgcattcaaagtacataagacttgcttgtcaactaatctctttggtcaactctctggatttggattcgcagtcagagcctaagtcgaagatcatatcgctcataaagcaaataatctctgtcagcaactctgtttcaggaccaggaccagagtgcgagttggtatcactggtgactaaaatgatctctatcatcagctctacatattttgatctcaagcagtcagagccggagcttatatcacttaccgctcaaatattctctatcctcctagcaatggaccagcgctcggagctcttaacactcctttctcagctaggccgtctcgtccagacggaggaactgaagatcaccaataaccaacaagtacctctcaccgaagaaacagatgttttcgacggctacacagaggttacgaattgggagtcggagctcattttatatatcatttctcaaatggtatctttaataagaggtgaggatatgtgtctagagctggcaacagatctcacaggatacgttactcaacttatccctctcatcaaatctttaaatctggattcgaatccggagtcggagcaagagccgaagatcacatcactcattaggcaaataatctctctcagaaacacgtatgtttctggaccagagtcgcagttggtatcactcgtgactcggattatatctatcatcagctctacagacttggatcccacggaatcacaatggaggctcacgtcagtcacttataaaacatgccgtatcctcaacgaaatgaaggattcgaattcggagatggcatcactcattaatcaaatacacgatctcgttgatgcagatgagagacgaaagccagagtcgaggctcatatcacgcatcactcaactaatgtctctcacaaactcttggagttatacttcagatagggattccaagatcatatctctcattattcgaataatcgatctggtcaaatcgatggatttggattcgaagacgaagccgaagtcgaagctaatgtcactcattactcaaacaatctctgtttacaactctatggatttggattctcagccgaagccgctaaggaagctcatatcacttgtttctcactgtcttcataacgttaggcctacagattcggactcagactcagatgggaattacgtgtcacacgttgaagattcattgaatcacgagccggagctggagctcatttcactcatccatcagataggctccctcgtcatttctatgaatccaaaatggaagaagcttatttccttctgccctatatttgaagtaagtttgaatcatggtaaatttcaagtgagccaggaactcacctgcagaagcaatcggttatactatatccctatgaagtgggattgtctccaggtcaactggaatttactaaagttaccaggagaaaatgacttcactcattttcgatgtcgaggttgcaatggtgagaaccataaaggttatgaacaggctccggttgatgtcaaacaccctcttcatccaaaacattctcttcagcttgtttcgtcgcaaccttctagtgttagaacgagggaatgttattgctgtgatgaagatcttgcccatatattctattgttgtttggcttgcaattatgctatgaatgtagcttgtgtgaagaaacctagtgtcttatatagagactatacgaggtggcatgagcataaacttgctctgtttccaagactgcaggcttccagcttaacttgcaacctatgtgccttggctgattctagctcgcctatctatatgtgtcccccttgcgactttgtcgtccatcaaaggtgtaccggcttaccacgtgttataaggatttcccgccatctccaccgtatatcatttacctactcctttgaccaaggagatttgtgttgtagtgtttgtcgcagaaagatagacaatgattacgggggctattcttgcatcaaggacggttgttcatatgcggctcattcaagatgtgcaacacaaagaaatgtgtgggatggcatcgaacttgagggaaagccagaagaagttgaagaagaagtcgttgaaccgtttgtgacaataagccatggaatcatacaacattttagtcacccacaacatcatttgaaacttgacgagaacacgagcaaagattacgacgaggataagttatgtcaagcatgcatcatgccaatctacttcggtaacttctactcttgtgtgcaatgtgattatatactccacgacgaatgtgcgagtttccctcgcaaaatgcatcatccgatacatccacatctgctcactttagtgaactctgatggtgttatcaacgttagaaagaaatgttcagcttgtccttggatgtgcacaactggtttcttctatgagtgcagtaaagaagatttccagctacatgtgcagtgtgccaacgtttctgagccactagtccatgaaagtcatatgcatcctttattcctaacaaccaaaccagaagagtggagagtatgttccgcttgcaaagagtcagattgtactgtgacaaatgaaacattcaactccatagagtgtgattttgctttgtgctttagatgtgctactttacctcaaaagttgaggtataagcatgacaagcatacgctcactctttcgtatggcgaggagacaagtaccatgccatcttggtgtgaaatttgcgagagaaatataaatccacaggagcgattttatatgtgtgatgagtactgttgtgtcaccctacatattgaatgtatgcttggggtggctttatacatcaagcctggttcatcgtggatcagcttcaacaataaaaagatgtatgctctggccaacaatcatcatatgtctcgacctctttgcttcatttgcaaggagcgttgtccccacaaaatagttttcaagtacgatgaagttatattttgttcccaaaagtgcagggggaaatataggtactagaagagtgaacaagtagcttgatgatcattactaatttgttttttgcgagtattccgttgcattgattagccacgatactgatatgtttgttgtgagatatttccacatataatttctacgcaaataagtaatttgctttgcatcgatggtgattctttttctttcaaattgatatatctcaaagtctctggcacaatttgatcataagcaagacacttggttaaccaaactgtggtaccaagaagaccttgtataatctgatggttaactcaaaattttaatatatagtagatatctatccagtggcgatggtgattcatagaaacatggaaacaaaaacccatcaagatgaaacagaatgaaaaaaaataccagaaaattcgttgagcacatgagatcagagggaagatatttgcctaactggaaagagaaggcaagaaagaagaagaacacactctttttcatcacattgctcattgttctgtaaatacactgtctcagaatctgctgcaactaactacccgtagataacaaacatatacacatggaatgtttgtttaatctaaaagccttggttacagcttttccagacatctataatcattgcaacttttagaaaatcatctctttctctctctctccctctctctcaatagtgaatcaatcagacggttgatctgtattcaaaacttgatccaggttcttcagtggaagggaaagcctccaaaccggtaaccatggctgcaggaggaccacggcgacacctctgatgcatctcatcaacagcttcaggtggtcctgaaaagagtgcttccactgaaccatccctgcggttcctaacccatccctttatccccagctgctcagcgttctcaacagtccagtttctgtagcacactccctgtactcttccctttatcaccactctcacctgcaccaacatggcaacatcttcagtccatattctcagacaactatggtaccaagaagactgataataatctgattatcaaatggtgagttaaacttttgaatatttagtagatatctatccaatcagtatgatcaaatcggcatgatgatccaaagaaacatttcgctcaaagagttgttaaaatgggaataaagaagaacagaaccagcatcaagataactataccaaaaacagaagaagttccatgaggcaggcataagatgcaaaacaataatgcagatagattcggttatagaattgcatttctcactctaccttttgatggtaccaaactctcaaccttatgaaactttaaaaaactccaacatttgagaccaataaaaagagtttataatctgaacaagcaatcatagtttcattcaaagtataaatcttagtaacacgttttgaatgataaatcaatgagaaacaacaacccaatcctatatactcaaagaagcaaacctaaaggctatggaataagattcactgaattcaaacaaagaaaaactatcatcaatcgacattgaaatgaaaaataccccgttgagtagaaaaccaatgaaaaatataatttcaaacagaaacggattgacgactctcaatacccaaagataccagaaaaaaaatctcaactttagccacaacttcaacgaatataataccgttttggaagaatcggattgctgggaagacccagattcagcctgagtggtcatcgaggacacaggcggagatgagcgaagccaaatcagaggacgatgacgactaggagcggcagagaaacaaggaagagggagaataagaggattctgatgattacgaggattgtgtattctcaacagtgaagaagagatttgtgaaagcttcccgaaactcaggaatcttgttcgaattccgacaattgaggccattctccgttggaagtaattgttctcgtggcgtgtgtttcagagattttgggttatttccttaacgattccggttctgtttaattaaccggttcgattgcatcaggttcggtcattttaatttttaaacatggtacctcagatgttatcaaaatatccataactttccttggcagcccaaggcccaaagtgatcaacaaaacgtcaattgataataataagaagaaacaaaacatgttttcaatagtttttgcttctttagaactgtaactgtcattaatttcaagtagatgtgtcatatgtgtgattgctagatatgaacaaagtggtaacaagaaaataccaattactcaaataaccacgagaaagatagcaacatgcaacgtatgagagaaaaatagtaaaggtgaatctgagacaacatgttatagtttttgactttttgtagttgtgttctaaaacaaaagagattttttttattggtgtataagtgtactggtaaggattgtttgtttaaggcaataataactttagttagtggtcatttgcaaaaatttgtagaactgtgtggagttttcaagacatttctcaaatcttcttccggcccacaagaatgaagcctagtcaaaccaatagcggcccatatacgctcattccctttttattcttttttctttaacttaccctcggttttagaaaaattttaaggaatttttgttaatttcaacatgtaaaaacagtagaagtatgtatagaaaattggaacggaaaagctttaatagaattattttataaaatcaagtcagccttattgatcatataaaaaatcaagtcaacctaacatttaataagtgtaagttcaaagtgtttgacaatttactgaaacaaaatggaatagtcaaataagtttccaacttattttgagaaatagtcaaaattcaaaaaaacgtttcatggagacttggactatgattagtggcttccttgtacatagagaggactcttctcagcccctctcctctgaggagtgtaaaacgaaacgaaacgaaacaaggtggaaacatggttgcacgtgtggctgcggcgactgagcaaattttgaaaagtcagaatttacttacaaatattatcattgtttaattacaagttgttacctaattcttttcaaggagtttgacattctttattatcagattggtttgaaaaaggagcttaacctatgaaaagtttttttattttaactgcagaaaactcatagagaaaataaatgtgtttgtaaagaaaaggatattaacaaatcaaaataacatgttttgagagtagtaatttataaattaagaaagtaaacagataaatataatgatgttataaaaattaggaaaataacaaaaatataaccaatcttaaaataaaataaacattaggtaagctgtgaagttcaatttcacaaataatttttaggcaataatcaaatattgttcaacacgaaaaaaaagacatatacttcacgtatatgattttttataatctgaattcatattaaaccccacaaaaataatagagaatttagaccaaatcagtgaaaatatgggaaaggaatatatatatttgtctcatgtagcgagtttttattattcattttggaacacaactacacaagaagaagaagaccattctattttccagctgtacttgtgggggagactcgtgccgtgcaatccaaacagagacaaaaattgccatgtgggcctgaggtggaccggtcctactaattataacatgtcaacataataccctacacattaatcatacatcatcatcacccatcatttctgatcatgattcatgcttgttatgcacatacagtttcatgatatcgtcctaaaaatctcacaagtcaaagactcataaccacatgtatcgtatcagtgtagaagttttcgaacggcatctactaaactttgccatattaatgatattaggattctcttcttttttttgctgattcggatatgtttataacagaaattagtaaacaattagtggtaattgcatgtaaaaactaaaaagcggtaatttgtgtacgtcacattcaaagctgagtcagaaacacttggcatttgttaagttcatggtctcacctttactctcctcgtcatcctgatgcaactttattctacatttttataatgttgctgacggatatatcttctttattaatatataattattattattatccattataagtgctggattaggttttcgcatcagcaaatgatttggacgaaatttaaatatacaattttaattacgttcatatgttgttttttggtggagctcacataaaactcttgtatatacgcctttgtggatagaaatattcgagtttttatttttctacaaaatctggagggatcatgtattatgttagtacattcaatttcgtgtattagataatagaggactggattgtgcatcacgatattttgtattacttgttttgttaatagaaatcgaaaatatcacgacaaaaaaaaaaatcgaaaatatcaatacattatacatgtaatataatattttttgcccataaaaaagtaatatactagtttgtggttttatgctaatatcgttgatgtgttattatttagagaacgtatgtagtagaaaaaaaatcaaagattaggcaattgcttatacatgtttatgacatcatttttcctttctattcattaatcaaacagtaacaaatgttgcagttgtcctatatgcatagcttctgtttatttatttgccctgaatcaaattgtcttttgttttcatatgacagcgacaaaggaacaacatttgtttattgtttacgatgtacgaaaatatatattaagtgtatgctatctaaaagaaacaagttttaagtatttggttaatatataaaggaacaaaataaaataaaaaaatgtctgctgatgtatgaaacggcatgaaccttcttatcttaaaattagtattgcattttttaaacaataagaacaaaattgtatatcagaatcacacacgtaaacgtgatcatacgtcggtccgtccaaataactacccactctgaaagtcttcattaacaattatgtggctatttatcttagttgataaaaaaagaaacagtatactttgatccagaatacctctaactaaatgatactgtatagtattagatttaaggaattaattagtaaaagaaagggttaagattagcttaatctgcccccactaactttgtatgagtgtgaaaggaaccaacaattttatctacgaaggcaacaataacatttcattggttttgtacttcattaatcatttaaaatatctatcgtttcctgaccatggaaattaaacgctggacgattctagactattctggagagtgaggattgtttagcgatcaacaataacaaaaaatatgtacaaaaaaatcttgaaaatatctagaaactgattttctatatatttctagacaggtttaaaccttttcttttgctgtatatcattgtgtcaatagacaaaaagaaaacaaaacaagatatgtaacaatatgttttagaaatgtctatagccaagcatttgaatgctctacttccgatctagttaaactataattatgcgattactgattatttgtatatcttataaacataataaattgatggtttatattatcatcatccagatatataagtcacacctacctaggaacacgtatagatttgctttccagtaaaaatatacacaactggttaaaccaattgagaatgatcgagatataaaacaattagttattaaagtcgatctctccatatgtacatgtatctattggagaatgctaatagttatttgtcccttggcaattctgaccactcacaagttttgatgatcatatccgatgaagacagttttaactctagcacaatttcttgttctgatacaataaagctaacttaatacatccaaccatttgatccaataaatcattaaaattcaactacataacttcatttatacctaacatccataaattacgtctccatcgactcttctttttggccttattaaaaccaatgagtcaaatattgtttccattaatacaaacatatacatatacacacccacatatatatattagtcttcttgtagtataacattttatgcaagttgtatttgtgtttatgatgtgttaaccattatagtgttaccttttatggtaaacgaaaagatactatgaccctcagaagtataaacttttcaagataaactaaagacgaattctaaatgttcggctttttcttatttatagctattaaaataagaaagactaaccagatattcgtgtaaaataatgcaaaactgaaaactcaattgctgtgtcctaagacgatcgaccagacgtttgtaaatatgtcatttgagatgtgaattttgttaaactcacattgggaaaaatatctaggcacacaacttgtataatcaagaggttttgaaagaaataagccatataacatatacttcatgtccgaaattttcaacggcttgaaacagagagggtatcaattgtttcctaacttttgatctaacgtcggttgattactaaattatactactaaacaggtattagagttacgtcattttatgcgaaatattaaatgttgcgttataaacttataagttataacttacaccaattcgaaccaaagaccaataagaattggattattcttctcccgttgtgatgattgatttgaaatgcggtcctatatgacttaatgttagtcggttgtgttacgtaccgatattgaatatgtatccatttcatccttaagattccttacacatccaacattttagaacgaaataaaaacgagttgataagattcaagttatgcacatatatattaaagtgcttatggaggagtcttaaaacttaagaattagttatagtaataatcttttgaattttttttatttcccacctctttgtgtatgtggtgactcttcatttttattacacaccaaagacgatttcttgtaacagataataaattaatcagaactaatatgttttcttttcattatgatcacctgacaattacatagcacaaaaagttataaaacagaagattattacgatacaaaattatagtacctatatagaagaaataaaccaaccaaccaatccacgcctctcaaaaaccggttctaaccggccaatcttgccggtttagattaccggactcggaagtttccgtgctttcgtagtataccatttttgtcatagctaacattctcaccctatattgttttagttatttacattttcctccccatttgttttactcacatcacagaacacccatttggattctcatcactaaacaactcaggcgcacgcatgtgaccataaggatctgcgtaaccttgttggttcatatatggtggtggtggagcttcttgtccatacccttgaccgtaaccttggttcatatacgattcttgcacgtatccttggttcgaatacggttcttgtacatacgattgcgatgattgaccttgcatcatgtaatgttgttgaccgtatacttgtccttctgggtagtaatacatcggctgtggaggataaccgtaaccgttatactccgatttcttcacatccatagcaccaccgtctcctccacctccacctcctcctccaccgccgccaacagcaacttctttcttcttctcaccaccaccgtcgactttcttttctccaacatctttaatctctttcttttcaccagcaactttgtccttcttctcaccgccagctggagccgccgctgcagctgccactggtgctccgtcatcctttttggccggaacaacttccaccgtgcgtttaagcttctcgttaagataaggagtgagttgtttcacgtcaatgatccccttaactataaccaaatccttggcactatcaatagcaaccgaattaacccctgtaaaaaaaaatttatacattaattaattaacattaacagaataattaagctggaagattaggctaactacttcttagctaaccatatgatattttctcactaaaataataaataagctaacaataggttgttgagtccaacctaatttaaggaataataaaactttctattgcttccgttatcttcttcaatcaccaaccgtatcaatttgtttaattaaaatgggattaatgatcataaacatacctttaattttgttgactattcttttgattttgtgttcgcaaccttcacaatgtaacttggtcttcaaaaccacagtactctgtatcacatcaaagaaatttcattagaaacaacgattatgatcatagttaaaatcttaattataactaaaggaatcatctttatataaagatagaaaaagtcatccaaatatatttggaattgaacgagtgtaaataccgtaaagtttcgaagtggacacacacacgttatagaccacaaaaacaaatatatattacttttaatatatagtttcgctatctgaatttttaagtttgtttataaaattctttaattagaagagataaatgacagatagagacaattaatgaattaattacctctttaggtggtggtggaggagaagctttcttctctccttcctctttcttcttctcttcttttttctcaccgggtttctcaacggcggctggtttcttctcagccggtttctcctccgctgccggagaaggcttcttctctgcaccgcctgatgaaggaggtgtctctttcttcggcggcgctactgtagagacaagttcgactggtctcttaattttgtcggccactttatcacgaacttccactggatctacgtttccgatcaccgtcaatttgttactcttataatcaatcttcacatcttccacacctaaattacaattaaaattcgggttagggtttcaaattcgatagtaatcaaatccagagagaaatcagttgatttaaatacctttgaaatgtttgaagatgcgtttgatttttttgccgcaaccttcacaatgcatatcaagcttcataacgacggtggtgattccaccatcggtaggtttcttctctccttgaggtttcgtcgccgtttcttcctttttctgcaaaatcgaaagagaaattgaaatcaatcacgtgtttgttagagagatcggacagagaaatcgaagaagaagaagatgaagtgactaacctcacccatcgtagtagtagtagtagagagaatcagattaatttttactttttaaggaagaatttgaatatacgctctggaaaaaaccgagagaatatatttttggtctggtttggagaataaggaaaaagggcaagatgaggaatatatagaccctcttttttttatgtgtgtatgattaatgatgtgtttgatggtgatgatataactttgtaatatatcattatatatatatatataatacgaggtcaggattagtatgcgggttatttttgtatgccgtcgaattggacctcatcattaaatgggcccatttacgacgaggataaacgacgacgtttatttatttattattgcagccaatgaatgacggtctttaaaacttcttccagtttttaaccgggactggtgcaattgacgaaacgattctcggcccattggatttgactttaagggtttgagtcaaacttattttgccttgactttgtactaccatgctttttgttgaactgttgttgacgatttttatttttttttgttactttagattatgttatactttttggaactttctctctaccgctaatgggtagtaataatgttttctagcatttgactgctgttgagttatatgagaacatatagcgctactaaaatgaaagctaatatcacacactacataaacgtgttaaccagttcccttttgttatctttttcttctgtttcttcctaatctaaaccaattcagcttgatttgatttattcggttatgattcccttaatttaccacgtttaaccgaaatcgaatcaaactccctaagtcgagtactgataaagcgagaatgcaaaaatggaaacttagggtaaaagggaaaaaaatggaagttttgggaaagtaaggaagtgaagcaagcaagggttgggttttagggttttggttagccgtctagggttttcattttcaacaatgtctcagcttttgggtcgaaccgctaagatctcctcagttgtgaagaagcagagactctgtttcagtgaactgcggtctttctccacggcggcgacgccgtatctgcttttaaaggataccaactacagggcggcgtctggtggatcagtggtcgacattaacctgtatgatccgaggaagaaggaaatagtgaaaattcgcgaccaatatctgtcggaggagctccaatgtacgatgaagatgggatcttcgaggggatggattgttgcgaagacgatatacgagcccacattgtatctcactaatatcttcaacccgtgtgcctctgtttcgtcacataaggttttcaatctgcctccattggaggatgatgctaaagctcgtatctccagtatctctctatcagcctctccaaaccagcaagactgtgtattggcagtcaagtcctctagtagtccattcctcagcctgtggcggcctggtgactcggcttggacacgcatcaaggtcccgtttcctgcctccaatgtgatgatgtattctggaagagaccgcaagttctatctcctccccagggagagtaaggaagagtgtgagggtcccattgatctcatcaacactagctccgacgacttccctcaggtgactctgtaccagagattccctaactctgacatccccgtgagtaggcaagaacagcttctctcaagtatcaagactcgatacctggtcgagtcaccttctggcgactccttcatcgtttactggtaaattcatcatccctcttgcctttgcagaaacctagtgtaggaatagaatgtaagagagcgaaatgtgtgggttatagggcatggaacagtgtgaaatagagagaagaatatgagatatcctaatgtgtttcattcttgtgtgcattgttgtattgcatctgatgcagttaacctttgaaccaaagattatgagatatcctaatgtgtttcattcttgcctataaggtgtaatgagagatccttctattggaagaaaggagaagtgaagccgtggaccggaaagaaccctcctccttcaaggatctcttgcaggcttaagaccagaacctttgtggtttttagacaagacagtgagcaaggaatcggttcatacactgaagacattggcgatctctgcattttcctaggccatagggaggccttttgcgtctctgcaaccgaatatcccggacttcgccctaattctgtctactatgcaacctcgggcacggggtttggttactacgacctctcctccaacactctccacgacgttatccatgagggccttttctcgtggattgccccactccagtgaatagagcttatttgctcttaaactgttgtaacttatgtgttgttgttttatgcctttttcgactattttacattaattcgggatttgtttgtatgtttaacttatgacagtctcgacaagtaagcttagtttttagttcaataactccttcccttgtctttttattttatttgttattgctcactactcctattcgctttgtgggtgattattctccttgtgactttctaacctgctaggataaattgcttttaaatttgagtttcatttttgtaggctcgacggattgaaaagaaaattgcatatccccaagaccggaaagaacaagaagtggacaataacaccactgatacgttcggctattatcctctcgttatttgtatcatattttcttatctgatcctgtgtgagtctgaaaaatatgtaggccttcagaatctgatatagagaaacaaacacttgcatagctcgggaaatgctcctagctcttcccgtttatttgtgcaaataaactgttttatttccacaaaacgtatgagcataggatcaataagatgtatatttttacattacaaattgtagttgtcaaccttttttagttttcaaaactgtagttgttcttgtagtgaaaaactgtttgcctttgaatatctggttcttattttcctctttgatttgttgccagaactgggagaagaagtatagaacattgtggtgtttgctttggagctgcagccaagtcaagaatctaatataaaaatcaaggtgttgtcttcaggtgtgcagttttaatgactgaagagtagtctctaacattaaccgttgtttgtttcattaacatgaaccttttatttcattgtccttaaaactttttttaaagagattgagttgaaaattggatcgtggaaggtttttttttttttcaatcaagaatcattatattcagggatcttgaatattttttccatcaatatttacaaaacataatttttgattagtgggggaaatggttctctgaaactcatgatgatatggcgagagacaaaacgatggtgcaaaagatatgatccacaactcgtaaacaagatcgagaaaataaaataagaaacgaaagcatacattaaagaagttaacagacaaactcagactcgataattaagaaacttacatagaaactcgataactaagacgagaaaacataaaactccataattaagacaagaaaacataaaactccataattaagaaacttattattagatagttctagaagaacacatgaagtccatctctgaaacacttagtctgatcaacttaagtacccgtacatgatctcccaatacttagcctcggtaacaaagtgaactttacgctcctcccagtaatctgtcttctctttcaaaccccaaaccttaccctcatcagcctcaccctcagcctcagcttctttctcctttgcccaaatttcaatctcttcttctgacatcatctgtgcaatctcaacgtcagaatcttcttcactctgcttcttcatctcccacttcttgaaccagtactcggactcattcttcattgctaccgtcctcttcacgaactcgaggcgtttagcctcctggatcttgtttccagattcaccgcagtgtgtggtgagggcggagacaaataagcattctacatgaaattggaatacattattaacttagtgacatgaagttgttaaaatttacatgaaatgttacataacaaaaacaaaactctcataaatgaaaaaaagtttttgtatcttaatttatatctatgtacaattaattctctattctccatacaagttacaaccaaacacaattagaatattcttacattatcaaataatttaatgaattctctatttctgctaccatgcttcatgtagaatttctgtacaattcttctcaactaatatttatattcttttttttttgaatttctatttgttcagttggtaattttttagagtaatgtagtgaaagtagaaaatagacggaaaaataaaagtgtaaaaatatagataaaggtaaaacctaaactcatcaatgacttgaacaaaaaatttagttttttttttcaaataatattttcagcgaaagatgtaaattagtcaaatttttaggttattagcgtgaccataattaaaacattaatcaaactccataattaaaacacttatcagataaaggtggaacacataaatttcataaataaaacactttaaattgcgattgatagttgctgtgattcgtcgttgcatccaacggcagacaaacgaacaaatttttgataactgtcgatggtcgttgtcgcctaagtatccgtacatgatctcccaatacttagactctgtgacaaagtaaacatgctgctccttccagtaatcaatcttctcttcaatacctcacaccttaccatcatctacctcatccttaacctctttcttcttagcccatatttccatctcctcgtctattatcatcaatgctctctccaactcagaatcttcttcacctcgccgtttcatcttccacttcttgtaaccgtaatctgaatcaatattcatttctattgtattcttcaaaaaatttaggcgttcatcttttctttacgactgagttttccttcccacttcttcacgtatttcatcgcactgtatggtgacaatggagacataagtttcgacggtgatgatgatggcagaatctccgtcaagttgctacgaactctcctccaacactcttaatgacgtcatcaatccgccccctttctttgcttcttacctctgttttgcaactctccagtgatgaagcttaattagtggcttttaaattatgtaacttgggtgttataattagggccgttctaaaggagtgctggaggtgcaaaagtacaaggtccaacaattttttcttaaattttagagtaaaaaaattgtagaaatataatttttaagaaaaaagtttagaataaacggcaaaaattaggtttagaagaaaaaggtgaacacatacataatttacatgagttaaataatattagacttaattaaaactagatgtcatgtctataacaaagtctatctaagtcaaagaaaccattaatatcccaaagtaactgaaattgacgcccaaaccacgactaagagaaaaaatcaaaaccctcagatgaatctagagggtttcgtttttcaccaaaacaatctctattctattcttcttcaacactgcaaaacttgagataaaaatagagtctttcctcttgtttttctctttgttttgctgattgtatctcactaagctgaagaagcaaacaacaatagaaaagagatgcgagcaattcacatcgtgacgacgcgattgagctccagctttattaggcctgttcttcttgacttcgtttcttgttcgcctctacgccagttctctacccctaggcgctttatctgtgccgcgagcaaggtcaatggaggaggcaggtcaggttcgattgttgctccattggtagtgaatgaagaatttcagaacatcgatgtcaatcctcctaaaggaactcgtgatttccctcctgaggatatgcgactccgcaactggctcttcaaccacttcaaagaggtcagagaattacatgaactctatgttttgtttctgcaattcttcttttggttcgatgaaattttgaatactgtccgtaaagtttgacacttttatctgtttattttgctttgaaggtctcacggttatttgggtatgaggaagtggattttccagtactggagacggaggcattgttcatcagaaaagctggggaggagattagagaccaagtttgtctttctacgtttcgatttcattcgttttacttagcttcattcttaggatctttacttgcagtttaggtagaatttggggaagaatttagttccttagcttaaactcttgcaaccttgttgtgtagctttactgctttgaagataggggtaatcgccgtgtagcattgaggcctgagcttacaccttctttagcgaggcttgtcatacagaaagggtaactaatgcagaattttctctcaagccttgagaattgtccttattcttcaatgagcggtttatttatttttgtttgtaaaaattctgtatcaggtaaggatgtgagaatgttgattcccatattctttttggtccagaaaatctgtttcccttccattgaagtggtttgctgttgggcagtgttggagatatgagagaatgacacgaggaaggcgacgtgagcattaccagtggaatatggatattattggtgtgcctgaagttacagtatgtatctctcatacctttaatcactttaggccttctagttttttgttatatgaacctgatctgtgtttaaagtctctataagccggctaatttggttcacaaaccttttcttttaggctgaagcagaactaatttcatctataatgacattcttcaagcgaattggaatcactgcatcagatgtgggttttaaggtttcaagccgcaaggtatttttgcttacgttctcttttgatgtgatatgatcattttgtttcttggtttacactctagatacagaaccaagtaactcacttgcaatgctaaacatgagttgagattattttgcacgatctgcagcatctgaatatccactgtagctaacatctcccataacttcttccttgtacaggttttacaagaatttttaaaaaagtatggtgtacccgaagacctgtttggaagagtttgcttcattatagacaaggttagcaatctaaacatcaattaacagctgctttgttgccagaattgggacaagaagtagagaacatcgtgtgtgctttggacaaagatctccaaggagctgcaaccaccattgcaaccgctcttaaagacaaagggcaaaccgttgatttagtattggagagtaaaccgctgaaatgggtgttcaagagagcggctcgggtaaacgcaagaaggccggttctggttgggaagttggttcggtcagtgtcaaggttttgtcttcaggtgagcaatttcaagtcaaacttgatgacttggagtagtagtatctaaggcttgaacaaattgttcaattgtcctttttttcaaaagcaattgagttgagattggatttttattttgtcctcaaaggtttcattaagaattttattgatggatcttcaatactcgtttattcgtctaatagtgatttacaaaatatactttttgacttcgaatcagccacatgtggcatgtgatttttatttcaaaccgagaaatgctaaaaagaaaagaaaatgtgcctttcgtgaaccttaagctacattatcacataatcttcggaactagaaaaactcttttgctccagttttagtaatgaaagaggatgaacatgatatgtttatatttcctaaaagctcaaatcttatcaacactagaatgagtaaatttcatataatgaaaattcatatcgaatgtgattgactagtggtatcaaccacacatgtttttaactttttgacttgatcatccatctacattatgatgtatcaatgtatgttttttatatttgttttcatgcttattaaagccatataaacatattttggtagataattccagtatttagccaacaaaagaagaagacgaagataattttagtgtttagccaaaataaaaataaaaagataattccagtattatattctgattaacaaaagacctaaatttcactaaagagaattaatcttttggtaaaataaaaaaaaagtaaagaaaattatcttctttaactttttgtttttttttcacctatgagtcagtttggtccctctctctctctctcattgtggacatcttttcaccatcgcacaaataacaagcctcccaaccccgatcgacttatcctcctccttctccggcgaaatccattaactctccgccgcgaaaaccacctttccagagtagtatcacactaagaattctaatgttgatccgccattattgaagcttctaattctcgttaataaccaaaaacccaagtcgattttcaaggtcagtactcaaaatctgggttttcgtcaaaatcagaaactttccttgacaaattttaacaaatctctttctcgttttctattgaattctccagtagcgcggtagttagttttaggtggaagaagaatgacaactactgggtctaattctaatcacaaccaccatgaaagcaataataacaacaataaccctagtactaggtcttggggcacggcggtttcaggtcaatctgtgtctactagcggcagtatgggctctccgtcgagccggagtgagcaaaccatcaccgttgttacatctactagcgacactacttttcaacgcctgaataatttggacattcaaggtgatgatgctggttctcaaggagcttctgggtatgtaaaccacctcaattctgtgatttttatattaaaaggctttgatgtgtttattgtgatgtttggtttagcgatttttagggttttcattctattgcaatggctgcttttatgagcttaatgaatatatgaaactgaaccagtagatgtaagtatgatgtgtggatcatacttttacaagcttgaatttggctctcctgatatgtattagtctaaaatctactaataatctgcatatttgaatactcatctttcctatccttattgggacaaaagatactgtttaggccattgtctttgtgcgttaatttttgtgtggaagttgttacatgtgttctgtgtagtttagttgatcatataatctatttacagtgttaagaagaagaagaggggacagcgtgcggctggtccagataagactggaagaggactacgtcaatttagtatgaaaggtcttatctctttctctgcccctattatgctttcatctaaatgcctttcaagtttctagctatgaattgtgtggataatgcctcttaagattggttatacatttaactgatattatgttcgtctggccttcctttcagtttgtgaaaaggtggaaagcaaaggaaggacaacttacaatgaggtacggtagtttcctttttaaacaaaaagcttcacagtatttatgctttgcaagatccattcacttctgtttatgttatatgatgatactgatttattgtgcttaccagtgtgattaaacacttgtcaagatcacatatgggaatatcaatttgtctcatgattagtactgcaaacgtgtagctctgtaatacggtatctaacaggtgatagtactttcaggttgcagacgagcttgttgctgaatttgcacttccaaataacgatggaacatcccctgatcaggtatgcgtttcttcgatagtttctaccctggaacgtgtgcaatactcgttgtgaactctgatgaaattatatcatgtgaaaacgttttaccagcaacagtatgatgagaaaaacataagacgaagagtatatgatgctttaaacgtcctcatggctatggatataatatccaaggataaaaaagaaattcaatggagaggtcttcctcggacaagcttaagcgacattgaagaattaaaggtttcaaccacatattctatgtgcagatgttccatagcttgtttagagaattttcctgaatttgaattattttgttttgcagaacgaacgactctcacttaggaacagaattgagaagaaaactgcatattcccaagaactggaagaacaagtaatgaacatcatcgatactctcggcttatctgcttcctgttacttttatcatagattcttacatggtccttctatcatctctgtgtatgtctgaaagtatgtaggccttcagaatctgatacagagaaatgagcacttatatagctcaggaaatgctcccagtggcggtgttgctcttccttttatccttgtccaggtaaacttcaccaacagcttcgtatgatcttagattgatccacaaggaaacctcagaaaaatgaaaaaatcacctgattgttgttgtttctctgcaccagactcgtcctcacgcaacagtagaagtggagatatcagaagatatgcagctcgtgcattttgatttcaacaggtaaaatccaaacaccagatttgatctcttttcagctaatatatctatggaaccgattactgacactgtgacaactgttttcactatttgcagcactccatttgagctccacgacgacaattttgtcctcaagactatgaagttttgtgatcaaccgccgcaacaaccaaacggtcggaacaacagccagctggtttgtcacaatttcacgccagaaaaccctaacaaaggccccagcacaggtccaacaccgcagctggatatgtacgagactcatcttcaatcgcaacaacatcagcagcattctcagctacaaatcattcctatgcctgagactaacaacgttacttccagcgctgatactgctccagtgaaatccccgtctcttccagggataatgaactccagcatgaagccggagaattgaaacacgtatgaaggccccttgtacaatttctgtaaaactgtaaagtagctcttgaaaaactttacctggttttttgacgaatagtctgtttagcggtaaatgtaccggtggtttatcgaatctaggatccttgtcgggtttagcgattttaagaatctttgccataggaaaaaaaaaacactttgctctgtggtgtagaaatgaattttattaaccatttggattagtccatgttcggttctgttattcggaaacccggttatggacttcaattttggaaattacgaaactgaactaatcgatttccggttttgttgaaccgaaatccggttaaaatattaccatatcaatcatatcattagaaatgtagttctgtttcatgtaattcggtctgaatgttaataaatgctgggaacatcggagcttgagaaagtccggccatggcgacgatttctcagatacctttctctatctccttcccttgtttcgaatttcggaaaccatcgttctactatcatcagcctcaactttttgtttcgtacttgaattccacgaagaagcatagttttatctgtttcgcatgttccaccaaacaaaccaggttcgaaatttctcgtcgtttttttttttggtttttgcttcgatctgtggaaaattggagacagcagacgtacttcaattattgttttggttaattggtctgcttgaattgaatttgaacagagttcgtaagagagtgaagagcaatgaggagcttcggagtgagattatgcagttcgttgctttggctgggcttcctgaaggtcacgtgccgtccatgaaggaactctccgcacatggaaggttccgatttccaaattccaaaattgcagattttgttaaatttctagcagtctagtaaactgtttaatgacgttcactagttaaacactcttttgatttctagggattgcttctgaaactcttgatttttaattttagttttggtttgtgggaacatttttgtagagttgatcttgctaacattgtaagacgaagaggctataaattcatcaaggaacttgttgcaaactctggtatggaggaagactgtaacgagctagtcgctgactctgaggataataataccaacattgaaacaggaggaagccgagcttgtttggaagattcgtcaacagatttaagtaaggaggctgaaaaacaaggaagtttgagtaaagatgaatcgtcactggctggagttttgagcttggaaaactctttttctaacttgggtgacagtaatcattcaggagaaatcacagaaaaaattttcaagattgagagtgtggagctcaatgagatagctgacattgaaaactcatcgtctgaagcttcagtatttgcaaaccattctcaagatttatatgatacttcaagctgtcctgacatagaagcaggcaatgtttcgatgacagaggatgaggaggtcaacgatgtggacaaagatttctctcttacgtttgatcattacaccagtcctacctctaatcattacactagtccagatctcaattccatcaaacatgttgacattgctactggatcctcgtatgatctgacctcagagaataccatgacaaatgtagagaattttcagaatcagcagattgatgatattgctgcaaatcgttctggtagtgctgatgatagtttagttgagtctgaggataatgattggatgtcagggctttcttcttgcacttcaagcatagaagaaaaaacaaccagatttattcagaatggatacttggatacagttggtggtatgttcgatctcctgaagcctactttaattcttcttgctttgattgcatctatgtatatgtgtatatgtgatgacatgccgtttctatatcttcattattcatgcatgtttctgtagtaaaactttacccctatggtgaaatagataattgatagttggaatttgtgtcagctgatgaaaatgacatacccaatgaaagctgtcctgaagaaagttcagaaacaaccaaaggtggtgagtacataggagacagtcttggaggtccgagaattatgagtacaccactaaatggaagtgccctagcattgaaggagataatccatgctacagaagttaatagctctgacaggtgagtctaaccatgaaggtcaagtctgttactcttgatcattatttgcattttataagtggtcctggacattacatcctagcttaaaacattcgttgtattgttcatatttccttatgttaagtacttatatcattagaatttgagcaatgcataaaccattcttgactgaaagcctggagtaggtatcctaggagtttgagtcgatatgaatttctcgtggttcacttcaacatctctgactttctaaattttctttcacaggaatagtgatcagagagatgggagtgttggcttggacacggatccacatcatgaggtcttgaaagatccttctcattgaactctcgcaaattgatctttaagtcattgaactttaactatgttttgtatccatgctcatagaaccttgttctgatatgatacagaccaggaaacgggaaaatcaggttgaaattgatcggctgaggttcatgctggtacattgattgctttctctcaatatgtggacccgataaattaaaatttgctaactaaatttgttgataattgattgcatggttaggatcaaaaagagctggagttgtcaaggctgaaagagcagattgaaaaagaaaaggtaagatactactctcacatattcttgcaaaggctgatacttgtttgtgtcctaatctccaatttcctgggttcagctgtctctttcagttctccaaagacaggctgaaacagagatccaaaaggcccaaatgcttatctcagagaaggaagttgaattgcaagaagctgaggaaagtctttcaggattgcaagaggtagcttaatactgcttcgtaattactgttttgtcttggttacagtttatactatcaagtattaatacaattccagagccagagccataattgcactcttaccactgaaagccaagactattaaagtgattttttcttcaggttgtgattgaatattgcggagatggtaacgctgtggaagtgactggcagtttcaatgggtggcaacaccgagtgggaatggaactacaagcatccaagtcaatagggttagtattggtcccgactctttctacttccgtcgaatatttgtcttctgatgatgaacatgtgaaggactcttttaacatttgggtaatgttgcttacataagtatgcatttctgctgaattttttggcaggaaacagaaatgctggtcgacattactgtggttatatcccggtacatatgagataaagttcatcgtggacgggcaatggataacggatcctcaaaaagattcggttacaagaggacatatctcaaacaacattctcaaagtagacagccaatgatctcttgcctttactgatttttcgagtcgaattcactccagatgatcggtgcaggcttaaacaggtgaaaagagcagagcaaaacatttcaaaggtttattagcctcttcaatttaagtctacgatgttttgcttttattctttgaagcttagggatagactctgtacaaaattgtaatttaaggtaaaataatacatttataaggtttcaagtcccttagaatgcaacataagcatatcatgcttaaaccgttcaagacaaaatgtgtaaaagcagaacccttatgggttactttcctacaaatttcattatttagagttgataactgataagagtgatacattcaattttataggttatgataaatatgtttacgccacaataactgcttccagtttccttaaaaagtgtcagattctgatcctatcctctcagttacttcctctcaggttctgtgaccggtacatagaagccattcaagtggaccattgaagctgtgtctctttctcaaccggttcttaaacttgtgtctacttgatttctacgaacacatctttcttgaatttcttgcgtagtgcctgtgcagctgagtccatccgtgcattatcctgtataaacaaattaacaaaatcttgtcagcctcggaaaatgaggaaagacatgaaaccagatcttgtatatttgtacctttcccgttaagcagatgatgataggaccttgtctagatttccggtaacaccctgagaagaagattgcggttaagacatacgttggatgctcttacagttaaataatattagacaggtcaaagattttataccaagatatatgtctgggaattcgagacctagtttggacagaggttctgcaacttcaacctgcataatgatagtgaatgtttaatcagctcaaagcaagccacccatctatcaagaattatacaactcttggttcaaacaatgatgtttgcatgaaaactggcaaattgtttgtttaatcagctcaaagcaagccatggcgaaagaaaaggcgagatggaaagcaaaacatacatctgttaaagatgtcatcaagcgcctcgacgaatattctatgagtgaacctccacccaatttagtaagttccgtcagacattcccactctttctcgagctcctcagtgtttgtagcagcaagaacaatcacattgcggcacttaatctacaccaaatgaccaacgatcagatgggtatggaaataatgctgaaacgttatttactttgaatggagttctgagagcacataccaatggcacagaaagcttttcatgatgcagtagttctgtaattccttccggtaactgagccatctgaaatgagaaaagcaaccaacttggtgaggaaccttctggatattacgcaaatcataagcatgaagttggccccacatatatacagaaattatatagttttagcttatcttgtctgaagatctataaaaactattatgctcaagaccgaactcacctcattcctgtcacctgtgcactggtcgctgataagatgcctaaggtattcctcaaactcttcatcaggtgcctgaataaatggcagtatcagcttctcacattacaattgagtggtgattgctttttcacttgttgacacccacattcattgagatgttaaggcacatatcttaaccatgagtttgcactaatataaaagagatacgtaccaggcgaactccaaatgccttagcaacaccggccaaagtaacatctgaatgcaaaggaccaactcctccatatatgaataccttccaaagaatcaatcagacgaaatctgtcaagcacatcttccacaacaaaacctctctttgattttgattttatgatcatatgttagagtacttaccatatcactcgtagacctttggcggtcaacttcctcggatacagaatctatctaataaaaaaaaacacagtgaagcaataatagagattaatgtaaattctctgattaacatgaatccataagtgaaaactgatgcaacaaaaacaatgagtaaatctcactcacatcattccgaaggacagtggtttgttgcaccgaccaaccgacagaagtcaacttcttacacaaagacagtcctaattgatcctcaacagtgccagacctgagctatggaacagataaatgggtcggaagaacttcatcacacttagtatataagtaaccaagcagggcccttttcaacatatggttggcctaagtctactgtcattgcttgatatatatctagcatgccataatgttctttcaacataaatactttcaagtacagagcctgatagtaagaattaatgacttacagaatctcatcgccgacagcaattactgaggccaaaagcacctcgtgtttctgtgattcggtatctacgtcttttttcagtgaagcaattttcttgactctccctgccctttctaatctcccatcagaaagcaaataagcaggtttgaatttctctttactactagtgtcgttaacagacaataatgagttgggaaccgtatcatgaatgctcccaattgatgtatatctgtatattcagaaaagaaactcaatataagacggattggtcaagtatgaaaaacttgttaaagtgaaaacagtggaggaggacttttacccctggtcataaagactgcaatacttgaccttgcaagttaggagaaacgcccaaacatctctgcataagaaaagttaaagaaaaaagtcagaataataaagatcaaatgaggaaaagagatcacagcactgtaaaatttgctttagtttttaaatttctaaagactttatctgggttgctctatcatattatgggtgtaccaattacagtgaccaccagttgatagtttaatagactttatcattatacaaaatatatgtcagcacaattgtgctcaaaattttctgcacgtcacgcataccaaaacataagtaataataagattttaacagataaagcaataagaagatatgattactgagaaagagaaacctgtaggaccaatccaatataggattcaccctcataaagggaggccatccaggtgaactaggagagaattgctcttgaccaacctgaaaaaatgcattaagaagtaatcaatcattttactatcacaaaatatttgcatctggatcttgagattaaagatttgaagtgaagctaaccgcagtaggatcaccaattcggacgccaaggaaaatagctctgatagggttagcctttaataatgcctccaacccggatttgaaatcctggcgaatgatatcaagttgcagattgtaactgccgagatagaataagatgatcagttaaccagcagaaaatatcatacacagaggaatagaacgaactattcttacgtttgagcagcatcgtatgtaaaagcattgatttcagtgaaggcagaagggctctcaaaataaatggtccggactggaaaacttgatagaccaccattagaacaagtctgctcttttttatgcaaaaaataaccagctctaagaaggtgcaacagtacctaaaatcatgagtcattattattacttaggaaacagtggggggaaaaaaagaaaacatccaaaaaggagacttttggaagggaagagttgtaacttacagtggagtcttttcctccattgaaactaaaggcgacctcttcaatactgcacaagtcagtaagagtaaaatgcatttaatgatcacgatacaaaacgtcgctattggattagaatgacaacaactataactgattatatctatctatctatctatcttgtcaaatccaatcattgaaacatcattagtaccataatattactaatagtaactttatttgagatcaatgatcttgtcaaattccagaaaatatctctatcaacgtttaaattccaataacagcatcctaccaaatggtcaagaatttaaatctcgagcagcatatcaaacaaccacacaccaagtaagttttgaaaatgaatctgaagaatgagagagagagagagctcacgagtaaagagcaagagctcttttaatgacgaagatggcgttattgtacttagtcttcaacctcttatcgtcactttctccgatcgctttatcgatctccatcttcttctttctctcctgaaaaggtcccaaaatgcgaggatgtcaaagtctacggaagtgcttttgcaattcgaaaccaaatttcggagtatctgcagtcagattgagtaatccaaagatttaggagctaaagcttacctttatctcgagaatcacgtccgaactatttagtagattggccggagagcgaaaaacagaaacgagagcagagcagattcttcttcttctcgagaaatggaatttttttatttttatttatcgttattccaaagtttcaattttttattgccacaccaaatttatctaaaacccaccaaaaatctgagaaatcaaaataaataaatttcaatgatttttttaaaaaaataaaaaataatttgtctcggacactaataatgggcttcaaacactaaggcccaaaagataaatatgagccgtccaaatagaaaagcccaagaatccgcgtgttactactcatggcgagagagagagattcatcagaacaatacttcgtttgtgggcaatcttcggaagaagttgctgactccacagggcatatcgttgcgtaagggcgtgaaattaagccaatatgcgatagggtagagagaccaaagccacatcggtatattgtaccagcagagcgcgaccaaaacacatatgagccagcagtaaaacgaagccaattgatcatcgccattaaacgttaagagagcgtaaagcctttcaccttgtgacgcagcatcgcccagtaatatcatcggtctctgacaaaccatccttattctatcgtacctcatccgcagaatgttcacatcgctcaccgacgacgggaacgagtcaaactcttcctctaactcatctaggtttggcgattcgagtttccagagcttcaagtcgttgacaatcaatggagaacgaggattttctctcttgttccaaaactttcgtgtcaggaacttgtgtaatcccgaaagacctacaagtactatgcaaggcacaacaactaagtaaatcgccaaccaaactatcaaagagggccaataaagaaatagatcaaagaaagcaagcgcagcaactttccgcatatcacatgttgagtatctggtattcgctaagaaccaaccacaccaaccgtatagtgccctaaagattctatgacctctcgcaattaactttggttactctcagactgaaactcttactcttcggcttcaacatatcccacacgacctcgtttctcaacgccggctctgttctcgcaagattcgcacagttaatcttaacagcttctgctctcatctcttcgatctgatacaccgacaatggagatttgtaatgagctttcggtaacaaccaacggaaaggagctgaataccgtgcatacccttgcgcaacataaacaaagcgaaccgcgagctgaagctctcccattttcttcagtccgctgcttcccaacttcagaattggatacgagcaagcataaatccagtcactttctacacggttcaatgaaatcctcactttcccgatcggaacatcgttcgcctgatcctctttaaagatttgtcgattgtcgtagattccaagggttaataccgtacacttctcgtaatcatcccacgaatactgctcgttccacttgggtgtgacactattaaccacggttcgagtcctggcccatttattcccgtatttagccactacataactgtcaatgccctgttttctctcgtcgcttccctttaaacccgtcgcacccaaaatcccaatttctaatttcccgagcagacatggccacaaccctttaacaaaaggtctatagtcgctcgagtattgaatgctttcctcagcgacgtgataagcttgatcagtggctagtttcatcttgagtctgctggcgaacctcctagaatcacctgctggttcgacctcaatgtcgtagaacaaagccggtgcggaacttggaactttgagcggagtcatctctgagagcttcttctctaacttccctattatgcgttcttcgtgttgatcgtcgactctgtctattaacctaatgtagacagttccttctaacggctctgatgcaacaaagattagatccttgttccatgacgggttcgtcccggaagaaacttccgtttttagagtgacttgacctagagtagctgtcacataaaccgaaggagtccggtttctatccgtggaaatcaaatcgtgaccagaaacaatggtaaccctaacataacagagccttggagctaggtagaccttaggtcgcgtgttgatcacgcaagtgctcacttcagaagcgtctgagaaccaagccactggataaacctcatcaacttgtgtaccgaaccaaactgacatcatcaagtaaaaaccggttttggtattacgcaaagggtaccgttgaggcgcgattcttgcatcgggaggagccctagtcggaatttccgaggccagcttgaagttggacttgtttattacggtattggtcagacggtctttaagagtaaccgacaagacatcacctttggttttgtcgaaagcaaagacttggttccaatccatatttggtccaactggcagatctttggtagaggatttgtagtttccgagagtgatttcgacgacggggtcacatggtccagggtctacatcagagttcttgatggctcggattacatctacgtaaagaaactccatctgttcgacgaggtcgtgtaaagaagttgggccgtaagggtttcgagctcctctttctcctcccagctttggagagatttgcttgacggagaattcatctttattggcagccatctctgaaacaaaaagaaagaaagagagagatgaataagaaaatgaaattgttcatgggttttcaagagttccgtcaaaggagcaggatacagagatgattcactacaagcacaatctggaaaaatcgaaacctagacaacgagagagaagtaaccttagctgattggaatcttcgatgaggactagaagagatataaacgttggctctcaaaagttccagaagaaatcggaaacgtgaaaaggaaaaagcagaatccaatatgtgttacagtatatatataatacatacattcatatagaatatacacaaagagttgaatagagaaacaggatttagagaaatggaataatctgctaaacttacctttaatggcagggagtctcccaagtcgaagattgttaatagtaccaggatctaaggtttgaatttatctacacttatcaatctctgtgtgatgatgatgatgcttgttactaatctaaatctcattcaccgtctctttttctccatctccatcttttttctcgatttatctacttctgagagagtagagacttaagagcatcattattggtaatcattattggtggtatctaaagccaaatcttaagctaagatttgtgaagaaatagctcttataaaagagtttttacacttatatttaagttttttctttacaaatcttatcttaagatttggctaaaataccaccaataatggtggtctaacagtaactctgtaaatttttgcattttttttacggaaagcaaattttatgtattttgctcgtctgcaaattctttcatatacattgaacctcaaaaccaatgcttattttataattaactcagatcaaatactacaatagtggcattgcagctccttaaacttgcaggtttttgaactaccgtatgtttatacaaaaaaatgattcaaaatctaggaccatcattggccaactaatccttgtaattttgttggttaagacttttcttgttatagaacaattattgaattattaagagttaagacgctttattttcacgagtcacggtcaacgaatttctttttgacttttcaatgggaaatttttgagtgagtgcgtttcgagtttcgacacctcctaaatacacaatcgcaagcaatcaccaaacgcagtcgcacttatcaagatcatacacgtttttcttaacccaatcccaaagttcgtctctaccgtttcttttaaattccactactaaagtgtcaatcttaaagaaaagaaccaaatggcatcagaagcatgatacaggtttggtgaatttatcatggaagagaatctcaaaagaacctaatttagttatatatcttcatggtaagtcaatggaaaaaacaagagtttcttctaaagataaaggactttgatcctttaaacctaaatggattagagccatcctgcaactaaatttctgtaccaagaatactgagaatcccctctctgttacctactcgaaaagaccatccccgtgccagatatcgaacagaaaatccaccatttcctacaaagaagattgcaacaaagttaacaccacaccagtgagggttgaaagagatgtttgatagctatgacaagagattattctcaaaggaaacagacgacaaaaaccaacttaagcagagagtaaatgtttttggagaagtgtaggaactcacagctagagggatcggcttgttgaaaggagtgttggatgtgagcaagtcttcataggtagcgttgaaactacaaaagattttgatttggaaaagaagtttaatatatgtaagccatgaagcttaaagatctcaaagcgctgagcaataaataaagtacccaattacaggttcatcaggcatctctgaagtcctattagacggatcaccaacccacttctttctcatctcttgccacgcaatctcggctgcacaatcaataaagggtaatcaaaatttaagatcatgtgtttatatttcacattctttcaaagaaactgagtcaatattggtgctgaccagaagaacaaagcattaatcttgacacgaattaacctgatgagacagtcccttttccttaacaattgtgaagagtgttaaagcttaccatggttgacaaagatctcctcagacgacttctctttatcattgctcgaattacttgacacattaccaggctccttattagcttccattgtactgacaaagagcccttatagaatcaatcacaattctcttgaaagcttgaaccgagacaggggaaacgagatatagcactttacctacagattgttaaaccaaggttcattagcaactaactacaattattctcatcgtattaagagaaagattggaactacaacatgattcgcacaatcagaggcaatgcatatgacttaattcgcaataaagggaagaagaaccctaaaacttttattctggaacccataggcaaaagatccgaagaggaaagtgatagaaccctagaattaacagtactcatatatcgaataaccgaaactgttgattccaagcacaatctgccaaaatcaaaaccaagacaacgagagagagagagagatgaatgtaaccttagctgattggaatcttcgatgaccagaatcgacgactagaagagagagataaaccttaggctcacaaaaagttccagaaacaatcggaaacgtgaaaagaaaaaagcagaatccaatcggaatcaatgtcttcttttctaattcccttttctttatccttcttataatcaggacttgattagattctccaacaagttattaacgtatataataaactattatcagtagcttaacaaaaccgaccttagctcagttggtagagcggaagactgtagtagtagctgtaatctttaggtcgctggttcgattccggcaggtcggatttttttcatctatttggaaaattctgtcaatttttttgtgcgtcatataaatacgtctctttttccatgctttttcattctcatttacagatttacttaatccaccagtgataaagaaaaaaaaactgatttaagtaatacgtatatacaaaaaaggagcaggctgcattgcagcaataggttcataactaagataataatatttaagtaatggctcgctactctatagcatctccagattacaaaagatagatagactagttagccgctttacatacatgttttctcttcaacaaacaccatccttgcaagactatcaatcttttttaatcttcatggagattcgttcctaagaatctgcaatctatcatccgttaagagaccgagcagatccgaaccattgacgtgacagtatttcacatcttgaagcggaagatgacttgacaatggcaaccgttgagaaatagtaaaagtcgaaggatcttgcaagatgagctcccgagtggactcgtcacaagatgcaaaaagttgtttcctttccccaccaaagtctataatcgctgttcttggcaaacggatgggatctacaatagcttgtgtggaggatagtttctggtaatacgaatcaacacctcttctcttgtgacaaacatgaaatccatctacaccattactattactattactgactcctgtttgagtcaatgagggctgagtcgggactgtatcatcagatgatccaactcttggtctataagaagctactatatgattgctgcggggacagtacgaggaggatatgcatacacctgggtttcccgtttccgaaactaatgatgggctagacaaaggaaaaaaaaaccgaaattataacatgttagagcctcaaaaatgcaatgataaaattcttcaacttctgtgatgtgtgacctctaccttccctcgctaccactaatgttccactgacacagcccgatggaagaagcagataagagggtacggacatcagaagttggagtggaattgccagagagatgatggacagtatgaactggattggttgttaagcctgtcatcgatgcgaaaggtcccgtggtttgacgcatgtcaaatatcaaaaccattccattttgtagtccagcataaatatggtgagagcttttgagatcccacgagcaagaccaaggtgcagccggtagatcataagataagacagtattgtggctctccaagcttataacagataatttttttcctagagacccaaatactgcaagcccattattgtgaggggaaaggtgaagatctttaattgctctagtggtacgaggcaacaaaatatcatcaatctcacaaggcgaatgtaggctcatctgcaatatattaaaaaaaaaggtcgtatagtgcatcattttactggtataagataaaaaagaaaaatgagaggcaaaacaaaaaagcttacttgcgtaagcacaaacgttccaccaacgcctgagagcctacgggcatataataatatttgtctaccaccatctatgtcaaatatacggccaccgtttattagcagatctccctacgaaaaatggatggtaacgaactttataatttgcataatacacatcaacacaattgcaaaacaaacaatacttcaactaaaccaaaacaatgtgtctgaaggagcactaagccacacctgatgtctgaagctgcaagaaggtgactgtccatgatgctcttggtagatattatgagctgcaggcgtgcacttacaactatttagacgcagagaatttcaagaggaagaaaacaaaaaaaaggggcatgttattgtgtgattaccaggtatatatttctcctgagaagccacattagactggctttgcgaacccttagtcgtactttccatattagctattttctgcaaaaacaaaaattctagccatgacgctaactagagaaacatgtgcgacaattttatgagaaaaaaaaacaaaaataaatataatcttaggttgggagggaaattataatgggaactcttagtcaaactgagctcccttttaagagtaacgaaccaacttaatattccagactcgactagttactagtaatcttaatctgtccaagcacaaaacaaagtgacaagagtgaccacgttacaacaaactcttagagtgtaccttcttcagcttagtaacttctaatcgtagctcagcttcagttattttccattgaacttctttgttactccaactcgcagtctgcatgacaaataagaacatattaaaagctacaatactagtacgacgggctacacacatatgttcctgtcatctaacacagacataacctacatagacgacttatataatgaacacataaagaggttttagtactgaggaaaatcttattgcgaatgatttgaaagcatttcaaataacgaagcccaaaataatgcggactaatactagcaatatcatgaactatctgagcagtaaatttatcctaccttctgttcaattgaccttaacttggcctccagaaataagattctctgcaaatatcaacaaaagaatatcagattttgatactatgatttgcttttacgaatgtatttcggaaaaacaacactcattgtaagaccttgtgtgcttcatcatctactgcagcaacccgtgatgcatagattttccggacatctctcaagctacatattttgttgcacaggggacactacaaaagaagccaatgtgattcgatgagcaagataactatatccactaacagcaaagggatttgaacaacttcataacaaccacaaaccttccctccacttcgtcgctgctgaaaccacttgttgatgcaggaatatccatacaagtgtccacagggaagacaacttgtaccatcacaccagattaaaaaagaaaagagaacattagttgcactcaaaatattagacgtgaccagagtaatcaaatagttaaaagagatactaatcacaatccagttcgaaagttttgtatgacaaaaacctaatcaactaagaactatataattgccagtagcaaattactgtcataattcatcaaaattgatagacctagatcatgagattatcaaattgctaaaacaaaacataatctatacactatagcctctaaagagccaacgaattccaaagctaaattactggaatcgagaataccagacttggtgttggccaccgctggtccaaacttccatacagatagaacaagacaatccctcagtgtcaccttgtttccattcgacatcctcctgcgatccggaagacgatgaacaaacaccttgtgacctattctgattctctatcccttcactctcgttctgtgaaaccctaacaggtgagtctaggacatcgatgtattccctggtttggcgttcggaatcttcttcctcctcttcctcctcgtcttcctcttgtacttcaccatagtcgacatatgcttcctcttcgtcttcctcttcttcgtcttcttcttctccatagtgtccaaatgcttccccaaattcaatgaatcgtgcaattgtacctccgtgaccactgaaggggtaactccggcgaggcggcattaggttcgtttctgttactgtatcagatttcggaagagaagaaggccaaaacgtctcggcagagtcgcagaggtatcgaataagagagactcccggaattaataaaaataatatttaaaagtaaaaaaaaatagttaaaagataaaatattataacaatgcggtgagcgtggatcgaacacgcgaccttcagatcttcagtctgacgctctcccaactgagctatccccgcttgttgttatcatttaatatttaaactttaataatctctaaacgtaagcgtcacgtcaaattggtcgcagtcttcaatgaaatgttcgtgacttttagggaagaaaaggtgtttggagagatatggggagaagcatattttcctttttcactaagaagaaaaaaatggcgatggcgagaagcatctcttacatcacctctactcagcttctccctcttcatcgtcgtcccaacatcgccatcatcgatgtcaggtataacataatcgatttatttccgtcgattttagtcactaatctgatcctttaccaaattttagttcgaatcaatcccgattattgttcttaggtttgattttgctctactatgtaatactgatatgcgttttaagagattactttacttttgaactctggggatcaattaattatgaacatgttttctaaaactggatattttgtagaatctctgtcgaaaaacaactattagggacctcatgagcttggaacaaaggttttgtggttagatgggctgagaaagaaacagactttttgtaatacttatataggttcttctgatacatagttatggcttaaacaaatttagactttttatgaacctattgtatagctcacattggaggaattgtatgtttttaagggatgaagagaggaattatgacgggcatatagctggatcgctacactatgcgagtggctcgtttgatgacaagatctcacatcttgttcaaaatgtcaaggacaaagacacacttgtcttccattgtgccttgagccaggtgtgtgttttacactcttttcacttccccataagatcttcttttcctcttttttgagaaacaacacataggttagataagcggcatcaattggctattcgtagaaggagatgtacatctctatgttatacatagttgattcatgtttcataggttagataagtggcatcaattgggttttcttagaagatttatatctcttatggtctacaataggtccttcatgtgtcaaaaagtggattcgaggtcgcaaaatccaagtgttttccgataagtttgcctactagtccatatattcttatgtatgtcatggagtaggaacttattttatattcttaaaagaaagaacaaagaacaacgattagcttagctccccaaatcatcaagctcagtcttttagcaacctttgatttgaggcagttctcatttctttgttcctaacataaatcagtacttcgttgcactcaacatgaagtgattgctaaagccttgaaaccaattcttcctgcaggttcgtggccctacttgtgcgagaaggctcgtgaattatcttgatgagaagaaagaagatactggaatcaaaaacatcatgatcttggaacgcggctttaacggttgggaagcttctggaaaaccggtctgccgctgtgcagaggttccttgcaagggcgattgcgcctaaaccctactaaaccatattgggacctaattgatgttccacattgtcatgtactaaagttgaatgaagattatcataaataatctcttatcagtatgtttggtttacatggagcacaaacaccaaacttgcaacaacaatactaaaagggcttttatggtattgcacgtttgtggagcgtcaaagccacgttgatatcttaacgccgtcaaaataataatggatttttcggtatcttctctggaagaggcacgttactttattaacgccgtcaaaactctctcgctgatacagagtgtttgctttcttttgtagatttttaaagtcataaagcaaaagcaacgacgacttcagagaactacaatcataatttgtgatctctctccaattttcatcttttggtcgaaattcccaattccctgagtcaagaaccctaatttcaacatggtaagatttgttcgatatcgcttgtttttttttttatggatctagcttccgtttgtctatcttgcggcttccatttcagattgtttgaagaaattcctgaattttgtaggtttgcgttatgtgtttggtgcctctgttcctcgtcccgctcatcaatttaatgcctcgaatcatcgattatttcatggtaattgactcgtgctttcttaatattccttgaagttttgatttttccttggaattttgatgggaagaatgatcagatttcatgggaaattaaatgtcaggatccaaatttcgaattttagggttctaaagagtgtggaattcgtttagtctcaaaggagatatctttatttgaaagaaataacaaaattagagattagaaagggaagaagatagtgaagatgataatcaggataagcgagagagcacatgatcataatctttgcttgtaaaagtgaaaaacgaagagctatatagcttttgttatttgcttgaggttggctcttggaaagttgaacatgttagcaatgtttagatcttagttctgttggtgtttcatatcgatttctttagactgtatcttttttaagtgaaaaaaaaaacagtgctttagtgaatcttgcaggtagtatttacttgtgaacatttgttaactcaagtactgtctgttcatgctaaaaaataaactaggctaaattgtacgcgtggctcggatgggagtacaggaagccagcgagagttcctccagcttgtcctttcaagccagttgctaaaaacgacaacgccaccaaagtaagtgaaaggactttactcattttttattcttggttgagtcgtttcttagttgaagcagtttagttgatggaaacatagattctatcctccaattggtgttatatgtttatacttcaattcaacaatatgccatgatcccagtagcttccgagaactgacattcactgtttatctgatttctgagtttttgtcttttgagccttatgtgtaacactttgtctgttttaggtgggtgcggaaactggaactgaaggtacagaaacaatagctaaacctggcgttgtagaggagacgggtggtattaagcaggattgaggccgagtcttttcttcaataaaaccttttgtatttgtggatatgttttggataagagaagaagctggaagttgaaattacctgatgtgatactgataatgaatgatgtacgttgaaaatgctacgtaacagataattttcttatatgtttacttctctctctctctctctttttgtctagaatctttttgcatgtgggagatttcgaatttctcagtaaaactcggatcactctctgctagttcttgagcttaatgcgttatatgttgtctcgtaaagtctaagttgcattattagttttatggtaagtttagttttagaaacacttaaatttagatttaaccacctaaactttttcaagcaaagccaaaatcattgtcttcttgttagttgctataatatcccttcgttttcttcaaaggttgttattatccatagtgaagagtttggaacaagaaatttttaaagattttgtctattgcgactactcgatatttgatttcatcatcaaacattcaaaatctagtgatgaccacttgtcattattttgtattgtcatgttaaatcttaaatggagagttgaaattcatgtcttttaattttattttttaagcataacgtaatgttttataattaaaaaaaaaaacgaagtaagcatctcgttttgcataattatagtcattattattcatatatgaatggaccaaattgttaaagttgcgagcacttcactcacaagccacgtgcactaagccatcacacttacgctagcgtttaggataaaatcataaaaatgttttaccaaaaatcaaaataatttttaaaaacactttaataaatatcttcgtgtctttggttctgatttgaaaagacaataaagagagagattttgaataacagaagaaatttaatatcgttacctttaattttatattttctgtttccattttaatttgaagatccttccctttctttctttctctctctctctcgctcgccgggaaaaatcgctgtccaaatctccggtcatttctccgaggatctcttctatcaatccaacggttttgttttcatcttctcagatctcacagaacaatagtcaaagactgatgcagaagaagcgttagtacaaggtttttgttggaaagcaattgaatctgaattcatctttcattttcacgctttgatccaatttgagttctctcttccactgaatccctcatacgtaaaacctagggtttctaaattagggttctcctgaggtctgtttatagtgcgtaaagccatgtttaagaagatcatgaaaggggcaaatcgaaaagcctctaaagctgaggcgaatgattcgtctatgtatgggtttgatccaccaggtaggtcaggtcctggatccaatatgattgtaaatcacgcatctcgtggttcgcttgttccttcttctccaaattcaatggcggcggccaccacacaaccgcctcctatgtattcagtcgagcctcttcccttgttcagagacgtctctgtctccgagcgtcaatccttgttcttgaggaaactccagatttgttgttttcaatttgattttacggatacgttgaagaatgcgagagagaaggagattaagaggcaaacgttattggagctagttgattttatacagtctggagcagggaagctcactgaagtttgtcaagaagaaatggtaaagatgatttcggttaatatattccggtgtcttcctccggcttcacacgagaatacaggtcaagagcctgctgatcttgaggaagaggagccttatttggaaccatcttggcctcatttacagctaatttatgagttgctgctgagatacattgttccttctgacacagatacaaaagttgcaaaacggtatattgatcattcttttgtgttgaggttgcttgaattgtttgaaactgaagatcctagagaaagggagtacttgaaaacgattcttcataggatttatggcaagtttatggttcacaggccctttattaggaaagcaatgaaccatattttctataggtttatttatgagacagagagacatagtgggattggggagcttttggagattctcggtagtattattaatgggtttgccttgccaatgaaggaggagcacaagctctttttgattagggcgttgataccgctgcataagccaaaaccaatcgctatgtatcaccaacaattgtcttactgcatcgttcagtttgtggagaaagattataagcttgcggatacggtgatcaggggcttgttaaagttttggcctgtgacaaattgtacaaaagaggttctctttcttggtgaacttgaagaggttcttgaggcaacacaaactgttgagttccaacgctgtatggtccctctgttccaacagattgctcgatgcctcagtagctctaattttcaggttagtaatctctcttatgggttggtttccgttttcaatcttttcattaggttctcatttatgcataacaccctttaaattatagaacctctgttatttagcttcttattatgttgtgtggtaattttgcatatcgatttgaggcaatgatctaggcctattgcctctaactcatgttctgactcctccatttgaaaaaagtactgcaatttatgtccttggcatggttcactttgtctttctgagtttttcgcctttcccatgcttcttcaccaaaatgaattgatcatgacccatctctgttgatggggttatcttatgcgcttgcttttacaatctgctgaataaattattctatgcttacatcattctatagcttaactcatcttgattcaactctgccaaacaaccaactcctctgaatttttttcaaccgttgtttttcctttggtaatgtgtcatggaattctcacttcagcctgattcatcttctctgtagctcaaacttaaccaaaattttgcttgattgctaggaattttgaattttacaatctctcatgctcacatgtatatatcaccatgcaatgcaggttgcagaacgagctctgttcttgtggaacaacgagcatgtggtgggtctaatagctcagaaccgaggagtgatccttcccatcatatttgcatccctggagaaaaacatagagtctcattggaaccaagcggtacacggtctaagtgcgaatataaagagaatgttcatggagatggaccctgagctctttgaagaatgtcagcaacagtacgaagaaaaacaagccaaatctaaacaagtggaagagcaacgccaaaataggtggaggagattagatgaagcagtggaggaacgagaaagagaagatcctatgatcacttcttagaaaaaaatatatcaaatcatcaaagtaataatattctctctcacttcttctcattttctctaatcgttgcaaattattatattttatttatttattttgaggtctggaaaaaaaaaagtccttaatctaagtcaataggaatttattttcctctttttgagaatatttaatactgattctgattggctcaatccagctttcacaatgattagacaaaataagtatggtttacaattgaactaaaaggaaaaaaaaatagcatataaacatgatgcaagtaacatcatggattattatcattaccatcccatgactcccttggactgctatgttcgtcactcgtcatagacatcggcatcagccttatcccatgtacctgggggcatatagccagtggtagtgcagtggcgtaccctttttctttttaagagttcgggttgcggcacaacaggttcattaactacaagagtcctttctcccatgttacatccacttagttccagcgccttgtctacacatctttctcctctaagagaaacgaaagctgtactgtaaaattcaacagcgaaattaaagagagtctctttagttatataattcaataacttctgagccttgggaaaaaaatattcacaaattggaacaagaaagaaagcgcaaacctagagagaactgtaacttgccagatctctccacatgaagagaaatgtttacacagagccatctggatatcaatctcaggaagcgaagcgtcatatcccgtaacacggaacctaaacaataacttgataaatattattaacatgacaagctacaacacatgttacagaatatgctaaataataaacagaatgataatattatcaaaaattacctgtgtattttggatgcctcaggagtagttgcaggagcacgcgaagaattatcatagaatatttcggatggcttaacgataacagtccatcctacaacgtcagttccactaagttgcaatgccttgtcttcggcaccttctccctcgatcctcaagaaggcaacactgtaacaccaacgatacaaaaaacaaagtggtattaatttgagagttagcacttagctgggagtgaagaagccagagagtaagtacctcttgaggacacccctttcatagtctgtgggaacataaacatgtctaatctctccgcatgaatcgaaatgtttttccaagatgagctcgagaagatacttttgaagcgaagtgtcatatccctcaacggagatcgtcgtgatagggctaatgcaacaatttgattttattacacgatcgagttcatatattattgtatgatcaacaaattaatttacctgggaggttcatgtttgggtttaggcttaacgataacagtccatcctcccacgtcagttccactaagttgcaatgccttgtcttcggcaccttctcccttgatccacatgaaggagacactgtagtaaaaccaacgatgcaagtcgtcttatttatttttgagtttgcagcaaattcaaagccacaaaagtacctcttgaggattttctttttaaagtctcttggaacataaatttgtgtgatctctccgcatgaagcgaaatgttttgtcaacgccagcctgagaggatactccttaagcgaagtgtcatatccttcaacgcaaatagccgtgctactgctacttcaacaatttgattttgattgcaggttgagttaatattatatgatcaacacgtaaaacaagaatttccacacaaatatatgtaaataaatttacgtggactgtttatcactatcgttcaattccagcgacttcagacgctaagttacaacaaaaaaatctaatcagaaatcctactactatacgtacttcatatatttttcttctttcttgtgcagaaagaaaccattaattagtagagaaacgtacagaggttaaagcagaagaagattactttaatggcggattcttccatggtgataaattgacaagatcgactgctaggctggttccggagatatttttcagatctagggatttaggtttgaagatggttttgttctttccccttattctggtttgggacatctctaaataaatcctatcgtgtataagttacgaacaaactggtgggccttatatttagttgcgtttaagcccatataatctcttaaacagaacaaaaaaaatgttgaaccggactaaacccgcgaacaaacggttgggccttaaatttagttcaggcctgcgttaagcccatatattccaaatcttcttattccttgtgaaacatatttctgttccacttactatatcagaaccactttatacgttttaaatgacgaaagaaaaatgtttatagttttagatgaagcagttgaagaacgagaaagagtatgattctttcctatgatcacttcttagtaatattctttttctttaacaaaactgaagaaagtaactttgagattggaaaggaaagttcataaattttgaaatttatcttagactatgagtcaaaccaatgcatacatttttatgaatgatggggtatacaactttaatctgtcttaatccatatttttgattatatattatgaaaatttgatgtagcaaataccaaattttctaccaccacacacaaataacaactgcaacgccaccgcaaaatgacggaagtgttattgttgccgggaactaaatcggagaattcaaaaccaccgcacatagtggtgtttccattcccagcacaaggccacttacttcctctacttgacttaactcaccaactctgcctccgtggattcaacgtctccgtcatcgttactcccggtaaccttacttacctctctcctcttctctccgctcatccctcctccgtcacctccgtcgttttccctttccctcctcatccttcactctctcccggcgtcgaaaacgttaaagacgtcggaaattcaggaaatctcccgatcatggcttctcttcgtcagctacgagaaccaatcatcaactggttccaatctcatccgaatccgcctatcgctctcatctccgatttcttcctcggatggactcacgatctctgcaatcaaatcggtatccccagattcgctttcttctccatcagcttcttcttagtttccgttcttcaattttgcttcgagaacatcgatctaatcaaatcaacggatccgattcatctccttgatcttcctcgcgctccgattttcaaagaagagcatcttccgtctatagtccgacgaagtctccaaactccgtcaccggatctcgaatcaatcaaagatttctccatgaatttgttgagctacggatctgttttcaattcttctgagattctggaagatgattatcttcagtacgtgaaacagaggatgggtcatgatcgggtttatgttattggcccgctttgttcaatcgggtcgggtcttaaatcgaattcgggttctgtagacccgagtttgctgagttggttagacggatccccaaacgggtcagttctatacgtttgtttcggaagtcaaaaggcgttgactaaagaccagtgtgatgctttggctctaggcttagagaaaagcatgacccggtttgtttgggtggttaagaaagatccgatacccgacgggtttgaggatcgggtttccggaaggggattggtggtaagaggatgggtctcccagctggcggtgttgcgacacgtggcggttggtggatttttgagccattgtggatggaactcagtgcttgaagggataacgagtggggctgtgatcttgggctggcccatggaggcggaccagtttgtgaacgcgaggttgcttgtggagcatttgggtgttgcggttagggtttgcgaaggtggtgaaactgtgcctgactcggatgagttgggtcgggtcatagcggaaacgatgggtgagggaggacgcgaggtggctgctcgggctgaggagatacggcggaagaccgaggctgccgtgacggaggcaaatggaagctccgttgaaaatgtacaaagacttgtcaaagaatttgaaaaagtctaaaagttaatttcatttgatgtaattaactaatcacgtgtgcaatatttttagtggggattttgcaaatgtatgtaccaatgatctctttcgttattaatctagtaaaaaaaaagcttttacgactcaccaacatacataggacttcgatggtaggttggatggtatacatactttatttaagtaataaatacacacttactatattgatattcttgtatccttgagtagtagtaattgtcaatttcaaggaaatacctttaacattacatgttgcgataaagatgcttttgctggtcttgtgttttaatatcatagggtatgttgaagagtgtgtgatctcaaggaaaaactgaagtagctagaaaaaattagaaaacaaaggttgctttgaataactagcagataacgattattgagcttactattatttttttaacatccagagaaagacatatcatacgtgcatgggtgagaatcaaggtagatgatgataacttagcttacttactgttaacataaaaaacaaaggtaaataacatttaaagaggttcgtcttctcctaaaagagagccatgtccaaactctccatctccatcctcttttttcgtgctcatatccatcttcttcttattcgccatatgcttcttaagcactttatctaccttcatcagctcaatcttcttcttcttcttcttctcacccatctccatctccatctccatctccatcttcttcttcttaagctcatacgccttgcataaacaacctaaatatcaaaatataaacaaggaaacggatgatgagatccaggtttgagtttgttaccaagaataagaaatcaaatatttgtacgtacttaagggcgtatagccagtatggccagtaggcgtgatgatggcgcgcccttttctttttttaggtcttcgggttctatcaaaacagattcaactacaagattcattcctcccattttacatccatttagttgaagcgccttgtcctcacatctttctccttgaagataaatggaacctgaaccgctgccgaattcaacagaaacaaagagtctttaattagttagagtcaacaacttgagagctgggacaaattggaggaagaaagaagcgacaaacctaggcagaaccacaacttgcgtgacctctccacatgaagagaaatgttcacacaaggccatctggatatcaatcttaggaacacaagtgtcatatcccgtaacgcggaccctaaataataatttgattgcaggagatgaggaatataattaaaatgacaagccaagtgtcttacagatacacaagaatctaaactaataaaaatttgattgcaaggatcaggtagtattatcagaatttacctgtgtgtttcaagtttgggcatgccaggaagccaaggatccatgatttctttctgccagagtgcaggcttaacgattgcagtccatcctcccgcgtcagttccactaagcagcaatgccttttcttcgccaccttctcctttgatacacatgaaggcgacactgtaaaaccaaggatacaaagtttatatatttttttggggaaaatcgaagccacaaagtacggtacctcttgaggatacccctttcaaagtctctgggaacataaatatgtgtgatctttccgcatgaagcgaaatgtttttccaacacgagcttgactgtatactcacggagcctagtgtcatatccctccacggaaatcttcgtccaagggatactagcaacaattttgattgcaggtggagagttaatattattatatgatcattcagcacgtaccaccaaaataaaattcccaagataatatatttaccggggctttcgagagtttgcaccaatctcgttcaattgcagcaatttcataccctaaggtacaacaaaagatctaatcagagattctactacgcgtacttgatatatttttcttcttacttgtggagaaagaaaacaacattaatagagaaacagaggttaagcaaagagtgagtaagaagaaaatccataaggggaagaagattactttgatggcggattcgtccatggttattgatacagagaaaccacaatttctcaattaatccaatcacaaacacacattgaatcgtcgttcataaaacgagaatccaaatctcatgtgataaagcttagaagtagaaacagctctatcacaatgaagaaatagctatgagaattcaaatagaactctcagagaaacagaggacaaatgaagaagaagaagataacaattcaacacaaatctcatgaatgattatttttcctcttcgcttccttttaacgcttcttttctcttctgttagcatccaaacaatctcagccattaaaccaacttctaatctccaccctccacgtgtccatttaaccctctttcttattcctatatcagttataaattgacaagaacgactgctatgatctagggatttagttctgaactaggtttctttgtcttttttgtttcgttaattccctaattttattctggtttgggacatttcgtgtgtatgagttacgaacaaactgttgggccttgaatttagttctggcctacgtttaagcccatatggttctaatcttcttctttttttataagttgaagcttgtagtacttggtaatgtagcgcatcaataataaattgtggagcataaaaatgataataaaatgactattgtttgatcttggagtccaaacaaactggatatcttcaaaccgatgtcgccaggcttttgcttcccgaatccaaaattaagactcttcccgttgaccaactgaatgacttgtttaaaatcaccttcaaagatagctttggatccatttttgttaaaaattagaaaacaaggttgcattgtaataccgaaagcagataacgttaatagattaagcttactactgtttttttctaacatccagagaatgacatatcatacatgatcaaggcaggtgatgattactgagcttacttacttttaacatgcaaagacaaaaacaaacaaaggtaaatacattataaaaaaacaaagaggttcgtctcctcctaattctccatctccctcctaattctccatctccatcctctttctcctgtccatatccatcttaatcttcatctccatcctcttgtgaagagaaatagagtgagtaagaggagagtccataaggagaagaagattactttgatggcggattcgtccatgctgatgataaattgacaagaccgactgctagggttccaaagatatttgacaggatttagctttgaacaaggttaatttttttttgttcaactattttttgttgattcccttataaagctgttgttgttgttcagatacttacgtgtagttacgaacaaactgtcgggtcttcaatttagtttagccctgcgttaagcccatattggtctaatcttcttatgaatccgttatggttataatagttcccgttaagccgaaattgtaataataaatgttgaaccgcactaaccggcggaactaaatgccggttcacgggtaacattgaataaagatgatataggctttacttgttgaatcatgagattgcacacgtctgtctctctctctcacacacacaggatcaattaaaaaaagtttcgagggcataggttattagcgctaatttacacaaaatgggattaacaaaaagtatactttattgaccatctaaagtgacgaaagcatccttaagaagtccttgtgcttcttctctcctcctgcacacaaccaaaacatcaaacggacccataagaacaaccaacaaagcttctgaagaatctttaaacagatgatagattgatattaaattattaacacaccataaagacagaaaacttaagtagcatatacaaacctcttaatgtcttccacagcttgtttcctctgttgaatttgaagttccataatgtgaataagcgttgctctcgcctatacaacaagagaaagatcaaaacgatgaaaaaacaaaaagtgttgaaaccatgttgtaattaatcgaaagatgagagcttctttacttggtgaggcctcaaggaattgagaaggtgatgcaagttcttgaagattgaagaaatttcaccaattctcttcgcatattgagaaggtctgtcaacaagaacatcagcaagctccaatatatgtaactgtagttctctattcagtgacctgagttccttcttgtaatctacacacaaagatatttgaactcaaagaggtactttcaaagaacataacttgcaaatgaactcatgtaataagtttgattccaatgaagggaagaaccaaaaaccatactctagacagccaatagcaattgcattttgagtttgatttcacagagttaggagaatgacataccaagattagaatcttttggataaagttgaggcactccttgttcttctaagcttggaagaacatcttcagtctactaaccaaaaaaattgaaaattgctaaaaacacataaagatgaagattttaaagagggggaaatgtggaggagactcacagtatagttgcctccaaaacagacgtaggtgccttcaatcggaggaggaggttcaggagcagaatcagtgttttctgagaaatccttgtagagtctgtaatatggaggaggaggtggatatgtagctgtagccattattctctacatatccaaatcaaaaactaagcaaaatcagtaacagattcctaaaattagggtttctaatcaaaaacaaatccgtctaccgccataaaacaatctgttctcattagaatacaactatgtcatcactaccaaataactctgcgaccactagaaactaatctgtcatcactagaaactaatctgtcatcgtcacgttgaagtagccgccaccaccacaaccgtgttattcctaaatcaccaccaatttgtccaaaatcgtcaaatgcttaacagtagatttcaattgattcatgaggaaaaaagaaaggtcaatacaaaaaatccagtggccacaaatgggtagggagacgaatgagttggtggcgacaaggagaatctgagggagagaaataaaaaaatccctttcacgggaagcataaaagacagagtgaaaataatagaactcactggagattcgccagagagatggctcggcggagaattcacgcagccggagaagacgatcggaagaagacacgctcaccagagaaagcaaatcgagatttgtttcctctcttttagttgggcctttaatttagttcaggcctgctttaagcccatatattcctaatcttcttattcctcgtgaagcttaaaacgtatttctagagccgttgagggatttgctatatgggggaagactctgttccacccacctatatcagaattcagaaccattttatatgcttcaaatgacaaaagaaaaatgtttttaaaatattggaattcaattgtgcaagtttcggtataatttgtttaggtgatccttgcaagttgcaacaactacttaacggtttttgagaagccttgtaaaaaaggttttgttaggatggtgatgatgaatgtatgatgggtgacgactaattatgtttatgattttatttatttatttataaagtatatgctttgcttaggttgagtagtgaagctagctagttggcaagtaatggcttcttttggcggccaagcaattctctatctctctttcacacacacaatcctcgacgccaagacttaaatcaattcctcctgatttattcattttaaaattgtgatgatactagcttcacaatacactcaaaaatattcttcttaatgatctattgtatgtatagtaacacgttagcaaaagataatcattgagagccaaagacaactaatgtgtatagagttgaatgagtaaaagttggatatcaatccagctctaagaaactcattatgtagaatgaatattaaaaaaacatgtgtttcttgaattttataaattgctgtcaccgagtttattagtatactatactacaaagacctagactacagttacaaactacgataagggaggttacttcatcgaatacatattattagctaatcacaagattaataatggtttgatcaaataattggataaccaaaataaaaatcaaagtttcttagaaagaggcgcaaacatagggagtgatattatatatttaattcgttttagctaatatcattataactaaatattgtatacataactagaatcatgattcataattgtgtgttgtgtaattgtgggttggctcaactgcacatgaactgctcgaccccaaaattcgattgccttttactttccaattaattaacttaattatttaatcagcaacttaagtgtacatatatccgcaatgattagtagtattaagaaacaaaaacagaattcgacgtattttcaagttaaatttgtactttagtagcttttatatataatagttggtttcaaatctttaatgtaatttgttacaaaacgtaataagtttgcaggaatttataatatgcttgaattgtgtgtgttgtggtactgtgtttcgtgttgaaactacttgtggatgactcaagccatcaatataaaattatttataaagttttaggattttagttagtgataatgtgaaatcaaaggaaaaaaaatcaataaattgagtggcatatttagaatacgcaatccagtttgattcttcttaatataatacattacattccaagtgtcaaaattgtagttcattttattaataagaaaaaatggtatatgtagaatgacaccttcttgaacagaaaacacagatttaatttcattttcagaaagaaaataaaataacatcttctaagattagtgttgacattgaatccacatttttgttactttagctataatgatgtgtgtcttttgaaattataaggatgcttatgagtatttaataagtaaaatactagtatttttttttatgtgattcataagacaagcaaaacaaaagttaaccaaaaaaagagaaaatcatttaaaaaaaattgaaaggaaaaaaataaaaacaagaagagaacaacaagtggttccaggcttgcaaaccaaaacttccagaaaggaatccttcaccaaaagttattttgggtttgcttcttttctcatcttttctcttacccattacattatatatacacacaatactattgtgtgtataaacaaatacaatcacatacaaatatatataaatacttagacatataaaccaaacccaccaaacactctttgatacttctctccatatatacatatacgacctcttgtgttcttgaaatacagagagcaaataaaaaacggaggatcatgacaagtgttcttgaggagagtggagaccacgcgcgtcttgttctcctcatcaagggcaaacgcaccaaacgtcagcgttctgcgtctcctcttatgatgaacgctgctgcagtatccagcgtttgtagcggtgaacgatcatcagtggaggtaagagaagaagaagctgctggtgaagtagaattccaaggagctaccgatgaagacgaagatatggcgaattgtctgatcttgttgtcgcaaggacatcaagcaaagagcagcgacgatcatttgtcgatgcagagaatgggtttctttagcaacaagaaaccggtggcttctctagggttagggctagacggtgtttaccagtgcaaaacgtgtgataaaagcttccattcgttccaagcgctaggagggcacagggctagtcacaagaagccaaaacttggagctagcgttttcaaatgcgtcgagaagaaaacggcgtctgcgtctacggttgaaacagtggaagctggagccgtaggaagctttctttccctacaagtgactagtagtgatggtagcaagaaaccggagaaaacacatgaatgttcaatctgcaaggccgagttttcttcaggacaagccttaggaggacatatgaggagacatagaggtttaacaataaacgcaaacgctacttcagcaatcaaaacagcgatatcatcatcaagtcatcatcaccatgaagaatctatacggccaaagaactttctccagttagatctgaatcttccagcacccgaagatgaacgatgctgcgagaaaccgaaattcgcgtttgcatccaaagatcagattcttctcttcacggccgcgtcaaattctttgattgattgtcatcactaattaagtagttctttgtaattacttttttattacattgatatgttaaatcattaacccttctcttattattgtccattcattcttgtaatctgacattgattgaattaacttcaaattatttcattctttgaaactactcattgctccataatttagcacatttctaataatcatcaatatatacacaatagtatataagtatgtgatacttaactttgggagaatgatgaaagatgctgaggatgttccttggagaacggaagaagcatgtgacgatgactttcgcataaagtcacttcgtttgttagccgccactaactcctttggatacacttcacttccgtttggggtttttcgttttttcagattcttttctgatataataatacatatatcattttcattagagtaaatcaaaagactacatctataataatctacaaagactcgttcaaaaatcggatctaaagcgtgttttgagagtccaatgttgaagtatacagtagatgtgatttgatccctagcttcgactatatactatcgaatttttttattatcgaatgtgtttttcactagaaaatacgataatatactgaccgatgtcttgagattttggacatatatcacaagacattcatgtagcaacaaacgaatcttcatgatcatgttatgtagtatgggaaactaacagtaaactgttacaaacttattgatatgatatatgctacaacatcttctagaaataggagctattactacgctacgtactgttaatggtataatggtatctctatatcgatcatgtcatgtctttatatagtttatgactcaatgactcatctatatctttcttttgaaaataagaacatgatatgtagagaaagtgcaacttcttactactaacaaaacgaatgaatattcctaacatttaaatagaaataaaggacatttgaaaacgattgataggaaaagtgatactgtgattaacgatgtcttctacaaatacattggattatatataatgccttttatctccactaaaaattgttgacagaaaaaccataatcgctccgatcgaaaagctcagaacataaaattgaaaacgagagtggtaccctcaaactgttttatccatttaaagtaatagcactacgtttagttcattttgaaaaaaaaacgtcggtgagacttgtaactaatgctgtccttgtcgcattttaatagatatacaattacaaaatgtctatctacatttgtaataaaacaaaacatcgagcccatgtagtgtaattgacaacgattactcattcacttgggtgggataaaataattatgtttcactattatgaattatcttgaaaataaattcttatactgcgtttatacatcattttacgcaaagaggcgtgacaaattcaatgttgaattcgtaagaatatgtttatcaatgtatatagatagtggattattaaaaaaataaacatcaaattaataaagacttaaatttgattaagagatatgtgtggatgaatatataatttgactttttcttgaaccatgccacatgtaacagagactctggcatgactggatactttgctggattacgctagtgtacgacgtatatacagcgaagcaaccgttttcacccacttactgcttgacagctcaccataaacgacattattctactagtgtactgtagaccaaccgcacttgatcatatcaaacctacctttacctcttccccctgaactttcctaaatgtcatacaatcaccccaatcatttatattactccattcactctatcatttataaattttgacttttgttcatttaaaccattaagcaatctctagtcctagataagtagaaacgagtatttaaaccagttcttaaagaaaaaagacaaatattatctggtttggtttgatattttttttgttttgtttggtttagtttgatttagtttcaattctaattgagtaatttataacaaatttacggaaattgagttatttatcatttttgtagttaaatggtttgatttacgttttgttgtgaagaaacaaaaaatctctcattttccatccaatttcttgtcggattctaggtgtaaaccggattagaaacctcttagttgagaacttaataagttcatcccacaatcaaattagttgtggggtcaattgtaactattgaaagtttcgaggctaaaaactataaaaacatgaaaataatatttttcagcagctaatcaacttgttttcttcagcgagcgacattttggaaggaagcattccattagcttttttgctgtctccagaaaataaattttcaatctttcgtcggaaaaaagaagaagaagaagcagagctgggtttagttttttcacgagaagcaaagagatcaataagtcagtgagcttttttctcgtttctgacgatggcggttgcgccggcaagagctcgttcagactatgattacctcatcaagcttcttctcatcggcgatagcggttagcttctttatccatttatgtgttctcaaattagcaattgaaaaaactcaaaagtgtttgatttcatcttctgagattatctcatgtctgtttttttccgatcttaattagggttttatgattttgttttgtttgtgctaattactaatagtagtagagattgttgaattcgttgacaaatttacttctttttgtgttaaatggtttgttttagctttatgtgtatatttatgtttcaggtgtggggaagagttgtttgttacttcgattctcagatgatactttcactacaagtttcattactaccattgggtatgtcttctgctgtttacttcaagatttgtcttaaatgttgttgttgtttgttgtctaagtttgtgttttttacagtattgacttcaagataagaactgttgaacttgatgggaagcgtatcaaattgcagatttgggacactgctggtcaagaacgtttcagaactatcactacaggtaataagctggatttttaacgttgtttgctactaattgaatcggttgattgattcttcagtcttgtcttgatgaagtaaaagacaattaatttgtttttgcaatttcctttaaagcatttggtcccttttttttgccttgcagcgtattacaggggagcgatgggtatattgcttgtctacgatgtaacggatgagtcatcttttaacagtatgtattttacttctctgttcgtcttgttactgttttgcaatggcattgagaaaatcggattgtgagacttgtggcaactgaacacgactgtttcaaacagatattaggaactggatgaagaacattgagcaacatgcctcagataatgtcaacaaaatattggttggtaacaaagctgatatggatgaaagcaaaagggtaagtaatctttagttgcatactttactttcaagagtttaattatagtgtactgatttgtgatcttcttgttcaggctgttccaacagcaaagggccaagctttggctgatgagtatggaatcaaattctttgagacggtgagctagataaaaaacagaacatgtctgctgtttttcattaatatgctcttgaggttactaatgtgattacaattgttgcagagtgcaaaaacaaacctcaatgtcgaaaatgttttcatgtcaatcgcaaaagacataaaacaaagattgacagaaaccgacacgaaggcagaggtaagaactgcaggaatcaaccattaatactcgatcttcatattcttataccgacattttagctgagtaataaacatatgtactgttcttgttactttgcagccccaaggcatcaagatcactaaacaagatactgccgcatcgtcttctacagccgagaagtcagcttgctgtagttacgtttaggagtatgattgctctttttcgcctgcaccgggttttttaaatatctggccatctttttcatctcttacgtctcaaatcagagataattctcatgttgttacctagaacgagtaggaaatctcattgatggttgtgatctttatgtctaatttgttatctccataattcctgtacaatgatcttcctgatatggaagactatgttggtcaaaaaactatgtgaaaaagactttgaatttataaaaatgaaactgttgtagtgtgtatacctctgacttcactgttcaaatcaggatttatcttattcactgtgaatgctgttctctactagaaccatagtttgagccaaaataaacacggatttaagaaaacacttgatggggtttattctattatatgatgttattatcacaaatctcatttcagaagcaaaagaagaatacaagtaatcccacaaatttacattgaagctacattatgttctacacacaaaagaggcaaccacagagagaagaatcaggttcagtttgcaatacacaagataaagattcgagtattttatatgcaacatcgactagggtcactagctgcaacagccggattgagtattagtctggtgttctggtttctgcttcaagatgtttctcttcacagcacttgatccttcttccaagagactaggtacctccattatctgtttcatcacattcactctatgttatatatgaatctctcttttcgaatcgtttttttaaacagatttaaggatctttaccttcaaagccaactcttcgaaacactgttccacgttttgtcgagttctagcactacactcaagaaacatgcagttgagttcttttgctagagcaatcccttcttctctgcttactcctctctcagattcctgtaatcatatgttttatccagtcaactaccaaaatgaccaaaccgtgttttgagaacaagtagtgcgatttcgattgcaactcactctatcgactttgttcccaacgagcatccttacacattcttggtttgtggagtaaagctcaatctccttaccccacacatctactaagtttgtaaatgtctcccttctcgtcacatcataaactgcattcaccaagaaacattaactaaacagtttacagacagagagatctcttagtctcctttgattgattgattgatgatggacgttaccgagaatgattccttgggcgcctctgtagtaagagcttgtcagtgttctaaaccgttcctgtccagctacaatgagaaaaccgagaatattatcagaaccattagttttatttacaataaaacttctataataatctcaaaatatagaatcattcacctgtgtcccagattgtgagttttagccttttgcctcctactgtcaattgtttgatcttgaaatcaacacctatgagtaatacttatgttaaaccaacaatataatgccaataagatccgacaaaacagacttccttaaaccaaaccaagaccagactgctagattatcagacagaaagtatctaactgggtctaaccaaaaaagtcaatattgtttcagtggcaattcgatcaaagacagatgttcatcattcaagctcttccatttatagaatactactatttgatcaacaactaaagcaccaaagacatgacttagcttcatatcaatttcagagctcttaagacataaatctgagaccctttttcaaaaatcatagaggaaacaagttgaagaaaactattttaccaatagtaggagcaagatcttcaacggagctagaaatgaagctgacaagcaaactgcttttaccaacaccagaatcaccaatcaacaagatcttaaaagacagatcgtatccactttgcccagaagaagatcccattttctaaaacctcagatttgctgtttctcgatctgtaattctagaagatcaaatcaaatcctacttaaccaccaactactacaaaagcaaacttttagataaacaataatatgaatctatgaagcagtaatgatgataatgataatgataatgatgcttcctcgtttgataattacatctatctgcactctctactttataagtagtagcaatctaagaaaaagggagaatttttatttgcctgtgaatgatgcaaacaaatgttttgattaaaataaggaaaagaaatgtgatgaagaaactggaagatttattctttacggagaaagagaggagaactggtaaaatgagagttttttttttttttttcttttgaagaagaagacaagacacagacctgagatagtaacgtttgttctttgctttcttctctccgacactttgcttcactcaaacgtctctgttttggtttccaggttcttttgtcgacgtgtgtgtgtagcgttttggaatcgcggctgcggttgccatatctattaaccactgcggttggagactaaccgttttcgtgggctaccaattgaaacgatttgattttgtcagttagtttgttaaagcgttttaaattagcgattgtaaaaagggaatgagcattatttttggacagactaatttaaacagtctaaaaaattagacgattcattgaaccgcttagaaaaagtggttggaattcattattatttttaaattttaatgtgtctatactttcatgaattttgttttttatatctataaaacaatttatgatatgtcactagcttactatacatatttttttagtcattaacatcatttctcattgctttaggctatattgtattctctacaatataaattgaaataaggaaaaaaaaaacttacaatgactaaattttagtcaccaatggaactaattattttgtaagaaggttgaaaactacttttttttttttctagaagagtcggcgaacagtgatggttaaatgaattatgggagccatgtttggccttcgtctgctgtcagccaagcccctgcgaaaccccacccctggcctgtgcaaaagtttacgcgcgcattctgagaacgtgctttccacgctccgattaagacgtcactaagagtcaaagcactttgattttctcttcttttctcacaaaacactttctttttttatatacagtatgatttttttttttgtcgtcatttttttttatttatttatttaatatgcctcttatggtaaaacatatttcaagaaggtttatgtttctataaactaaaagttatcaacggcagatgaataaatatggaactaattttctctctaaatatccaaaaatatgagaatgttgtccatggttttgggaacagaatgagtgacggaaaagccatgaaaagaaaaggtatcttaggaatatcatcttccttttgctcgcctaacctttttttattgttcttctctttttgaatttaaaatatttttctgctctctagtaaacatttaaaccatcgtaataaattgagaataaagtgtgtgtatgtttgtgtgtgtgaatgttcggtgtgatttcaatttattggaggatagaactgttgtgtcgaaattgacacaccaaggtgccaagttgagtacaaaataaagatcctctagaggctacatcttcgtctaacaatcctcataagtcttcttcttcttcttttttttttagttttcaacacactaatgtcaagtgttttgttcatttctttttagttataatatgtctcttgagaaaatgttgatatttagtttgttgttgagccatttattttctgagacaaatttggtcgttaatggataatattcttagagatagatctacagtactgtgacttttgtgtaaaaacaaatttgtagccgtatttaatgggctatttcgtatttggacaatagccttttattttgtgggccatgatatgtcaacactgctcaatgcttataaatgttgtcgacatttaacgaacgatataacaccaaaaacttcgagtttgtaaagaaaaattatgagaggattacattatggttagcatatctgactataataaattgaaaaattacattactggttgatggaaagacaaatttttattgaagtgtacttatttctttaattttattggaatataatattcgatatgtgttattatggttagcgtctgcatatattaatttacgattacattattggttaatggaaatacaaaattttattgaaccttaattatttctataattctgttataaaaatatttaaaacagaggtcaatatttttaagagaatgttcaacaatctggttaagtaaggggaaagaaaaagcttagctggctttgaaccggctcggcattcctctgtcacccaccaaaccaaaccgagtcatccttcgtcgtctctctttctttttcttcaacttccatttttcgaaaggcgacgagaaaaagtatttctccagttttggaattcgccatggctgttgatagcagaatggatctgctaagcgaaagagctgtgttgatgagagcatctcttcaaaagagtcaaaccatcaccgataatgttgtttctatcctcggctccttcgatagtcgtctgtctgctcttgaaaccgccatgcgtcctactcaggtgtggtttagagtgctccgatcatcttctctgattgttttctaatccagatctggtattatagctctatggagttttgctgacttgatcggattttggtttgactgtgttttgaaatctcagattaggactcatgctataaggaaagctcatgagaatattgataggactcttaaggctgctgaagttattttgtctcaattcgatctcctccgtcaggtttgttttacaaatcttgcttctgattttactaacatggatcggtataaatagatagaattgataatgatctacattgagaatagatagtctttgattatgctctcaattcaattctaggcagagactaaagtactcaaggggccacatgaggacctggaaagttatctggatgcaattgctcaactcagaaagattattcgttattttatgagcaacaaaagctttaagagtagtgatggagttctcaaccacgcaaatagtttgcttgctaaagcacagtcaaagctggaggaagagtttaagcagttgctagcttcttacaggtttgtgcttctgcgcctgataagagtttaagaagctacatgatttcaaacttgatgctcttgctataactatgactcataccttgtaacttcagggaacaaagctattgtggatttttagctactttttctagttagtatttttttgggaactggtcttcgctctatgatggtcttacttctttagttatctttcaaataacctagaatacttagaatgaccttttatctaaattatcggagttgtcacctgacaaagatttttttttgtgaaatcaaacacttgtcaatatacaagtttcctatgatacgagtgttccagacaactggttttagatggaagaatgctaaggccaactctttttttttgttataatcagtaaagcggtggagcctgatcgcctatttgatggccttcccaactcactgagaccatcctcagacggggatggaggtggaaaaccccacggaggacatcacaatgatgacgcggaaactgctgcttatacacttccaatcctcattccgtcacgggtgttgccacttttgcatgacttggcacagcaaatggttcaggctggtcaccaacaacagttgctacaaatttataggtgaactattgattcttggtcattcatcctgtatgtcgtacagttcattttcaaatcaggctcttagcttaaattttcaactaataattgtagcatgagtcaaagtactgagtcaaggtatagtttctttgaacgattgcgggtatacaattaacttacatataattctcaccagtcaccgctcatttacaaagtagtttttccatggtttctgcaagttgtgagtttatatttgactatccttctgctgtttcactagtaaagctaaagagaaatgtttttgaaatatgaatttctattgacactcatcaaatagtttggctgtgatgtgcacatcgtgtactccgctgtttgtgcttacctgatctgaaaacattattgctagatgcaattctgtttgtctcatatgtgtaatgcattggagaagctttgtcttttttcttctatatgaactactagtattgtcagatataagcagcgaattgcataatctactggcattttcccaatgcatatttaagatgcatttgtgtttttgaatttgttattaatctccttctgttcaacctgttgtgttttgttcagggacacacgttcctttgtcttggaagaaagcttaaagaaattgggagttgaaaaacttagcaaagaggatgtccagaggatgcagtgggaagttttggaggccaaaattggaaattggatccatttcatgcgcattgctgtaagaactctagttaaggatggaaataactttaacatgttttgttcacttttaactcaagatattttgttcaacaggttaaattactctttgctggagaaagacaagtatgtgaccagatattccgaggcttcgattctctaagtgatcagtgttttgcagaagttacagtgagcagtgtctcaatgctacttagctttggggatgctatagccaggagcaagagatctccagaaaagttgtttgtactcttagacatgtatgagataatgcgggagcttcatacagaggtaataatcttctcattaatatcattaagtcgccatacatttactgaagagtcttctgttaaatggaaaaattattctttagtttcagcttttggtggattttttctgatctttaagaatgtcagttttcagtatcatgaactttggtacatacttgattcaccttcaaacctgtattcatttgtataagctagtgaggtgaaatgttatagaatataggatgctgcaaacgtctagttttattgacactgacacacataacgatttaccatattaagacgtaaaacttcagtttgcatacgcatagagttcaccacttacttcttagagatgtcaaacctagctgctttgtttacttgaggagtaatatatggaaagtgattgtctttaatgtttttcttcccatgtggagtttctatcaatcagatatgtttttgaccaactgaaatccccaccataataaacagcatggcacacagagaaaaaactttgtgatacatatgtagtggaagtttgctatctaggacgacataaagtgtgaattttcttatgaccagtttatggtataagattagatggtacaatctcatgaaatttgtgtccatggacagattgagacaattttcaaagggaaagcatgcctcgaaattagagattctgcgacgggcttgacaaagcggttggcgcaaactgctcaggaaacatttggtgattttgaagaagctgttgagaaagatgctacaaagactgctgttctagatggaactgtccacccactaacaagctatgtcatcaattatgtcaagtttttattcgagtaagtacatcatatatactcaacttatttcctcgaactatttgcgtattgttcttctccatactgctatttgcgtattgtccctttccacgctttaattgatgatcattggtgtcagctaccaaacaacattgaagcaacttttcttggaatttggaaatggagatgactcaaattcgcagctagcatccgtaacgatgcggataatgcaggcgcttcaaaacaacttggacggaaaatcgaaacagtacaaagatcctgcattgacacacttgttcctgatgaacaacattcattacatggtcagatctgtgcgcaggtatattatttttctcgtttaaactttaaaggctgatctggttttattaaaaaaataaaagaacgcactcatttagctttattcatatgataatttttcaggtcagaagccaaggatttgttaggcgatgattgggttcaaagacataggcgtatcgtgcagcaacatgcaaaccaatacaaaagagttgcctggacaaaggttctgtctatttgtctaactctgtaaagaaacactattatataaaatttcattaaattgttactaagaaactgttacatattttgtagatactacaaagctcatcggcgcaaggtttgacctcatctgggggaggaagtttagagggaggaaacagcagtggagtttcaagaggattattaaaagagaggtaagtcctaaacatgtaaaataaacacagtaattggcaaatgtttatatatttggtaatgatgataaatctgtaaaaaaaaaatggaacaggttcaagatgttcaatatgcagtttgatgagttgcatcagagacaatcgcaatggacagttccagacacagagttaagagagtcactaagacttgctgttgctgaagtattattgcctgcttatagatcattcctcaaacgctttgggtaaaaatctcctttctctctttactgcgaaggcttttctaatatttgattgaaatgtaaaaaaacctaaatgagattttaacctatgatcgatgcaggcctttggttgagagtgggaagaatcctcagaaatacataaagtatacagctgaagatcttgaaagattgttgggtgagttgtttgaaggaaagtctatgaatgaaccacgccggtaaaaaaacaactaaaagatgatgaaaactaattgtgtaaggtaaatttctatcaaactcttcttttttttggcttaccttacataactaggttcgttgctattgtatatgcagtgtcaacttttcgttttttgtattctactattctttggttggaatgagaatgtgtaaattacttggagacagagttgtttccttttgtatacgttaaacgttttgaaataaccatggcctaataagtctaatctcaactcacaaggatatgaaatcttttttcttagaatgaaattaatcggaaatcaaaatcctaggcgtaatttataaaaaaaaatatgcagtgaaggagctaagttataagttgatatgattgacaattgctttgagacgagctttggtactaaagatcgagccaataatatttgtccgaacagctgaactaagcttggggacaagattgtcatgcggatcaattctgttattttcttaatggattttaggtgattaatcagttgttattgaacagaacaagacagatagagctctaccgacttgcatacttaaatgaaagaaatatgatttattagtaaaataaagagtgatgagatggttttgttgttttaaaacacacatgtttggtaattggcatattccttttagaagatccaaattctcccaacatctttacatggacttccccatttccatcatctccttccacttttttcccaaaataatataaaaaaatgataatttgaatcgatgtaatgagtgtattcaacctcttgtataatttgtctccatgaccaaagacaaagagagaagccataaaaaccctaacaacatccattgttgaaactctctttggcacaacaccaaacacacaaaatatggccatcccctaaagaaactgaagctcaagaaccctctgaatctatcagaagatctcaccaataaagggttttgagaggttcaagtttctctttatgggatggccccaaacacaagagtactcacaaaaggtaagaagaagaagagatctcttggagattatgattgtgaatgttcgtgtgtgggtgttgtgtaaatgatcatcatcatcatcatcatcattatccaatatcataattatcaatatggtgatgatgatgatgatgaggattgtgtgtgaatggagcgatgaagattgcatgaaggttgatgaagacaagcttgatgtgtcttttgttatccctcgtttgggcaacttcgatcctttggcaagcttcggttcccctcggaatcagcagattatgattactatagctcttatatgtttatgttccgtgtttactttgtttccggtttagtttggtttattgtctttaatttcgtcatgtttgtgttgaatgtgtgttgttgttatcccgtgtgatgcaccattcaggtgtgttcctatgtgtgtgtgaggaataaaagaatattcggttttgatatctaaaatcaaaccccacttctacctttcattaatagtgagtgtcttcaaacaattttgttttagcaatctgtgtatacctttatcaaaaatacttttaagctggcccattcttagcccattaatagtccagttttagccaattgaaatcgggtaaatttaaacacattcattcttctaatatgagcatctatgaagaaacccaagagagccctaatcaaaccgtgtctgacaagctattaaataaaaagtcgtataaagtaaaacaaactagaaaacctactacagaaaacgtaggggtatctaattatgtttttttccgaataatacatgattattgtttctagataaacaatccataataataatattaaaaaaaaaaaaagattagataaccctaaataaccattatgttattctaaagtgttttagaaaaaattaaaatatagtcgcccatcttttgttgcgtgtatccagcttggttgcttcttcaacttcttcttctcctttttcctctcactattgagatcagtcgcagtcatcacgagtttcttgacctctagtttgagttccagaatccgttcttcagaagtcttcttctccaaggaaaccatgtcaagctttgactgcaaccaatccaggttaaaaccggcttgtgtcagatcacacatatcctttgaagctttgctcaattctgcttcggtgagataaccaagaggcgtgtggtaaagtatcccgatgatgtcgcagagaaggttcatttaagtattcctgagagcttggttttgcactttgacatggtctgtagtttctggatatgtctgaaaaatccactttgctaacgttatgtgacaagaatcaatggcaaaaccattgactctaatctttcttcgtctatgcaacaacggaatttggtcccccataacttggcttttgatttcggtataggtaattaatgtcagagcaaaaagttttttttgttttttttttgcttcatgaatgattgttttagaactcgctctctttatatagaggaggcagaagctttctaattcctaaaccaaatcgaaatcgagtttgttaattcttttagatttcggtttaattttaaaataagataactttaagattacaaaaaaggaaatcatatatatatatatatatatatatatatatatatatatataactgtttttttttagattttgtttgaactagtaataattagtgaacctgaaaattcgcataatgttttccctttctgaaacgtctcaaatttatcaataattagtggattatttttaaaagttgcgattgcttgatgggctgtgacaaataaacctaatgtactcataattgggtaaatacactatacacattttctgaaccaaactgtaatgagaaaataagataagatcattatcagccaaggcatgatgagtcagtagtcaaaatcctacaatgaagatgttgaaaaccagagcaaactcaactatgggcccttttgagatctccatcaaagctccaatctttaaccatgcacagatggattattcgtggatctatgccacactcatagatgaaaccactgctctcaagctttacagtcaaagtaacattatatcacattcattgacaacgaccttaagtgtaagtagatggggatgcaacgtatattgtttcctgtagaaagcatttgcacatgttttatggaggataaaatcatattttatacatgaatagtaattaccttcatagatagcacatgcttgaaaaaacgctttttataggtgttttcatcataaagtttatgacattaacatgttttttcaagcagtacgatgttctatctaaaaggtaattattattcatgtatggaatgtgatttcattctccacgaaacatgtgcaaatgcttcccgcagaaaacaacatgcgttacatccccatatatctacttatacttaaggtcgttgtaaatggatatgatgattgaaaaaggttacttcaactgcaaaccttgttattgttattccaatcacgagtatcacataaaaaggattgtcacttccgactatgagcaatcattttttcctagctttacacccaagagaaacgccacgataccatgtctgcaaaataggtaactatcattagctactacgatcaaaatatcgaatgtcaaaatttcttaaaacacacgcaaccacaaatttgttctagatcttgcgagtataagagtcactggatatgaaacctggactatcgatgtgaagaatctccccgcttggcgaggtggaagtgatatggtcaggggaagaatcgagatggtaaacgccggtatactcttcggatttagctaatgtatttcgtcgcaatttgatttagatgagagtttataagagtatacaagatgaacttcttggctaatttatcacatcttgaagatttggatggttgtgataatgttcttctccttctttctctttactttatatactatacataacaaaactcaacgtggctttgcacatggttgtcttcatatgataataatacattaatggtttcagatcttagatctagatacagttcgtttcgtgacagctgtttatattaaaatagaaagctacattaattactgcattcaaagttactttatgttaatgatgttgattggttttttaaatcacattggattcgcactatggaacaaatattgacttcttaaagtttgaaagtttctttacgggctgaagcaagcccatgggctgtaacaaattcgtaaagctatttaagatcccaatatgctcattgttaacaaaaagttattagtctgcatgaaaatcaatattatgaaattaaatccgtaatgagtaatgacaattcttttcttttgttcttctgtttaattttacatctgtgatgacttatatttagttacttacgaaaccaattaaatgcaaagatttacaaaagcggatgtgaagaagaagacaacgagctctgtttccttcccagacgagacattatgatccaatagacaaatcctgcgatgatgaagctgaaaaacaaagcattgtcgtaaacaacgacgaacccatttgagatcttcgacaaagcactgatcttgtgtagaaaaccaggcacgactgggattattccggcgaccaaagcgacgaccgctgcgacattataccccttagagaaataatattcgccggagggactcaaagagtacaaatctccaatgttcagtttcatcttcttgatcaggtaataatcgacaagaattatgcctccgattggaccaagaagcgctgagtaccctatgagccatgtgtacacaaagctctcgctcgatttaagcaatctccatggctgaaacacgattccgagaactgcggtcaagaaggctcctcttccgaatgtgaaaaacttagggtttagattcacaagcgcatttgctggggcgaccacgtttgcagctatgtttgtagtgagtgtggctagggatattccgacgatagcgagtagagttgtggcgaggcctccaatttgaccgagaagctcaatcggattggatatgactcttccaaagatgatacttgtggaggacgtaacagctacgccaacaaacgtaaacaaccccatgaaaacaggaagaccaacttgaccgatgatttgatccgtctgtgattttgcaaaccgggaaaaatcagggatgtttaaagctagagttgcccagaagcttatgtttgcggttagggacgggaagaagagagtccagaactgagcagaggttagcttggatgataaggaaagcatgtgaccaaatccaccggctttgagataggaccaggcaaggaggcaggacgtgagactgatcagaattggagctgagtacttttccagctttctgattccatccatacctctccagacaatacaaagctgagccaaccagaagacaataaaacaagagaactcaaggggagaagtgccgagccaaggtagtgtatgagacaaagcagacttcttaatatgacccggtaagagcaagaagatagcttcacctccgatccatgtctcgataccataccatccgcaaccgactaatgctctgagtagagtcgggatgtgagctccacggataccaaatgatgatctagcaaggacagggaaggaaattccgtacagagtgccaggctgagcggtgaggaccagcggcacaagtagtattagattggctgtaacaactgtggcgatcccttgccaccacgccatgccaagatccactaggctcccggcgaggtagtaagtaggcacaccaactacgagaccgatccataaacttgacatatccaaccatgaaaacgttctctggcttggagttgtcggtttcaagtcgtcattcgtgagggatgggtcgaattgggactcgtcgtacccgtggtcattaatttctgagccggtcatcgctgagagtcgtgggcggatgacaccagatcggctcaaaaccaagttgtcaccaggcaggatcggactgaagctgtgcttgcccaattcatagtgtttgctacttttgcgttgaatgtcgaacgtagacacacaagaagtgtaggaactcttgtggcttgaatctgtgaatgagacatgttgatagagtttagcttttgtgcgagatcttaaagaagaaagagaatgacgattgtgtttgtggggatggagattgagatggagactaaggcttaagcaattggagaccattgagtcttctttctcacacagaaaagagagaaagagaaagaattgtgagatggaaattgtgtggtggtgttctgtttaagttctctaagaaacatgtggttggacatgaaccatgtgtttagtggatgtttcgtcgctatcacatctcattttcttttacttaatacggaaaaaacttaaaataagattcgatttctttcttttttcagcaaaaaagagtttttttttttcttttcaatcttacttgattcgttgacttccattagcctactcatttagagaaattattcaaattaaagaacgtgatttgatccctaaagacttctttcttagctataattatctttcaagagagtatttgatggatacaacatacatgaaacaactcaaacacttgtttcttattctttttatatctagcctaagcaccaatagccacattgactcgtatactatcaatagatatactacaaacacaagaacatagtagtgtgaccaaccttttggcttctgaagatgttattctttcaagcgatcaatctctttctcccacttcagtccaaacatttgacggccgaaaggaacgatcagattgtacctgaatacctgtcaacaaacaagagaccacataagcaaaccattatatatcgcaaacagaatcttgatttgtagttgaatacttgccatgttattgatttgtttcaattcgtttttcagcaaatctgatctctcttcccatcccgattggtcttcctcgagtttcattgtccatgctttcttcagtgaaactctccattcttttgctttgtttcttatctctttgttgagctccacccattcgggagcaaacccgttcttgttaagaatccgatacaatgtatcctccgctgggtctgcgtgaggatttgtatggaggttcaagggtttgcctttaccgggtaagttctcaaagtggccttcttccattgaatgccatatcctttgctcgaccacgttgattatatcagtctctgacctgcaacatcatcccatgttagtatccgttacaagcaggtcaaatcaataacatatttcacaagaagaagaatctcatctgggagattaataaaaccacaatgcaagaaaaaagcaacaagctaagcttctctgacaacaaaatgtcatatattccacggaaaaacataaagctactgcgcaattgtgtcaacatctaaaaaacaaaagactcagcaacatactcagacgcatcgcataaaggccagctgttctacctattgaaagatcaccaaacactacaactacttatcaaataaaaggttgatgacagtcctaaagacttggcctcttttatattcgagagcctctctcacagctttctcatcaggcacaaaaccctttcccttcatttcttgcaacaattctctagctgattcttcttttccctctcttacaaaagcttcaaacactgcagtgtaagtggcagcattagggctcatgccatttcccatcatttccaacaagtacttcttcgcatccttatgtgttttaccatccgctgcaagccctttgatcaaaactgaatacgtataggcattaggcgaaacaccactggcgagcatacgcatgaaaaccttgagagtctccttggcctggcctgcattagcataggcctcaacaatagcagtatgagccaccacgtctggcattcgattcttatctttaatctgagagaagagctctaacgcctcatgtgtgcggccatctttagacaacgcatcaaacattttcacagcttcattagtaaaaccctctgttctcatcttgtggaatatttcttggagattcttaggatcctctggttcctcaatcgccggtttcttgctgaaagggtcatacggaggaggtggaggctcctgcttctttgaatcttcagtaacctgagtttcagtttcctcatctgaatcatcatcagacagagagaaattgactttggtgttaactcgcttagtctctgaactgaattgccttgcaaaaactccaccgcaaaaccatggaaacagtgaatttgaattgcgcttggaccttgaaattgacatgtgaagaagaaaacgctaaatcaaggtaagagacgtgtccagagatttgaattttcattaaattctcaacgaaacctatgaaccctaactatataacatatcgattccaaagtcctaatacgtacagtaatgtgagcacagaaagatggaaagagactataccttacgaaatcgcgccgcccacgtagctccggcgggagtttccggtcatggactgcgtcaatcacggcagagaaacgctctgtagtcttcttctctttcctcttcgatgacgccgtcaaatcatcgggagacgaccaccaagaggacgaagacgaataaaaggcgaaagctctaacgaaatcagaaaactcgccgccgttaatcgcagatgaagtgatatctgaggctgagaagcgatttccgagggataaacacgatggacgtgacgagggtgacgcagccaatgacctcgcgagacgaaccgccatggccgaagctcagggagagagtagtcggaatgttctggataaatgacttacgtaacccggaagagtggtttagaatacgcgccgtttacgcgtttaacacatcatgccgttttcttcataagaatatacaaaacgtgccgtttaattttcgggtctgcttcggcccatataactagcccatttatagattgttggatacgtggattaattaaaaagaatattttgttgatgatccaatagatagagaaacaaacccattagacatcgtgggatttgatattttgttggacgtacatatttttttttaacaaaatcacatccctaaacgttattcaattgtttcttactttcttttgttgatgaaacatcgtttgccaccacctattttgctgtgaaaagttgctaattttatggaaaaggtgtttcagaccaaaaacaataaatctacataaataatattgaactcaaaagtcatgtattaatttcttgtaatgtacatattttttaattgtgacagcataacgtgtcaatcagtttagaattaggtaccaacactttgactgtattaagacatgatgcatgctacataaaagttcatgttttaatatacaacaatgtttcttatccgtatgtgtattttatatatttcatgatttgagatataatgagaagataatgttgaagcttttaataggacgaattgttgtattgtatgtaacaagttgtgtatataaactatggctgatggctctcacaagaaaacgttgtcttatttactcagtcgttgtgatgtccgaggcgctttttttttgtttgtttattagtatgatcactgagatattctaacggacgggacataaacgacgattaaaaaattatggtacctgatcatcgttgacgccaaaaatgaggaaatattcggacatttttatccctaatccccaaaacaattcccatatagtgcaactagaaatgtgtctcagtttctgcgataatttcctcgacttcgatttggtgcttcgaccattcatccttcaaacccgtccctgtgccaggtgagttttgtagatattcatgacgttttttttttttttttttttttggtcatcatattcatgaagtttagttttacgaaaaattgaaaatcgaactcaaattctagatttctttgcgtcaagaaatttagaagtaatcagagacttaatcaatttttgaactagacgttcaaaacatggagaatatttcacaaacgaaaataccttttttggacggatcagaaattgtcatatctcagatttgtaatttgtttcaagaagattaattatcttttaaggtttttcaaatttttagttttttcaaaaaatttaaacattaatttaagttactaataattaggggaaagaaaatattataattaggaaatataatattataattaggaaatatatgtcaaaaaaaaaaaaatctaaaaatcaatttttatttagataataagataataaataaattcttgtaatataaacgcaaaacctcagaaaataaaattctgcaaaattttatcatgtaatgcatactctctaattttcttaatcctttttttgatacagtttatatgttttcttcattattcatctcatccatgtgatcatgtcttactagctgcttgcacccattgaattgcaaaatctagagaagccagggatatgcaatgaacactgaattagctttgatcgatgtttccgattttcagattcaattgatattcagaggaaagaatcaaagtagtcagaagaaatggaggaggaaacagaaactagggttttcctatcaaacgaacaacatcaagaagaagaagaagaagaagaagaagagccgtcgttgccacgttccatggtgatctctctctatctcggctattttcttgctcgatggggtgcaaggtctgatcaaatctttatatattaacaccaaacatgattttcataagattatttactttggtatatgatatgcagaacttgggaattctctgttgctctgtatatgatttacctctggccaaactctctgtttctcactgcgatgtacggtgttgtagaatccggttccgccactcttttcggtcccattgtaggccaaatgattgatggaatgagctatgttaaagttcttagactctggcttgtaactcaaaacctctccttcattgttgctggtggtgcagtcgttgctttgctggtagtacctgatcttaagtctcagaatttccctgttttcgcaacattggtcgtgttgacgaatctttctggcgccattggagtactctctactcttgcaggcaccgttttgatcgaacgagactggtaaattaatgtttttagattattcacttcataaaatggcattgtaattgcactctttgatatgagattgttgtgttgtttttattacagggttgttgttatgtcggaaggtcattcaccagcggttttaacaagaatgaactctgttattagaggcattgacttgagctctaagctactgtctccggttataactggtttgatcattagctttgtatctcttagagcatcagctatcacatttgcagcttgggctactattaccgtgtggattgagtattggctctttatctctgtgtataacggtgttcctgctatagtacaaagcgatgagagaaggagtttaaggtcgtctcaatcgcaagcggaagagacagatagtgcatctagtttttatgttcctcttttacacgaagaggagtcttataggaatacgcaaagtagaagcagaatcttaaggattcttgagagaatctctgagtcttcttttgttagcgcgtggaggaattatctcaatcaagagattgtgctccctggagtttctctagctctattgttcttcactgtcctcaggtttcctttttatcctcttgttctttttgtgttggctttggtttcgcatcgcatacatatagtttcttctcgatacagctttggaacactgatgacggcgacattggagtggaaagggatacctacttatatcattggtataggcagaggaatcagcgcaggtgttggtctagctgctaccgttttgtaccctctcatgcaatcccgtatctcacctctcagaaccggagtctggtccttttggtctcaggtatatagaaagactgtgtgaggttatttgatggatcaaaactatatattaaccggtctttgatttatctgactgaatatgataccaaagttggttcttgtttctctagtggacctgtcttttggtgtgtgttggatcaatttgggttgagaaggagaaaatagcatcctacatgctcatggctggagttgctgcttctaggcttggtttgtggatgttcgatcttgcggtaatccagcaaatgcaggtacgaatttgaaactgagatttttttttgtcttgtttattactgattcaaagtttttgtttctcttgagttaagttgtgatgctttgaaaacattgctttaggatcttgttccggaatcggaccgttgtgtggttggaggtgttcagaactcgttgcaatcggctcttgacttgatggctaatcttttgggtatcattgtatctaatcccaaggtatttaatcactaaatgcttatcaattatttctctttttttcttaatgttaattttgttacatttgtttttggatgtgatttcaggatttttggatgttgacgttgatctcatttgctacggtttcgttagccggaatactctatacgattcacctctaccgtattcgaaaacatctatttcacttggagaagattcccttattgaacaacttttttgcttcatgaaaaaaggtataaagtatcataacatttctctattagtcgtcagtgtttttgtatcatctatcttttgtatatatgcatgtttaagaaagaaaaaaaaaccatttgaactacacgacattttgtgtatgatattgttataatgacacagcgacaatgaaggaaacgtggtcacactgtaaaaatacctctatttcattaagttaccagagagagattattatctaggaagaatcaaacgagaaccaattgaaagtttagcgtaaaaatgtgtaatgtgataaaatttaccggccgtcgaaattaaggataattctcaaatcacaagtttctttagcacaaaacctaaacgcaacgtgagacgatcatatgtctcgaccatcttcgaccttgggtgtcctctgaacgcatagaatcttctgacctactcatcacataacaaaaaaaaaattattaaacctaaaaaaaacttatttatgttaactcaatcgataccgaataactgatttggtattttggtcacctttgtatttttgttcttcatatatataaactaactcaaccaaaaacttgaaatgtttttacctattaaccttccgtccatatgaagcatggctcgtccagcactatccgcactttcaaactcaatgaaagcaaatcctcgcgactctcctctaaaatcttttgctagaactgatcttataacctttccgaaatccgaaaacatcagaaacaacatttcttcagagacttgggcatcaagatttgctatatacaaactcgtaaattttcttggacaagaagacgatccgtgattatcatcgttgctcatctttagctctgttacacaagaagacgatagaataaatgtgtattcaaatagcaaaaggtagatatgtattctttttttcttttttttatcaacaaatgtgtattcaaataaaattaaatttatttactaaaaagattgactacaagttttgactaatgactaatgactatgactggactttaaaataaataaaaaatattcaattttacaactatagagggtgacaaattataacaaaatctctatcttgttatcttaattattttagttattcggatatttaacgtgtaaattgtaaataaataaagagatgtggtga

SEQ ID NO: 1401 - DNA, 102897 bp, Arabidopsis thaliana
gaattctctgttgctctgtatatgatttacctctggccaaactctctgtttctcactgcgatgtacggtgttgtagaatccggttccgccactcttttcggtcccattgtaggccaaatgattgatggaatgagctatgttaaagttcttagactctggcttgtaactcaaaacctctccttcattgttgctggtggtgcagtcgttgctttgctggtagtacctgatcttaagtctcagaatttccctgttttcgcaacattggtcgtgttgacgaatctttctggcgccattggagtactctctactcttgcaggcaccgttttgatcgaacgagactggtaaattaatgtttttagattattcacttcataaaatggcattgtaattgcactctttgatatgagattgttgtgttgtttttattacagggttgttgttatgtcggaaggtcattcaccagcggttttaacaagaatgaactctgttattagaggcattgacttgagctctaagctactgtctccggttataactggtttgatcattagctttgtatctcttagagcatcagctatcacatttgcagcttgggctactattaccgtgtggattgagtattggctctttatctctgtgtataacggtgttcctgctatagtacaaagcgatgagagaaggagtttaaggtcgtctcaatcgcaagcggaagagacagatagtgcatctagtttttatgttcctcttttacacgaagaggagtcttataggaatacgcaaagtagaagcagaatcttaaggattcttgagagaatctctgagtcttcttttgttagcgcgtggaggaattatctcaatcaagagattgtgctccctggagtttctctagctctattgttcttcactgtcctcaggtttcctttttatcctcttgttctttttgtgttggctttggtttcgcatcgcatacatatagtttcttctcgatacagctttggaacactgatgacggcgacattggagtggaaagggatacctacttatatcattggtataggcagaggaatcagcgcaggtgttggtctagctgctaccgttttgtaccctctcatgcaatcccgtatctcacctctcagaaccggagtctggtccttttggtctcaggtatatagaaagactgtgtgaggttatttgatggatcaaaactatatattaaccggtctttgatttatctgactgaatatgataccaaagttggttcttgtttctctagtggacctgtcttttggtgtgtgttggatcaatttgggttgagaaggagaaaatagcatcctacatgctcatggctggagttgctgcttctaggcttggtttgtggatgttcgatcttgcggtaatccagcaaatgcaggtacgaatttgaaactgagatttttttttgtcttgtttattactgattcaaagtttttgtttctcttgagttaagttgtgatgctttgaaaacattgctttaggatcttgttccggaatcggaccgttgtgtggttggaggtgttcagaactcgttgcaatcggctcttgacttgatggctaatcttttgggtatcattgtatctaatcccaaggtatttaatcactaaatgcttatcaattatttctctttttttcttaatgttaattttgttacatttgtttttggatgtgatttcaggatttttggatgttgacgttgatctcatttgctacggtttcgttagccggaatactctatacgattcacctctaccgtattcgaaaacatctatttcacttggagaagattcccttattgaacaacttttttgcttcatgaaaaaaggtataaagtatcataacatttctctattagtcgtcagtgtttttgtatcatctatcttttgtatatatgcatgtttaagaaagaaaaaaaaaccatttgaactacacgacattttgtgtatgatattgttataatgacacagcgacaatgaaggaaacgtggtcacactgtaaaaatacctctatttcattaagttaccagagagagattattatctaggaagaatcaaacgagaaccaattgaaagtttagcgtaaaaatgtgtaatgtgataaaatttaccggccgtcgaaattaaggataattctcaaatcacaagtttctttagcacaaaacctaaacgcaacgtgagacgatcatatgtctcgaccatcttcgaccttgggtgtcctctgaacgcatagaatcttctgacctactcatcacataacaaaaaaaaaattattaaacctaaaaaaaacttatttatgttaactcaatcgataccgaataactgatttggtattttggtcacctttgtatttttgttcttcatatatataaactaactcaaccaaaaacttgaaatgtttttacctattaaccttccgtccatatgaagcatggctcgtccagcactatccgcactttcaaactcaatgaaagcaaatcctcgcgactctcctctaaaatcttttgctagaactgatcttataacctttccgaaatccgaaaacatcagaaacaacatttcttcagagacttgggcatcaagatttgctatatacaaactcgtaaattttcttggacaagaagacgatccgtgattatcatcgttgctcatctttagctctgttacacaagaagacgatagaataaatgtgtattcaaatagcaaaaggtagatatgtattctttttttcttttttttatcaacaaatgtgtattcaaataaaattaaatttatttactaaaaagattgactacaagttttgactaatgactaatgactatgactggactttaaaataaataaaaaatattcaattttacaactatagagggtgacaaattataacaaaatctctatcttgttatcttaattattttagttattcggatatttaacgtgtaaattgtaaataaataaagagatgtggtgaaagataaataaatggtaaaaaaggtaaatttgaaattaaatcatatttaatcgaagttgtcactgcgtgcttttcaagaaatgtcaaactatttacgcggacctaaagcgtatagttttcatgcgagaaaattattggaagttgaggaaaaagaatttcgaatgaaactcaccaatatttcaactatggaaccttatcgctttttcggttagaacaaaattaaacataccatagaaagaaaagaaaaaacagctaaatacattttcctccttttaaaaaaataataatttattgctcatacatgttaaactatttgccaaattaatcccaaaaatgtccacgatccatcgctaccaaaatttggcctcagtcgaataaaaaggctgagttaatggaatacgcattattgccttagccttaataagttgtgacgatttggtcaaactttcgagaacggcgatgcttattaatagtgtcaaagttctctcctccacattttctctaagactatccatttcttgttgtcattaacaaaaaaaaaaaaaaggaaagacgcctttgctctgaattttgaaatgcattatctgatgaaactcttcttctccctctctctcttctttggtaatttactataatctcatagcgccttatatcactagtggattctgtaaaacctatatgtatgaccggattattattattttgttatttgtgtacatgtagtagggatcaatggagcagtgggttcaaatcagccttcccaagccaataaaaatccgaagctgtttgtgttcggaaattcttatgctgataccggaaacatgaagcccactgcattgtcttggaaactcccttatggtatcactttccccggtaaaccttccggccgttattctgatggccttaccgccaccgattttctaggttctactctcactctcattcttaaaacgtcaattgttcttaatgtttctctacatgataaatataatcaaacataccaataagaaagttctatatataaattttcctttctactattctcacacattagaaatttatatcataacgtctatatcgtttgaacattaatatacttctaaagaaaattagcatgaatttactaaagttaaaatcttttatgttcttcctcaaattcattaatatagtataattatttattgaatttgacgtcaacaaaaaaaaaacttacttcgtgcagcaaaacagttgggagcaaaattaccgtacctctggagaactcacggaaaaaagaaagttaaactaaacagaggaatgaattttgcgttcggagggtccgaagtgtttgactctccggttgatcgatcgccaaacatctctactcaggtgggtttcttggttaaccttgcccttgcccgccgtgtctacactatcgacggcgaccttgcttcctcctacgctctcctcagctactccggcaccgactattatggtttcatcgaccaaaaccctaatatggctgtaagaaaacattcatatttccttaaacgacactagtcatgcctatcactacttatgctaagatttcgatagtttcaaacgtaaatttctctgagtttatatgtgaaataaaaaagcaattgaaattagatataccaaaaaaaaaaaaaaaaaaaaaaaaaaaaaaactaaaccatttttttcgtttaacgcaaacaccaaatgcaaaaaccaaaaataaaataaaatccaatactaaaattatttcattttgatgatatactcatttcttaccttcattatgttggatctttgtatgcaggcctacccagcatttgtagagttcatcgtggaagatatacagtatagtctagggataatgaacggctaaaaatttaagaatatagcagttacttcactgcatccgctcggatgcctcccacgtgtcaccgttgcatcatcatttcggagttgcaacgagtcatatagcgatttggtgagactccacaacgagtcgttgaagaaagccgtggccaagcttaacaaagaggacaagtttaggactaagggggaccgttttgtcatcgttgatcttcacaaagccttcatgaccatcttagagaaaaaaggtaattaacataagttacacgtttgatctttatgtaaaaaaactttagtctaaaagttttattttggtgttatcggtctgtggaaatacagggaacaaaaggtttaaaagcccgttgaagccgtgctgcgaaggcgattgtgcacgtatggatatgaagggtgcaaagaagtatacattatgtaatgatccaaagtctgctttcttctgggatgaaattaatccaactcaagaaggatggagatcgatttactcgctattaggcaaatctctaaccgagtctttgaccaaagggtaaaaatactttttggcatctaaaaactcgaactgtgttggatatttttttacgatgaaatcgaagggaatagagttaaaagaagcataaatttaaagatctgtttactgtttatgttcatttgctttatatttctctaaccgttgggatttgataacattatagaggaaatctaaccgttggggatttgatattatagaggaaatctaaattaaattcgattttcatttaccaataataataagatcaatctaaccaataaggacatttcgttttggttgaaacctttttttttttttttttggatataacgtttacaaagaatcatcttttttgctcacaaaatttatataccaaaaaggtaataacagagaacaagaatgatgaaaaatttcaactctattcctaattttattctaaatgttttgtttgtatacaaaacagaggctgttcctaacatatgttgtggtggttgctacagattcatatcaaaataacaaatgatcatgtggcttctctagttggcttactttcactttcgtgtatctcttattcgaaacagatgagctcaccattcgaaagctagttttgaaaaacactcaatgtatcaccgccgctcatatacgaacctgcctaaggctagcttctcaatacccaagcaacaattttcaaacttttcgagtttcagtaaaatcggagagcaaccaaattttctgtgcggctttccgtcgaaaaccaaatcatcgagagcatgtagtcacaaaaacagtaatacgatatcaatatttttatttaataggtattcatttcataacagaaaataggaaattgtaattataacaaagataataaattccacttcttttcagtatcaaaagatttatgtgcccactcttaatgacagtactttaccatttatattctaattttggtacgtctttatgtaaagtaaactccatcctctctgatatcccaataatttgtcttcccatgatcaaatgagccactggaaccttgatatgccctaatccttacaaatctattttgtatgatctcccttatgtcacaatccattttgtttgtggtcacaaattcaccatgaaatctataatcatagatttctccagggtttaaagaaagattgaacaattgtttgtcgttcaatttacaaaagattttgatttgttttccaacagaattcttaaattgtactaaatttttttcccacatattcgtattacccaacccgatacacaaagccatgacaaacaaaaaacacaagtgattcatcgtttcaattaacttttgtggttgtttagtatgggtgataaataagatatttaacttatacaaaaatgttgatatatatatgtatgtattagtatcttctaaataacttttatcattttaattagatttacaaaatctcatcttaactttatgaacttttattgctttttcttgtcttaaaattattctattaccaaaaaaagaatataaggttaaaagtttaactattgattagattttgtactaaaagattgcaagaaattgataagtactcccatcttaatttatttcctaaaaaaattctttcttcttctggtcttaaatttgttttactatcaaataaaggttgcaagtttaatgtttgaccaaataagatttttaaaatcttagttttatgatcttttgctagtcaaagcttccttctggttaaatttattacaatcatttattatgagccccaattcatttatattttacaaaagatatgatgttaaagttctttaacaaaatagtatatataaaaacctttgctttatgtcttacaatacattctctgatgaaacagtttctctccaacccctacccatcttatagctctcgtcgtaagtcaaacagattcttacgccatatccagcttcttctggtagatctcagaaagaccgttgctgaatacaatgagatttttatttttataaaatttggttcgaaagagttttaccaaaataattaacaagtacggctacataattatttatggtgcatataacttgaatgcaaattggaaagttgacccacttgatataaaagattagtaataaacttttgtagttaacacacatacggtctacacaatgatttatggtgcattaccagaatgttgatctatataaagactttagtaataagtaataacactcgaatttcaatcctcaaatttctcttctttaatccatctcctccacatactctcgatttcctctccattttatttgtcaccctttttttaatttaaattaatttttgtccttcataaaacacacaacaaaatcgactccttttaagatttccatctctaaacaaagccaaattagtaagaacacattcaaattttaatcctaaaaattctcacttccataccctttatcttttctctccattccttataatgaacaaacaaaagagaaatatttgctctgaaactttaaatgtattctctgatgaaactctttctatccttctctctttttttggtaatttatatcatcttatagctctcatcactacatattatttaacatctccatggccaaattttaaatttctcgatttttgatataatattttgtgcaggagtagtaatcaatggagtaatgggttcaaaccagcttcttcgaccaagaaaagtaccgaagctctttgtgttcggagattcttacgcggatacgggaaacacaaagcgcgacacagaggcttgggctatcccttacggtatcactttccccggtaaaccttccggccgttattgtgatggtctcatagccaccgattttctaggttcatttctctctctccctctccatgatcaatgttaaacctctctctttagtttagtcatgtacccttccaacgatgtctatatgattttatagtattatcattatattatacattgttacggatgttaattaataaaactattatgttggttggtgcagaaaaagtattgggggcagaatcaccgtacctctatagaactcacggacgagataaagggctaaaaagaggaatgaattttgcgtttggggggtccaaaatgttggactcctctccgaatagtccattccccaatataactgctcaagtgaattttttggtagaccttgtcctcgccggccgtgtctacggagacattactccctccgatgtttctctcatcagctacgctggaggcgactatatttattacatcgaccaaaatcgtcctgccgctgtaagaaaaaaaacattaatcttagatgtcaaggctaattaattcagaaacattattacaccaagttctctgcctttacatgtgaaagaacacttttgtttgtttgttattagaaaaaaatcataacgccaaatgtatatatacttttattttgggtgattatttgattcttatcttcattaaaatttgcatgcagggcttaaaagcactagtagagaaagtcgtggataatttacgcgttaatatgatagtattgggtggcctgctatttaagaagatagcagtaacatcgctgcagccgatcggatgccttccttcttacacctctgcatcctcgttcaagagttgcaacgagtcacaaagtgcattggtggaactacacaacaaattgttgaaaaaagtggtggccaagctcaacgaacagtccagggttatgaagaaggagcagcatttctttatcattgatatacacaacgccttcatgaccgttatgaagaacaaaggtgagaatccaagtaacaaaagtttcacgtttgattcaatatcaaaaccctagtcttatagggttttttgtgtgatcggtttatgaaaatgtagggagcaaaagatttaaaaacccgatgaagtcgtgttgtgaaggctattgtgggcgttcaagtgacggtgggaagttgtatacgttatgtgatgatccaaagtcttttttcttttgggatgcagttcaccctactcaagaaggatggagatcgatttactcggtattagggaaccctttaaccgactttttgaccaaaccgtaaaaccagaatcttttttcttttggtttcaaatgcttgaagcaattttttttttaaataagttaattgggttcataaattggcttacttctttaaacacgtttgaagaactttaaaataatgagaggatggtaataggtgtcaacttgaaaataatgaaaattggtaaataacgagaatgttttaaacattcattagggcggctggacatctgtaactcacgtgtgtcatcgtgttaaatacaaggtatatccatttttcagggagttttgcgtggaatttttgaaaacctagtatttaattactaatttaaatagtagtactatatgtagtggactagtggtatttagcaaaaattattgattcgttattattcttttaattttcttaaactatgaaaacctgaaaaggtaaaactttaaaatcaaaacccatttggtagtagtaataaagaaacatacgaggaattaataaatacttcgttgggacaataaataaaatttaaacaaaaataaaaatagtcaataatcaaggagggtatgccaatattccattgacgtagataaagaaacaaagtctttttgtttctagattacgcggccacgttttaaatctcgatgcaatctttgactgtgtaggaaacctagtcttacacaaactacattttattcacaacttagcccacacaaaaaaatcacaactagattcaaaagaattttgttatttatcattcactactataattattcatttgatatatatttttcaaaagtttaaacaaacgatacggacatgaacagttagtctaccgaagtatgatttcagcctacaaatttgaagtcgtaccgtgtcatgagaaatataagtttttcccacaagttttagggattaattttgatctggaattttctttttatgaaaaaaattgaaagtcaataacgaatgaaaaaaatgttaatgattgaaaattataacattaaaacgccaaaaatcatcgccccgtcaattttggcaaaatattccattgaactccatggtctataatagtactctaagtctataaactcaatacctacaccaatcaaagccattgtatctcttgtcccatgcaattgtatagtagtcacactcagacaataaacaaacgtaattaagaaactctaatggtgcaaaacaaaattgaataaactcaaggaataaagatacaaaagttgaccagatcatagtcgtttcacatctctaaggcttagtggcttactatataaagccgcaaagacattttagtgagaacacaaattcaattccaattctcaaagtgctctctttttaaaccaatctgctctcttccacttactctctctatctctctcccatctcgtttcttttttggtcattaaaagagaaacctttgctctgaatcttgaaaatggattctttgatcaaactcttcttctgcctctttatcttcttatgtacttcgctcttatttggtaattaattttacatttatcttatagctttcatcataacaatttctttgaacacaattttttaaccatttttttttaattatgtaggagaaatcaatggagtggagggttcaaatcaaaatcatcacttgtatccatttaggccaacgaagctctttgtgttcggagattcttatgccgataccggaaacattaaaaaggctttctctagctcttggaaattcccttacggtatcactttccccggaaaacccgctggccgtttctccgatggccgtgtggcaacagattttctaggtatctcttcatcttcgaaagtaaaaaaacttatcatccttaaaacttatattgtatcaatcttgtttttataaatatctcgattcctaatcaaatttgttgataaatttttaaaaggcgtaatcaattttaccaactaaagtctgtaacagtccaattacttgactgacttttagttttaggcttttagcctttgagatagattatgtggaaatgggtgtaaaataaatgaatgatttggttagtgttaggtacctaactaatcgatgttttagcctcgttaaaaattagtataaccgtatctcttaataataggacagtattattattatatacgtatattttacatatatgtagagatgtgaaaaatgatgagacgtaaattgtactaatatttaaataaggttcagaaagcaatgatggaagagtggtctagtgtcaatccagtgcgcgactcacttttgcttttctttcttctcgccatcttcttattattgtactttgcttttataaaagtgaaattttttactttagtttctgtttattaatcttaaaaactatttatattctcctttttattatcctataaacctttttcttgtaacaaaatttttatatgataaccattttgtttgtgtctcgatgagcatattatggagaaaattaggaatcatttcagtttctacttgttgtgttagacagttggtttggttggtaagggaaattagttcgattatttcaccacttgtcagtgttgcgtcaaatccttcttgtcctctatatgtccaattgaccagtgtcctttttcttacgttgtcatcatttagatgttctataatgatacaatacgttttttttttgtttttgaattttaacacgttaataaggtcacacataatatgacaaataacatgtaatttacctcgaatgctataacatgtagtcatgtaccaatataattaatttatatattttggattcattgtattcgtttgctggtctctttttttctttctaaaggtaattttattattatttctgtttaatactctcatcatagcgccactaccactaagcatcaacaaagcaacatacttcagtcttttctttttcatctttttattattattatataaaaagactataaagctacacaccaacatatgcactgtcaaagtacatacattatagtttaataaacattaatctcagaaaaagtcttatgtcaatagcctttctatgtaaatttctaaggattgatgaaattgtattaaatttacattttgtcaacgatgaaatgcattaattctcaaatatatcctttttatgtgtgtttgtagctaaatttgtggggataaaatcaccaatcccatacttttggaaagattacgcgggaaagaaacgattacagtacggaatgaattttgcgtacggaggaacaggagtgttcaacactcaaactccattgcctaacatgacaactcaaatcgacatcttccagaacattctcaccaccggcgacatctactatcctcccgagcttacttcatccgtggctctcgtcagtgtcgctggcaacgactactccaatttcatcgccctaaaccgccctgcctctgtaagatacgaaaccctattttttatttcttagatagtgatgttaaaatgtatagtgattcatttcttaccttcattgcgtcttacaggaattcccagcattcataaagcaagttgtggatcaaacagaggtgaatttgagacggatccacgctttgggagtgaaaaagattgcagtaccatccctgcaaccgcttggttgtctccctcccttcacattcgtaacctcgttccagcgttgcaacgagacacaaaacgctttagttaacctccacaacaacttattgcagcaagttgtggcaaagctcaataacgagactaaacagtcgactttcatcatccttgatctctacaatgctttcttgactgtgttcaagaacaaaggatctaatccaggtaaaagaaaaaaatggcttgattttatcgcatttttgcctcctttttttgcttatgctgattggttttttgggaaatgcagggagtacaaggtttgagagtccattaaagccgtgttgcgtaggtgtgagccgcgagtataactgtggaagtgtggatgagaagggagtgaagaagtatattgtatgtgataatcctaaaactgctttcttttgggatggacttcaccctacagaagaaggatggagatcggtttactctgttttacgcgaaagtcttaccgcgtctttgattaaagcgtgagaaacaaaagaaacacacattttgcttaggttttttcttatgaagctcaatgtttgagcgctctgttcctgttttcagtatctcttcattcatttgtgtttgtgtgtttaaagattgtgtgactaataaaatctcttaactggttcatttctattactcattaaaaccctatttagtttcaaaaaaataattaactaaagctaaatataaataaatcaagtaactaatgaaccggaaaattaggttgaacatgatcctaataacaagccaaaggactctcagacttctaactaatacttagccttacgaaacagttagaaagatagtggttatttaagtattgtccactttgtttattaacactagagtgtagattttcttctcagacaagcaaatctcaaaatccaaaatatggtttcgaatcagcgtgtacggttgtttatgctctgtttttgccttgttaacaacgcggttatagcagccacggaagatgaaaacgtcgagagaaaggtaataacgtaagagtgaatagtgtttttgtgttttgtctggtgagacaactgaatctctcacccttttcctctgtttctctttatttacagccttacattgtgtacatgggagaggccactgagaattctcttgttgaagctgcagaaaaccatcataatcttctaatgacagtgatcggagagtaagaatcagttcttgctcatattatcgtcatcggatttttattcgaaattatttacttttgcagcgagagcaaagcaagagaactgaaaatctatagctatgggaagaatatcaatggatttgtggcaagactgtttcctcatgaagcagagaagctatcacgtaagtaacaaaactgtcagaactgttttggcttttatcttgatgttattgattattgattgttttttctttgtggattgtttctttgcaggggaagaaggagttgtatcggtgtttaagaacactcaaagacagcttcacacgacaagatcatgggactttctaggacttgttgagtctaaatacaaaagaagtgttggaattgaaagtaacatcattgtgggagttcttgacacaggtaaagtaaatttactagttagaactcgaatctgaaaatatcgataaaccccgatttataacccttttttattgttgtcaaaaggaatcgatgttgaatcaccgagctttaatgacaaaggcgttggccctcctccagctaaatggaaaggaaaatgtgtaactggaaataactttactcgttgcaataagtataaatcctctgtttttataatcctctgtttctgcaacttctctactctcttctttttactgaatttggttttggattaatgttaaaacagtaaagtgattggagcaaagtacttccacatccaatcagaaggccttcctgatggcgagggagacactgcagcagatcacgatggtcacgggactcacacatcttccacaattgccggtgtttcagtctccagcgctagccttttcggaattgcaaacggaacagctcgaggtggtgttccttctgctagaatagctgcatataaggtttgttttcttcgttatatcattactctgttttcttggaacataaggaatatctgagacacattatcctctgtttcaaattaaggtgtgctgggactcaggatgtacagacatggacatgttggcagcattcgacgaggcgatttctgatggggtcgatataatatcgatttcaattggaggagcctcgcttccgtttttcgaagatccaatagctattggagcgtttcacgcgatgaaaagagggatcttgacaacgtgttccgcaggtaataacggtcctggtctctttacggtttcgaacctcgcgccgtgggtaatgacagtcgcggctaactcactcgaccggaagtttgaaactgttgtcaaacttggaaatggactcaccgcatctgtaagtatttctctttcaagagctgaagtatcatctcaatcttgcttgtatggcaagtaccataagattacaagatctcttttgcagggaatatctctaaacggatttaatccaagaaagaaaatgtatccgttaacaagcggttcgcttgcatctaacttatctgcaggaggctatggagagcccaggtacatctcaagaacagaacaaaagccttaatctttctcagtttttcacagtcttgatcgtcttaaatcattttgtgcagtacttgtgagcctgggacattaggggaagataaagtgatggggaaggtagtttactgtgaagcaggacgagaagaaggaggcaatggaggtcaaggtcaagaccatgttgtgagaagtttaaaaggagctggtgtgatcgttcaacttctagaaccaactgatatggctacttcaacgctcattgctggctcttatgttttcttcgaagacggtacaaagatcactgaatacatcaactccaccaagtaaatcaatcaatctcttctctctatgtcttacttctattattcttgctgttcctaactcttatcgaacttcacagaaatcctcaagcggttatctttaagacaaagacaaccaaaatgttagctccatcgatttcttccttctcagcaagaggacctcaacgaataagtcccaacattctcaagcctgacatatcagcgccgggactaaacattctcgcagcatactcgaagctagcatcggtaaccggttatccagacgacaatagacgaacactgttctccataatgtcaggaacgtcaatggcttgtcctcacgcagcagctgcagcagcttatgtcaaatcattccatcctgattggtctccagccgcaatcaaatccgcccttatgacaacaggtaactaaaatcatcaaacaaaaaagctcaaagcgttctcaaaagtaaaagaaagtttcaatctttacacttcctttacagctactcctatgagaatcaaaggcaacgaagcagaattaagttacgggtcgggtcaaattaacccgagaagagcgattcacccgggtctagtctacgacatcacagaggacgcatacctaagattcctatgtaaagaagggtacaatagcacaagcatcggacttttaaccggcgataacagcaacaacactacgaagaaagaatacaattgtgagaatatcaagcgagggttaggttccgacgggttaaattatccgtcactgcacaagcaagtgaattctacggaagcgaaagtgtcggaagttttctatagaacagtgacgaatgtcggatacggaccatcgacctacgtggctagggtttgggcaccgaagggtttgagagttgaggttgtgcctaaggttatgagtttcgagaggcctaaagagaagaggaattttaaggttgtgattgatggagtttgggatgagacaatgaaagggattgtgtctgcttctgtggaatgggatgattcgagaggacatcttgtgagaagtccaattctgttgtttcgatcggataacgattaccgttaaaaaagacaagactgcttttttttagacccttgtttgtttgttttttgttttttagtgtttggttatgatttctatttctagtgttgttttttttctcctttttagtgttgaaataaataggaacatatacaataattctcccaaactttagtcgaattaaaacttgaatagtgttgttggagaaggaccaatctccaacaagttagtaaaaatgtctacaaaatttggacataaaaaactcatatgaagacaaggtttttgtaacgccggatccgagaaaagtgactgaaatgtttccaacaagtttggtgtaccattttcgaagaaagaaatatcagaaaagtgaattgagtagctttcaattttattttggaaccaaacaatcacaagaaagtgggtcaaacaaataacaaaaatgtcgactctgctatcataatagcaaagtgacataaaagccactctgaactcaaagctcacactaacacacaacctagaaaggcaatttatatatttgtggcgaaggaaaggccttccttagatagcacttcaaggctctcaacagaaggttgtgctcgtgcaagtttagcaattgcattgttctcttcaggacttccaccttctaaaaatgctccaaccactttccgttctttaatccagtagctcccgaatttcggctttggcgattccgggtcattgtccccaaacaatacgctttctccaacgttgtcaccgtagaattgccatgagagatcaaaggctcgagagtaaaagtatggaagatagtcatattccggaattgagttcccttcctcagccgccttgattgcctacaaaatcattatatcaatcgattcaattaggatgattttatacagctccttcattaagacaggttgaagaagcattataattattacctttacggcttgttcagcggatttgcgagcatggtcaacgtgttcaacgcgtctcatttcattgtagagtttcattgggaaggtggctacatcaccaatggcgtatacatctggaaggcttgttttgaagaacccatcagtctgcaatcaaagaaagatctcatgagtaaacaataataataagaactatatctcagatacagaagaaaatggagtatgcaagtcacaaaccttcaaaccacccttctcttcttcaacttgatctttgaagagtgatataattggtctaccaccgacacccactatcacaatatcagcttctaacgttcttccgtctttcaatttcacctcagtgacctgcatcattaagcaacagagagatattgttgaagcagcggagagaaaaactgctgtttgtcaagtttgaacggtgatgctaattgctaacctctccatttgagttggtagtgaaaccagatgcaacagtgcctttgacaatgttaattcctttgttggcatagtaaccctcgtagaaggaagcaatgccagcggtgaaaagccgaggcacttttcaaagacacaacaaaaaggaaaggtgttaagcaaagggaatacgatgagaattctatggtagtggtttggcttgtatcaacttactgcaccaaggttctggataaaccatggtaacgtcgaggttgttagccttcagagcagcaccgagttcaagaccgatgtaaccgccaccaacaaccacagcctttcctttttcctttgtttccattgcataagcaaggtaatcagcatcttcgagttctctcaggtagaatatattcttagcatctgcacctgggacgccaaaatctgacaaccttatgacctacacaatttaagaaattccttagaagagatgcaaaaagaaaaaagagactaaaaatggaaacttccaaagtaagaagtgcaaggatagattgtgctcacagaagaaccagttgcagctagcaaagtttggtacttgaagacttgtccagtcccactgacaagtgtcttcgcagcaagatctgctttgacaatctctgtgcccaaaatcagctcaatacctgcagaaacgacatatgagaatgaatgagagacattgagctaaaaaaacgcttaaagcacaaaaaaaaaggaaactcacctttctctttgtaccattgagggaactgtctctctcccccaattccagcagcaacatagaaattcggaagtgtagctttatctatataccataagaacaaacaaatctaattcagaaaccacgcacagactaaactaaatctccaaatgatgtagaatgaagtttttactttcgaggtggatatatcccttgctaagtgcaggacgctcatatggaggaacctaattaacaccaaaaaattgccaatactataaataacaagacaagaatctagcttaaatttagttccaagtcatgaaaacttacttgttccctggaaatgatagcaagttcaccaggcttgacaccttggttgaagaactctctcgccgcgtatccctgtgaatcacaacatcccaaaacaacaataaattgggaatctagttcctatcttcccgtaatcatagaaatcactagatctagcgatacaatctactctacttctcagagtgataaggatacaaatgagcagtagtacagtgtgatgattcgtaagcgaagagattgaggaaaaaaaacaaatccgatgaagaagaagaacagagagagacttacggcggcgacaccacctccgacgatcacatacttgaagctcttttcttctgccattgatgcgatcgaatcgtctctctttgatttgtcttttttccttttcttcgtctttttggatccgagaaatgtgattgggtcagaggtttttataggggactttgtccagtatagaaggaatctttaaacgtggcttaatttaaaccgttagatatcccgcttcgtgcacaaatcgaaatcgaaccgttacaagtcagcgtcttatatttttgacccggtcttatttaacacgtgacagatctggtcgatgtaaaacggacattcagatttaaaattccggtattactcggtttactgattacatttcactttcagtctttcatatttggagaattttatttacataccaattaccaagagaaaatatatgaaaggaatcataaatctagtgtcagcaaccactagtcaaattgatgaatatagtagaatatctttatggagttgttggttggttttaatttctttattagaccaatctgtagttttatgtatagtttaagactttaagtttaattcgattatttgtgtcagtgaatcatttccataatttatttggatataatgtaaagacagttaaaacaaggaccttatcttgatccctaaacccgatagtacaaaaaggatatgtatttactacactaatcatatgattttgtttgcataaacaaagatgaataaccttaagaccataaattatagtaattaatcaaactactaataatctaaatgatttatgtcgttatcttatgttttaagatctactacagtaaagaaagaaactacctagttttgtataattagtatattacaataacattaacatatgacctaatgtgaataagagtattacattaatagttttgagaggaaagatgatttggattttagtcaaaagaggagaaaaaattgtcaagaatgatgacctaaattccaaccagatagaatttccagaaattgggacctaaatattaatgatgtaatgtcactgtattaaagacctaaactattaatgatgtggaccttggcggcctaaaactcttccatgcctacaataatgagagtttcaaatccaatttaatgagaaaagaacagagatagggctgtactagaacactaatttaccggacgtatcaaaagtaccctattgattttgacatatgttaataagttaaaatgtactttgtattataattattccttatgattttgacatttgttaccaatcttcttggaagattagtaattagcactcgaatacaaagagtactatttttagtttactgcatgcatgattttgacatttgttactaaatcttcttggaagatgctaggatgacgaatacttcttacagtgacaagtgacaaccatgtagaagaaaggatctaaatgactgactaaattcatcggttacttttgttgtggttatagatattgacgggcttctgttaatgggccggtccgatctatcagatttcgaagaatacccacgaatagtttttatgaagtactcactttgttggatccatatacaatattacaaattattccaaaactcccaagtcaactgacctgttgttagaaataaattttcaaaaatgcgaacataactttcacttgtaccctagatgcagacttagtgctaagcacaagggctcaaatatttgaccataatgaaagatgttttaacttaatagtataaacttattagcaagtcaagaaaaggtcaacgttactatttagaagaccgatattaatatagggtatgtgataatttgcaattgttacattattcacgtattaagttacttaaattttgttgacacttttacgtgcggatgtgattcacataaagctttattatttcggtatgagagtattgagtattctatgttctacctaaaaaaacatggtgacaaccctaattaatatacaaagtttactaaattatttgttgtggtccatatcttcctgaatttgcgaacattttaaactttaagaatactttaaaatgctttaaaaatcagcttatctttaagaaaactagtaaaaatttcaataagttaatgttattttaacttttgaatattcaagagagaaacattataatttccctcgagcgaagtgatatgtagtaaattatacttctagggttatagtgatgaaagaccagcattattgtcaaaatgtacattaggtccatcattatcacctttttcttaagttttgatcattttcttacctaatatatacatgaatcacacaattctggaaaaacaatcttcttgccaaacaaaaaatctggagttttcattgaaaagtgacatggttcataataatctactaaaacaagattaaactcttgtgcttaagagttaaaatttcgaagacacttgtcaacggaaaaatcagtagtgatcaacatgtcaatatagtctccatcgaattgaacaaaaatatttaataatctcgttcttacatgagacccacaaacatatgaatatgggtcccatgatttgttcttcaaactgcccagaaaaatgcagaatccttttgaaacctcttcaaaaatataccgacaaaaaaccccaacaaacataaagatagaagagacagaagcccaaacaacagcttttcttgtctctctgcttcgtcaataatctcttcaggtactgtcttactcttgatcatagatgattcatcatgatgaaactagagtttttcttttgttatgctttgttatgcgatagtacatgtctgcttaagaaaaaggtaacatcatagaaacacgactttgcataaagtttatattcatttttcttgtttcaaaaagattgaacttttgatttgacgatgattatgtttcatatgaaaaattctcacttttgaatttgacatgatctctgtggaactaaagacatgaacccattaatatcaaaagaaccatctgcagttgttacagtttgagatatgtgactgtttcataggtattgtgttgtgtggtatgttccttaatttttagtctctgatcaaaatatcttgttaataaagcattagtgattttttttctcccatattcctctgctctgctctgttttgctctgttcttataaatctgtgttctctttataattagaatttcatagttttgatgcactctttaacaagaaaaatcacataccttcctttaaactgtgaatataatttcaggtgcgtgtgggataaaaagatgtatctaccggtttagattactcgcatttccgcggttactaagatgctgtgtgactgagctttaatgttatgggttcatttgccggaaagtgtgaaatagttgaagaaaaagaagaccgtcaaaactcgattggttactcagcgaaatcaaccactattccacattctagatcaagcattgtcgacgacaaggatctggagcgaccggtactgaaattaggttacagaggttcactagaagatgacataaaccaacttttcgagtctataagcattcgaacatcaggaatgattccttcttaccaagttggtgcaactagtagcagtagaaacaacactcctttacaacggaatgctttgaagagtcccgcgaatcccgcaggacctcgatcgcctagcaagagaaatgcggaaccagcgacgttaaaacaagctttgagagatttatgcgtcactaaggcatcggaaaccgcagctaccaaacggattcctaagagtactagtactggaggctcagtttatggttcggttttggttgaaccgggaagtggagctagcgaagaagggaaagcggttcttgtcgagttactcggcgaggatcaaagcagttcatcggatagtatatcgcagcagcttcgtcttctgaagatacattcttctagccaaaactctcagacatcaaagcggtattgcgatgagatgacaatacttaaaaaacacaagaacctgtctcttgacgaccaagaaatgagtatcgagaacaagaacttcggttcatcatcgcccggatcaggaaacaacaagaccgtggttggactgaaatcagttagaaaagtgaggttgttgtatgccaatacaccgagttccaccatagttaacgggaagagagtggctaagttaaccagaaccattccaagaggaggaggagctaaacctgcactaaggaacaaaggttccatgaagaagaaggctacaaatgtgtatgatgaagtagatggcttctatgatcccattgcaaaggaacttctctgccatagatgccatttctctttgaagaacactgcagctaaggaagatccctctaaagattcacttgtagaaccacatgagatctgtgctaaagatgaattggcttctgatttctccagctcaagctatgagagctcgcatgagatcagtgctagtgcagagaccaaacttgataagataagaagctctctggatttgatgaattcagagacctctcacgtttctttaacatctgcattccgtaataagaacatcaaagatgtttctgaatacggcaacaatgagatcatggaggaagattctctatctggcaaagaagttgatcagaaagattctgtctttatgtcggaacagagcgtggagattggttctttcagtgagaaatctgttgtgatgaatccagatagtcctccaaacaaactcagtttaggcggagcagccattgaagatgtcaacgaaaactcagaaatcataaacaaaggcgacggatacaacagttcaaccacgagtatcagcgaggaagaagtacaacaacagagtaataatataatgacaaggtctagctttggaaacagacctcatatgtctaaggatgtgagatgggaagctattcagcatataagggcacaacacgggcttggttcattgggtcttaggcatttcaatcttctgaagaagctcggctgcggagatattggaacggtttatctcgctgagctcacgggaacaaactgtttgtttgctataaaagtgatggataatgaattcttggagagaaggaacaagatgtctagggctcaaactgagaaagatattctcaaaatgcttgatcacccgtttcttccaacgttatacgctcacttcacttcggataacttatcttgtttggtcatggaatgttgtccgggaggtgatttacatgtcttaaggcagaagcagcccggaaggtggtttcccgagccagcagctaggtaccttggttcttacgattagtggttaacttttttatgctttatgatttgtgatgttgtagttactaattgtttttgtcttataggttctatgtcgcggaggtgcttcttgcattggagtatttgcatatgctcggggtaatataccgagatttgaagcccgagaacattttggtacgtgatgatggacatatcatggtgacagattttgatctctctttgaggtgtaccgtgagcccaacgcttctaaactcatcatctccactccatgcggatgcaatgagactctcttcgggtagccgcactggatctaactgcatcgagccatcgtgtttccgccctaaactctcccgcggatcagggcccaagaaaaaaggcaaacaacaccgcatgatgatgaaaaaactcaagaaatctgacctaatcgcgcggttcaaatcattgccacagctcgtggcagaaccaacagatgcgagatcaaactcttttgttggaacacacgagtatctcgcgcccgagatcattaaaggagaaggtcacggtgctgcggttgactggtggacatttgggatctttctatatgagcttctttacgggaaaactccattcaaaggagctactaatgaggagactatagctaatgtggtgcttcagagcttgaagtttcctgataaccctaatgtgagtttccaagctaaggatcttataagaggtttgttggtcaaggaacctgagaaccggttagggacagagaaaggagcagcggagataaaacggcatgcgttcttcgaaggcttgaactgggcgttgatccggtgtgcgatcccgcctgagcttccggatttctatgactatggagttcctaatcaagaagggaaaagcaattacttagattgcaaggcagttggggaacatcttgagtttgagttattctagaggaagatgaagaagcttacgtattattacagcctttcatagaactcttgcttgtatcctaagttacagagtcactttttggtttattattatttgtttcatttttttaaagaagtattgttattttattttactttttgtcaactattgttatttggttttaaatatatataattttttccaaatagaaaattacctgacataaatagatattgtggatactttttttttttttttttgatattgtggatattgattgatataaattttgttttttgaaaatgttgtgatccatgtaatgtatagtctcttaaacttgaaaatctgctcagtgctgctcatatatatcttgaaattagagttcataacaaaacttttgccaagaattgttcttcctccaagcgtaatatataattatcaccgaagcatccactttcaatgtacgattaagagataaacaagagatactttgtcaattggttattggttaaaaaaaaaaagtaacgtacgtacgttaaagatctgtttatgtttttgtaacgcttagttgttgccatgtaagttgctgaggatatctcaaaacggtgaaatccaaacaaaaaacataaaaaaaaattcctttcattagattgttatcctacgttaacaatccaagccaactctgaattattttttatattcttaaacagaaaaatcaaaaatggaaataccatagaagagcaaatagacattacaaaaataaatcgtactgttgaatgtacataaaaaatttcttacgcgtaatgctatgatagcttggcgatggtctcgtgacgcaagatttttggtcatataaattttggaccgttaattttaaaaaccatataataaattaataatcatagaagaagaaaaagttaaaatggacgatgggaattgcaactcgggtggaccccactcagacactgatctttaagcaatcgcttcgtttcgatttcgcaatcacaaaagtagcaaaaatcgaaaataaaaaaaacttagtagcgaacgaacgaacccgcccactcatttagtttccagatttttcttccggatctctctgctctccgaatctcccgagttttttttttttaatttttgtttctcaccggcggcgagaggatatggtggtgattcacggagtgtctcttactccacgcttcactcttccttctcgacctctcaacactggctttaatgccggcaattccaccctctctttcttcttcaaaaagcaccctctctctcgtacgcctctttctctttctcttaatttgctgtgctctgtgacgccattgttgtaactgactgtaataattgatgattagcgagttcattcgtctattggactagcttcatgaactgtactgtcttttctttcgctggggaatacctcttgattagatccatgtctgtagggaagatctttgctgggaaacaatctgcggagtttgattcttcgtcacaagctatctctgcttctgagaaagtcttagtacctgataatcttgatgatgatcccagaggtttttcacaggtggatatcttttgtcatctctgctctttaatcagtgagttatatacaatgcataggcaaattgttagaggttgaaccttatgtgcattacatgaaaatatataaaaaaacaataatctcttcttttttgtagatatttgatctagaaagtcaaacaatggaatatactgaggcagtaagaacagaagaccaaacaatgaacgttgtcaaggagagaggggtgaaaccaagaatagttcccccaccgggtgatggcaagaaaatttatgagatagaccccatgttacgaacttacaacaatcatcttgattaccggtaagaatctttgtttcaagttgtttcgttattactatacctgcttgagacttattatgtaagcctctgagtcttatttattcaaggactattcttacaattgatgtacaagtttgtagcaaggcgagatgttgttttttacttttgattccggttatgtatcctgcatttttgttggctgcagttatggacagtataaaagattgcgtgaggaaatagacaagtatgagggtggtcttgaggcattctctcgtggctatgaaaagttaggattttcgcgcaggtaactatttgctaccacctatatagttctccagtagaataccaagtttaggctgtagtgtcacactgttttcatttcatcactagcatattatatgttttcctaatggtagttacattgctattacagtgatgccggtataacttatagagagtgggcgcctggagctaaggtttgtttcttttagttttccactagaaagttataagttcgttctagtaattccttcattcacgactgtagatagaatctttgcatttgctttatgctcacaaagtaaatattggtcatataacaagggtaggatattgtcctacagtcactatgtggtcgaaatactgtagcacctgtctcatgtaggagtagtgattggttttgcttatttaatactgaatgtaggaggtttagcatgttagtcgaatctttatggcaacctttatttcttgactgtatgtgtgtgcatattttacaactagtttggttgttttgctaacttctgccgtagtttggctgttttgctaacttctgccctcgcctgtttcaggctgcatcacttatcggagatttcaacaactggaattctaatgcagatatcatgactcgggtatggcctactgactactttgcgtaaatttcttatgcttggtatattcatttgagatttgaaatctactgaattctgaccaatgattctctcatcaaatctttgacagaatgaatttggtgtttgggagatctttttgcccaacaacactgatggttcgcctgcaattcctcatggctcacgtgtaaaggtaactaacaaggcgcttcattcattcattctgcttccaccaattatcacatgttttatcttaaagagatggtctcactggtgcaagcagtctatattatgcacagaaagatatgtttttctgctgcgtatgattaaaacttagttccagcatcagccatcagatatagaaaagagagaaacctttgattgttctggtcatctgcttaggaatccaaaaatgcatattgtatctacactgccttaacaaatattctgcttatcatttatgtacatgtggataatattgctatgagttacacagatatttggttagaagcttctgagaatattatgtaatgacgatgaagtaatttcttatgcacaaaactccagattcgtatggatactccatctggcattaaagactcaattcctgcttggatcaagttctcggtgcaagctccaggtgaaatcccattcaatggcatatactatgatcctccagaagaggtaaggctctacagtcttttgaataattatcttgtggaaaacaattgtgccagtgctagtctgaaatttttgaagatttagatttctcgataagttttctcagtcaattccatttaatatatgcttacaatttaatataaaaacatcaacatatacttttgcttgcccttcaacggttccaaatttctttttaggagaagtatgtattcaaacatcctcaaccaaagagacctaagtcgctaaggatttatgaagcacatgttggcatgagtagcacggtgtgtgtctggctccttgtcttaaataattatgttttggtccttaacatctgtgtaccaagcttctttataacgtatcaatatgccacactgttggtttgttcagtatgtttgtttgactataataacatagatcccaatttctggatatttctctatatcacgtgaataatgtcagtgtacttgttatgcaggaaccaatggtcaatacgtatgctaactttagagatgatgttcttccccgcatcaaaaagcttggatataatgctgttcaaattatggccatacaagaacattcatattatgccagctttgggtattcttttaaccttagtgagctctagtagaaccctagatatttgcatttaattattgttgcagaactatacgcttttaggcctttgtaccatgatgctagctgtatcttcaagcaactagtagtatagatatctcaattcttattggtttttcttactgaggaacatggccatttctattatgaatgcaggtaccatgtcacaaacttttttgccccaagcagtcgctgtgggaccccagaggaactaaaatcactgatagatagagctcacgagttaggcctggtagttctgatggatatcgttcataggtagtgaaggtttacatgaaagcaaacaatgagatccaccttttggtcatttacaagtcattgaatcttccgactctctaacctgtgcagccatgcttcaaaaaacacattggatggactgaacatgtttgatggaactgatgctcactattttcactctggacctcggggataccattggatgtgggattcacgacttttcaattatgggagctgggaagtatgtaactttttcgtgaattttaatcgaaaatgtagtgaacatacaacttccttaagcactatcagttccaacagtctcttttgatcttttctaacaggtattacgatatctcctttcaaatgcacggtggtggctagaagaatacaagtttgatggatttagatttgatggtgtaacctcaatgatgtatactcatcatggactctcggtacttcaaacttttctacaatggatggctaatgcaatctttatgtttttcccatctttccaatgttgtatcagctttaagtatatcttaggtcggtctgctgaccttctattttgtgggttttggataggttggatttactgggaactacaccgaatactttggattggaaactgatgtggatgctgtgaattatctcatgctggttaatgatatgattcatgggctctaccctgaagcgattaccgttggtgaagatgtaagttttctgattggctaaataaaaaagtgctctacagaaccataagggatacatattgtgtatcatattaaagatagtccaaaaccaaattagtgtgaactgacaagagaaagttagtatatattttttggtgatctatgctaataaaatcgtttcatttcaggttagtggtatgccaacattctgtattcctgtccaagatggtggcgttggatttgactaccgtttacacatggccatagctgataagtggatagaaatgctcaagtgagtgttttctgcattttcttttaagttccatctgctttaatatttggtgaaataagtgtcttactctcctccatgttatgctgtgaaggaagagagatgaagactggcaaatgggcgacatcatttacacacttaccaacagaaggtggtcagagaagtgtatctcttatgctgaaagtcacgatcaagctcttgttggtgataaaacaattgccttctggttaatggacaaggtatagatagattagacaccgttttacattaaactcattattaaaagttatgtgagcggtgttgttcgggttccaggatatgtatgatttcatggcagtagacagaccatcaactcctcttatcgatagaggaatagctttgcacaaaatgattaggcttataactatgggattaggcggtgaaggttacttaaattttatgggaaacgaattcggacatccaggtactaaatcgatttaagcttgtttcatttactttctgtgcaaaaattttgagtgtacaatttcttcatctactcctgcaatattcagaatggattgattttcccagaggcgagcagcgtctttctgatggtagcgtgattcctggcaacaatttcagttatgacaaatgccgccgcagatttgatcttgtaagttcttacaatttggctgagtacaacattactcaagatatttttctgtgtattctgattcagaatagttcatatatagggggatgcagattatctcagataccgcggactacaagaatttgatcaggcaatgcaacatcttgaagagaattacggtgtaagtctccaagttaaaacctttgtagatgatctcagttacccattagctttattcttattttacatttgagcagtttatgacttcggagcaccaattcatatcacgaaaagacgaagcagatagagtaatcgtattcgaaagaggtgatctcgtctttgtctttaactttcactggaccagcagctactttgattaccgcattggttgctccaagcctggaaaatataaggtataatacacatctaactcttccttttcaaacactggagactttggtattggttgtgaagatagaatccgatatctttctacatttcgacattccagatcgtattggactcggacgatcctctctttggtggattcaataggctcgatcgcaaggcagagtacttcacttatgtaagaaaaataaaaccattctagtcaaagtttacattaattgtgactgttccaatctcttgaccaatcgtgccaatgcaggatggcttatacgacgaacgaccctgctccttcatggtctatgcaccgtgtagaaccgccgtggtttatgctttagcaaaccacgattagaactttcagactttggatccaatatcataatcaaggaagagtgtgtgaaaaaatgtttttccttcattagagtgaagtaaagaatctggtaacgaaaaaaatgtctgtgtatacaagatcaccgaaaatgtaaagaatctggtaatggaaaatatctaaaacattaaaccagaaatgtagcacttgattaaaaaccaattacaacaaccgaaataaaccgataataaacgccagctggccggtcttggaaatggataaacaaccgaaataaaccgatgtatgccaccaagcataattgcaacggtataatgcttcaaacaaataaatcaaactaaaaaggtatcacaacaacttttgattatgatcccactaataatagtattgttgtaaatctaaaatttcaaaggttttcaaaaagggatcatcttcataagataccggtttaatttgatttggttgcgatgaataaatccggttaagacaccagtcacgctcctttcgcttccattattaggaacaagaaatccaacggtcatcgtagagcgcatcagataaacggctaaaaagcaaattctctggaagaagaagaagacgaagatgcaaccgacagagacgtcgcagccggcgccgtcggatcaaggccgccggcttaaggatcagttatcggagagtatgagcttcagtagccaaatgaagaaggaagacgatgagttgtcgatgaaagctttgtcggcgttcaaggccaaagaagaggagatcgagaagaagaagatggagatcagagaaagagttcaagctcagcttggtcgtgttgaagatgagtccaagcgtctcgctatgattcgcgaggtttgatttcgaatacattatttcaattcgagttttggtgtgattcacttgctgctttaagttttgttgtagtgtatattaggtcaaattcctatggcttatagtgactaaaagggaaaaaaattcaacctcttttaagatttagtagttgagtgttctaaaattagaaagctggatttggtcttatttagggttttttaatatttaggttctagatttgtggaactttttagaaatttagagcatgatttgtgttctaagatgagctctgtgtcatgatctaaacccgattgggaaaagaagaagctatgaatcaagctctgaactgaatttgtggtgatgtatgtttggtgtattcaggaacttgaaggttttgctgatcccatgaggaaggaagttactatggtgaggaagaagattgattctctcgacaaagaattaaagccattggggaatacagttcagaaaaaggtttgtggtttgctattgagaattgtaatgcttcatatatgtaattaggcaccgcgttttgagataaattgctttactgtttatggatgatgaagatatatgtatagattggacccattttataccgacttgatactgaataattttcagaatgtgttcaggagtcttattattcaaagccgtttttttcaaaatgtgcaggaaacagagtacaaggatgctcttgaagcattcaatgaaaagaacaaggagaaggtggagctgatcaccaagctacaggaggtttgttcaatatgatctcacttctctctctacaatttccaagtagtatttcgtatttgaatgaacgttatggatggtctgcgtttggtcctacaaattggtgtgttgtctatcaaactaatcgtgtttaagctgtagggcatataaattttaccattacctttgtttagaaccttacaaaattaggtaaagacattggtcccgtagttttgttccaagacttgggaaagactcccattgcaataggtgaagtcatcttaccgagttttggaatccagtctgcaagtttgtcattttaatagttaatttcttgactctaaaacgggtttcacaatttgtgaaaagtgaagtcagtgtgagactctagatcaggactttccatgtttgggtgcttggaaattattttctccaaactagatccaacgcattatcttagcacctctatttcgcaagtgagatatccgaaagaacaatcatgcgtttttgcatgtcgtgtctgtaattgcactatatcctgtatattccattgcaacgcttgtactatgtggtgagcctgctagatcaaaagtgttgtttatattcactatgatcgtgttcttatgacagtattgagacagagagacttaatgtacttctcttcttttttgatgaatgcgcgcagttggagggagaaagcgagaaattcaggttcaagaagctggaggagctaagcaagaacattgatctaaccaaaccttagtgttggacgagcagagtcgctgggatttggctattcaaagttctaaaaaagtcactttttagagtattttcattgttcttttatgattctagtaatatatataatttataaaataaaaagtaagaagatatgtgtttgaactagatgttgcaaagaaaatgtaacaaagttacgatggcactacattatcgacgtgattggcagaattgtaatagtaatgtaaagaaactatgtttgttccggagcattttcgtacatgattatatcatcagccatttcaaatctctctaataatatgtttaaggccacaatgaaaattttgacttgaaaatttgagctataaatgtgaaatcaaactgatgagcttgatagaccaagttaatagagaacatagatatacactagaatcaagtgaagagagtagtgcattatccctttcaattacttcagaaaagaaaaaaatctcattcccttccaattatgttatatgtaaccaatcaaatattaatttgcagacgaatccttaactaacaaacttgtccgataaagccaaaatattaatatgctatgtcttcttgtaagaatatgaatctgctatgggatttaaaatttagaccaattttttttaatataaaaacaaaatagaattcagaggaaaatggaataatcaaaaggtttggtttggtggaataattaacgaggtttccttgtatgatcatctctcacattattatattgaaagtgcatgcatctagaataaatcaataattaatcattacttagcacatctacagtgttccaagtttaaaacctatccattaggagatatctctcagaacacatacttctcatattcctctattatttccctaaatctttttttttgaagtttttatttccataaattttatgtaatgctttaatttttatctttttaaaacgtctaacttttattattaacgttgatcgtaagtttcatgatcttgaaataacaaatcgttaatacatcaaggaagattaaaaaaacaatattggaaaaatacgttcttaattgtgtgcaattttcgcaaaccgatcggcgacttgattagcttttgttggagaatagttgaatttcaataatcttgtgaacaaagcttgtcatctgtgaaatgttgatatggcctagaatagtctccaaatatatatttatgcattttcctttgacgagtcaataagagtcattttacaatctccttgcatgctttgttttgttttgtatgttccttcgccgaaatggtggagacattagtattgtcaccgtcttttactcagatcaaaattctgcgtaaatttattatgtgtgtcagtgtgtgtgttctaagtggtgacatgaatcggtgccgccgtgccgcaatagttcgtatatgtttctgttttaattaaagaaatttgtatgttaattcgatacattttcctataacgagatgttcgtgaatgagtgtaaaatataaacgtaccggtcgtgcgtgagcatggaggaaagctacaaatcgagcgacacgatccaagtttaagatacatacggagacatattgtctcgcaaaaagtcaaagtcacaaactttctaattggacctaaataaatttcctgtttcaataattcatatgtatctaataaataggttggtgtacatatatattttagctattattgaatcctctacataaaatgtattgggacatgcttctttcactctgcccatatctcttcaatatctcatcggttcacatgaatagccgtatacgtacaaatacaattcaattgattaatagaagtacacgtctacgtatatattagcatatccaacatcatttatgcatggtttttatattgctcatattgatttcttgtctgtttccttattttcttcatataaaataacaaagcatttccttggaagcttctcaaataaacataaaatcctgaaattacgaaagttaatatttaaaaagatgtataattgtataccaaattaattagtgaaacatgcacccatgcaaatattttaaaatatatataagaaattcgtggacatctctgtaataagtcacactcacactgtcacacgttacatatataattgggacactcacatatatatatatatatatatatatatctacatggaacctgagctttgtaaaagaaaagaggttaaattatgtggattccaaaatttgccaatttggtaaccttgctcatataaatacatatcaaattctgtgtcaaatatttttcattttggttataaattaacgttgaataactacagaatatatatttgtccaaaaaaaggagatatttgtagtggagttttattgttccgtcctctattttaatcgaatgcattcaaattacaatataggcttattgaaacgaacaaaattacacaaataatttgtggaaaagaaaaaaaaaaaaaaaaaaagacgaaacgcgaaaaaagaatccaatgagcgaaacggccacgtcatcaaaccgcgagtcgggggcgtccataacaagccgttgaacaaatcgccgaccttattgacacgtggcgttatattgtgaaacacacgtgtgcctggacgcacacgaagattgtccttaagttatgtgacggtgctcactaaacaagagcgaaagaacaaaaataaaaaatatgagccccactttgattttctaatattcacgaatcgatgttattgtctcctcatgtctttataagtacaatactttaaaaattaattactactttactttgtgaaaaactgtacttattaatataactaacttctgattttaaaattagatagtacaattgtactaaaaaatatatttagaatttacctcgcatcaaaaaataaattccatagtctttaaacgtgagtcaattcactgttttttattattcaatagtatgtattcagatcttaacaaactcggtaaaaattagtatataatgtaataatgttattttgacaaatgagtagaaacttttactaatgccatgttaatatgttacgatgtcacgatttgacatgctaaatatttttaaaaatctaatacaatacatagtagaaaaatatttggttgatgataaaacatacaaaatataaaaatatgaatatgatacaacattttttctgaattacagaaggtcatttgtattatgcttctaattaataacgggaggctggagatacagtcagaccgaatacatgtatatttccaactggactaatatgtattatttataatttaatttgaatggtctttatattaaaacatgttccatgctaatacaaaaaacatccgatgatgatcaaatcataactttcgaaagaaaaaaaatgttctaacaatacatcttttcggccaatctatatatcttaaatatcagttcgattattcatatcaaaaatcatgctaactggtatttaattacccggtccatccctaatacaaacacgactaaattaatcatgtgattagacaaataattgagaacccaaagcatcttaagaaaataaataacgtttgacaaaagaataacaatataaaattgggtatgtcctaagtttgtcttgatatatgaaaacaataagaatattgagatactaaaaacaccaaccactagaagcgccaacctttacctaaatacaaaggtgactaagactaacctctaattttataactaattcattagttcttgagataaaagaagaagaaatattgtttgttaaattaaaggcttacttgagagctgagataagcttaagatctagtatttattgtattcattattttcctttgagacgttgtcggaatttaattaaaacgtatccaccatccttaattaatgggatcgtgtaattaaaatccatagttccctaccactccgatcatttcacatattaatatttgctcaacaaaatatacagtataatttttagctcatagtttctttgtggtcatagctttcaatgataaatagttaaatacgacaatatattccagaacaaagtaaatttttagcccatagtgtattttccatcttgtttattctgtaatttctttcaattcacttttattgaaaatcataaattcataataactgtttacgaacactgctatgattaatgataagttgctttctagtaaagtgtcccaatcatagaaatgtctttttcattgccagttaagcacaataatcagaattttttttgttaaacaaaactagaaatgtctatgtctatcctatatatctacatgtaatttaaaatataaatttataccttttggtatagccaaatacatataatgttattcccatactcattaatcattcaagtttgattatcatatcccaaaaaaaaaaaaaaaggttgtgatcgtgacctactctaaaagttgaccatcacgccaataaagatatagtggctgaagttacaaaacatttttatgtttttcctacgttattcatagaaagtaatcgacgttaacatttcttgaacactcccaattcactggtatggtcctcatggacatagacaatatttttgatctatgtcacaaaaacactaaatcgccaaggcctgattaattcgtaacagttatcatggaaacaatagttagattaagcctttaacaaacaaaataaaaacaaagttagaattctgcattaaaaaaaaaaaattttaaacaagtataactggaccatttattagttacctttgtgactattaatttggggataattagtttataagaaaaaaagaattaaaaactcactttttaggtggctgtgtgacattaggaatctcttttgaggaaagatcattagtttccatcattatccacaacatctttagcttttgctaatgatttttatataacaatacatatatactttcagaatataaatgtgaaaaaatcaaatggttttatcatttaagccgtctaaaatgcttaataataacaattaaaatcacaacgagaatacgtttaactcaagtctggagtctggacccatgaaacaaatcttactatacaatgaagtgctatttttctaatatatatgacaaattttattttcggcctaggattctctcaacttgtaattcttttttctttttgtttatgggatgggaattcgcttaattcagatttccttgggtaattaaacgtgttattgtcacaattttatgagtattcaagcgaatctaaaagaccattatgaaaagctggaccatttcacgcatacccaatgactccatacagtaaaaaggaattttaacttaagaatacacgcaacgtttcgatttagatatgcaagaaaaatattgtaacagcagaaaatttgatttgtttctgttttttccgcattttattttgtttgcaatgaaatttaaggaacagtaaagagaacaaaattatgattctgcaaagctgtttgattggaaaacaattgtgaattacataatgatttacttttcgtcattccattcctgggattctgctcagtcaaaacattttaaacaatatcgatgtatctgtttaatataattttctataaaaaaacactcttactcaaaaaaaaaaaaaaactaagacattattttgaaaaaatctttaaccaaaagtttcattttgaaaaaaaatcatccagataaattcgattttattagagaaaccccacaccaccactagctagaagcagaaagtgattgaaggaaataaaggggggcacgcgttgctctgacctcaatatatatctgggaactatatgaggaaataactgtaatcaactttattagaattaccattctcagaaacacaatcataattacttcttttcaaaagacagaagttacaaaaaggttttgtattttaaattaaagttgatgtatatgtggagtaaccaatcaaatgaaaatatgaaagctatcaaatgttgtaccatgtcctttttttctggccaatctctacacacgagaagcactgtaaatacctatttttaaaaattattttcgttacgttcaaattgtaaattttgaattcccccttgcagaaaattgcttcatgtgattgttgtgtctgtgtataatgtatatgacgctatagttcgtcccatttatcaagaagttaattatttgatccataagtttttcggactacagaccaaaacatattgttatttttcttactaattgttatcatccctctcaaaaagatgagattcaagtttttgttgccagagagttttgcaactctataaaacaacagaaaattcaataattcatgtgaagtctcattgtcatttgaaattgcaaaccttttctttttttcgtcttttgcaaatggtaattcactgagactaaccatgtcatgtggtaacttaaatacaatcattgatgattttgaaaaagatttcgtaattaatatgaaagtggtgagaaaaagggtcgtcaaaaaagtaaatggagtcaaaatccagttcctataataaattgggcatgcgtgtttctctcttttgtcgttttatatttcaatttctcacgagtttttttaaattaaaccctaattttttactctttacttctttgagatcgtcaacgcttttgtcctttgaaggaaaaataatagtttcacagaaatgtgaaagttgaaaacaactattcgatgctattattgaaataagcgctcgttatgatttacaattttcattttctacttctgtaaaatatatgaagatggatataaaaagaaaactcttgagtgactcacaataacgttgagattaatgactgcgtttataaagatctttttaaaatgatgtttacacttcttctttctttttttcacaattttacacttctaatgtaggaatcatatttgttttgtctgattaaatatagtttaatatatgtaaattaagtaagaacatcaatgaacattaaacatagaaaatattaacaaagagcagttaactatcaaggggaccaatttgattaaagaaattattttttgttcccattagaaattggcaataacgttgaggttgttctctcaaattaaaaaaaaaatattttctattttgttggtgtgctcttaaattccccattgttacattgaggttgccctctaaattttaaaatattttattttttttgttggtgtgcccttaaatcacccattacacaacaaacaaaaaaagagactaaccaaaaaataattttataattaattttgtttcttcctacctacaagtatttacttaaccattgcctcgatcttttaaaccatccacattttttgaatcaccatcaacatctttctctcttctttttcttctctctatctgagtccagaaacattcacattaattacaaactgaaaaaacattgaaacttttgaataaactcacgagaagtactctgttttctcttcttactctgtttcttgttgatacaatggcgtctcagagacatttaaaagatcttcttgaagaagatcaagaaccgtttcagcttcaaagttacatctcagaccgacgttgccaaatcaatgctcacgtaacgcatttacaggtcaagaaacgcagacccatctctcaaaacgctggacttccctcgcgtttctgccgcaacgcttgtttcttctctctccgtgaatctcctgacccgaaaaagtctccactcttcgaactcaagtcaccaaatcggagccaaaacgcgattttcgtcaatataccggcgagaactgcttccattctactagaagctgcggttaggatacagaaacagagttcagaagtgtctaaaacaagaacacgaaacgcaggaaacgcgtttggtatatttgggtcagttctaaagaagctaacgaaccggaagaaacgcgaaatcagcggcggcaaagaagctggtcgcgtttcttcctcttctgttaaagatatgttgagatgggaatctccggttgtacgtaaaatagtcacaagaaaatccaaacgtaacgaagaagaaaacgcttcttcccaaacgcataaaatcgcgtctgaaacgcatttctcacggaggtcaagtagtagtggtgtttggtcagagagtgttacgaacggagagagatcttgggacgttgatttcgaaacgtcgattagcaccagcagccgatctaacggttcagatgagtttgcgatgatgatgaacggtcaagatttatcggaagataaacgtttttgtgaaagcccgtttcattttgttctccaaacaatgccatcaaacggcggtttcagaacgccgaatttctcatcgcctgcggcttctccacgccacgattgtcatgaggtttgtctctttctacaaattaattatttaataatgattacattattgatcatactcgttagttagaaattgaaaaaaaaataccccgaaaataattgatgtacataataatcattaatatgatacttaaatttgaaaatacaaaactatagatgtttccaaaaattgtgtatagaagtttaattaatgacttagtttgactcgtttgaattagtgacaaagtaagaatgattagtaaatgacacgaatacccctcaaacttaaggtttggttgttttcgaagatgcaaaaacagttgaagacaaatgtaattttcgtcttttcgaaaatgaactcagccttttgtgctgttgaaaacaaagttgatctctgtttctgacatgcaaatcttactctcttgtttttgtgtttttggtttttgtctaccaaaaattatttagcaatagagtccaaaatatttgtctttgtctgtgtattctaactcaatcagtcaaattagcagctaagctgaagttgaattattcgatcctaaagtacttcattatgtgtaaaacagatggaaaaagagagttatgaagtagagaagctaaagaaactagaaatggaggaagaggaagaagaaaaagaacagagcagcccagtatcagttttggaccctccatttcaggacgatgacgaagacattcacatggatgacaataacatcccttccagcttcagatctgtacaaagtacgttttcgaaccactcttttgtctctaaagttctcccaactttttttcatttaattccatcttactcttaccaaactattgattcctctttaaatggttataaaactgttgtacggttgatctgttttcgaagcagaacagtagcatgttcgtgcacgaatagtgtttttgttataatgtctctcagtgacgttttacatgttattagtgcacgcatatagtgtttgttataaagtatctcactgacattttataaagtattttggttgaaaaatcttgtgactagtgtattagatttgggaatgttttctttttgttaaattggtacatttcctattctcatatttatgtaaagaatttgcaagttaaattagggttttgaatgaatgaaaaaacatattaaaacatattgaattctgacaagttcgatcgtttgataatattatactaatgtttatttttgggtctgaatttacagaagcaaagcatctgctactacagaagctttgtagattcgagcaacttgcgggtttagatcccatggaactcgagaaacgaatgtcggatcaagagaccgaggaggaggaggaggaggaagaagaagagatgaaaagtctttatcattgtgagattataactcagagagttcttaaaacatactttgaagagatggtagaagttccggaaggcgtagaagcattgatctcagaccttgcagcagaggaattgccaagcgacatcgacggtgaagctgaagccgcgattgtagccaaaagggtatgcgagagattgagatcttggagagatgtggagtcaaacacaatcgatatgatggtcgaacatgatttcagaacagagagattgggattatggagatcaaagaacgacgcagatgtctcagagacggttttggatatcgagtttgagatttttgaggatttggttgaagaattatcagaagacattggcggaaaccggtgatcgataacatacgattctatattcgggtagcttccgtcgcaagtaatgacaaactaacctgcgttgtttagatggatggtgggttcaggggtgtatgtaaaagttttggttgatgagagtattaagatttgtgtaattccttatgagaactgagaaattcataggatcagtgaagttctctaaactctcggatcgggttctcgagttgggtcgaggctctctgattcggtagttgtacaattagagggatacaaatcgaatttatttcacatgaattattattagttctaactaaatgggtaagtgggtgcgaagcaaatccgttatgagccgaagaaaatgcattggacttttaagcccactaggcccaacagttttcgtttatagtaatttccttcctttcacccaaaaaatctcataagaaatgtataacacattaggctataaaaaatacaaaaaatttgggaccaaaaaaggatcaaaggaaaagaacactgttggttgagccaatagccaatgatattactattattacacaatatttttccatgacaggaatttttcagatcgatgtccaaagtaattcgtgtggtccattgttgtcagattaaaactccaaccaatttaaatcataattgtcaagcacgtggatctttcattagatcatacacgaaataaaacttggatacaaattaacaattggtttgatgattagtttcgcgtaagcaactgatttccactaattcttcgtctctaatgctaatgcaaatgtgaacgtgaatgttttctattaagaaagtttttttttcgggaacaatggaacatattgaaaatatctcttatttctttatggttcatgatttgcacttggtcagtgatattttttgcattctagttccaggcataaagagaacacgtctttgttactctttctaagatttaatataattaattagtcaaaaggtgtatttaaatcaactatagttctcatgtttaaatactacataatctttttgaaaaagacatctccactattattttcctctttcgtcgttgacacctcggttaacgtttcccttttccgaaataaaagttcaaagaatcaagttcactcctagtttccatttcaagaagaaaaaaaacctaatttcattaaaattatatggcaatgatttttttaaaaagttatgaataaaaatatatttacataccgttgccaatgtatgacgaacataaacaaaaataaatattaaaaaagaattacgattagctattacgtgactctttttagatttaaaaacacacaaaaaatagtcatctagaagttttttcagaaatgcattttgttatgttgcataagcatatataatagactgttcaagcgttgctatgtggttgtaattgtaacaaataattgaaaatatataatagaataattagtggtgaggataaccatcggggttatgaatattagagattgcccgtgaatggggtcacggtctatcattccctaacggtcccccgacaccacatcgaaaccaaaatatttttaatctctaataattaatcgaccaacctttgattccataagctcttacttccaagattaatattagtagtctcaaaataatatactttgtttttctctttgtgtagttctttttttttttttttgtgtagttcttttcttaattactagtacatgttttgtcgtttgtgttacgccgctatgatatttagttacgaaaaaaagatggtaaaagtttagacatcaataatcacaaagtttatcattaatcatcaaatgtatatatgatttttttttgtaatcttccacttggtttattaaataaaaaaataataataccctataagaatttagattagtgtatgttttattgacaaatcttaacaagatctataaaaggaaaacaaattcaaaaaggcaatgaaaaagaggggtatgctttcatacacatttgtacatactgttaaattaaaattcaaattttttgagatagctttctccttttttataatttcaacgttttaccttttgaatcagcactaatccttttctatgaaatcactttttttttgttggtcatatagagcttctccacctaattctcaaggtcgatgttaatgggagaccctgtttaatcttcttgttttatacgtaaaaaccagaaagaaacttatttgatgaaaaagttcaaatactcaagattacaagataatcaattggatttgggttttggatattagtggtgagttcgattttcatttggaagagataaatggtttccgagaaaaaaagtatggacttgaactttggttcaaaactctttgagtaattctaatatatttccaccatttagcatagtgactcaaatttattgaaaaaatttagcgatactagaacagtagaactactatgtctcttactaatttatctccaactagttataagtaattaaaaatgattagaagaagacaatattgggtgcaacgaaaacaaaattcacatgaacatcatatttttgttattataatttgtgtccataaccaaaacaaaaaggctgcaaagctcaatccaattcgatatgctgattttctgttccagtcgtgtcatttttctttccgtgctgcgaaacttatgataccaaatttttatttttattttgttaccttagtaagttagtatagtgctgcaaaactcaatccaacttttcatttacaaattttcaccaatttagaaagtgctcgaaatcaactaaaatcatactacgtaacacaaatattaaagtattatttatagactattggaaaggcattaacattcggaaattatatactcaccgagtgtgaaatcatttaacttgtgatactaaattgtgtatataatctatactttcaaggttcccaaatgcatgcatccgtcgtttcaaaccttccatcaacatgggccttcgcactataaaaacctttttttttttttttccaacttgattttttttgttgaaaagaaattctaataagaaaacgcaaaactaaaaattaaggaaaaagcctaaaatatcaaaatccagctggtgggtgtgaccccacattcttatcgacatccatcaatgtacccctcttatcaaacatcgattataagcctatacaatttgtatttacctttccaaaatttatagtactccattcgattgaaattaagctaatacaacatatgatttagacttaagtttttgtttatgtagatagatgttctacaacattctcatatgtagatttacttaataactatacctctccattttataagatgttttgggtgaatatgcgagattgtataacttatttctatatttttctgtttgaactgtttttatcaatacttattattcctacagagataaaaactgttcaagcaggattttttttgtagaaacaagctttcaatataatggaaccttatacaaagcaatatataaatttaaaccctaattaagcaaaaataaacaaaacaaactataaatcttatggaaatttggggaagggctgtcataatcgatcgttccatgatttacgacatgtgcattgaagaagcaagagattaggcaattcgattgctgcaggctgctgcaaaacctgatatgcgtattttatggtctttcctgcaattgattcttacacacacacatattagtcttctagttcgtttgaattcagttagattctattattcggtataggaaaatgcgttaataaatacttccgctaacgtttttatttagataattctactaaaaaaacgaatgactgatatatatatgactctaaccaattccagcttttactctctctctttttgagagtttaaatatttttctttgttctacaaattataagtcccaacagcttttcgtggcagataccttaatataactcacaaattgtttttttttttttataacaagaaaaagaaaaatttaactcctacttcttcttacataaaagtgttcttattctactagcaaccaatctaaaataaataaaataactgttagatagcagtaatggtggaaattacaaaacactgtgtctgtacatatgaacacacgtatcatatgtgtacattgcatggatcaaacttctctacctacgtgaaaagcaagtcatcaggtctgaccactctgagtttcagacactctcattaatatttttcctctttaattatatattttcattgtttcttcaagaattacaaatacattttaagaattaattttctaatatatttgtcgggcttaagacaaaagactgagtgagcaagactgagattcttctgttcagcatgtttcccttattaagaactctcttcttctcttacagttactatacactgtccatgatttcatcactctctacgtactctctgcttttatttccatttttttttttttggtatttctgtaatcttaagaattgattgcgcatctctctttccacaccagttaacacctcgttatatatatatctttaggcagttgaaaaataaaatgtgactgtacatatatgttgcttttgtttgtcctttctaagaaattattacatcttcactttagtatttcgtttaaaataaaaatccaaatgatatcattacgtgtttgtcggcatctagctacctcatgtcaaatattaatcaagtaaaattaactactgattgttcgggaaataaaacccttctatattcatgatattttgtaccgtggtccacaacttttgtgagaagaatgtctttcagttttaaaatttaaaagttttaaacgatatgattgctgaggaatataatatactgattcatacacaactatggaaagatagatcttgtttagcaaattaaagatatagatcttcaatgatagaacaaaaatatattatataaaacagatcatggttgaggcaactttcccttttgtcaataaaaaccaaaggtagctttaaagaaaatcatgacattttcatataaaagaaagagaatcatagaatatattaaaatcccgatggctaatgttgtaatcgaagaaataacaactcagtataagtgaaagttgatcgtaagtcatattttggatgtgtcgttgataaaacttgcgttcgataaattttttgttaacaattgtactctcatagaaattctataaattttaattataatgaagtacgaaatttataatgaatgtaggtatactcggtgatgtacgaatgaataaaggccctaccgcatactattattattgttatataatttgaaaattatggcatgcatgtgtccataacatcgacccatcttagtagagttcagatttagtctcactttcgcgcaaaagcatgctacttcgcctctagccaatgtggaaattataggccacttcttgagcacttatcaacaaagttatgtgtacatataggtcgatgcggttaaaatataccaaatttaagttatttctagggtttgaaagcattcaagatatttaattttcattgttataattaatataccttctcatttttcctataaggtagtaattaaggatacatcatctgctcttaaatttgtgaacggaaagaggaccattcaaacccatgtgtgattatgggatcaagaagtttgtttaagtcctcagattatactcatagcatcaaagtcatgttatcgatcgggtgacacaagttcgagtgtaataccatactgtgtaggtaaccagattttcttactaatactaatacaaaatcaaaattgagttgttatgtaaaaattatagaggtgaatgatttctaattctttttgaattagattccttaaaatacaagaaaacaattttaaaaaaaaaacgaaaaagaagaagataagctaaggtgtcaattaatttggcggtgttgaaacaataaataggtaggtgacaaatgcaaaccctagctacttgtctatttgcccccaagccatggaagatgcaagttttttttttttttttttaaagattaaaattatgaaattagaagtttgaagagtagagtcgatattagataaacaaaagaaagcaatcggttaaacgttatcgtttgggacgtgtcttcttagggactgttgaagtctcccagctcaagtcaataaaaggtaaacttttaaagggtcctctaatagacggctatgaatgtgacacgtgtcttaagttcgtcatttttaagtaataaaatcttattattttttcctgcttttattctcataatcttggttctttcttcattagtccactgatttattttaccaactattttatcatggacataataaccaacttcataacttccgcctcactaaactctccaacatctattcaggaaattggacaggattatatattcggaacatcacggccaaacctgaccgtcaatcgttagaggatcttatgcgcatttggctaaaaattagttttgcagtgatgatgttgcttttattaaaatttgtacaaataacactctttgatcttattagtgtaatttaacaatcaactaaaaatgtttatctcgctttaaatttaatgtttgagttatggatataaaaattatttagtataaatttgaatttgaaacttttagttttctggaatgaatgtccgaacggtattatatattgagaagagattaaaaacttagtagtgaacattaggattgaagcaataaaagtgtcaaaaaggacactaaagccaaatggttagggattagacaggttgaaatgttggggagcataaaagccaataatttggtaattttcagaggacccccctcttattgcggccacttaattctatctaattttttctaataaattcacacacatgcctctggagttttagctttaaaagttctgtatgcagaagaaactttttaaagaaatacgaacctttaaaagctgaatcgcagatctaaaagtaaaacaaaaggtacatgactcggttaacctctaatggaatcgtcatatcaaatgttttggaaaattattggtttttaattagggtatatatagcttatagttcaagagatttacatatatagcggcatttctttctacaagaagtaggattaataaacttattaggttcacaaagtaaatcacacagtttataaaaaaaaaaaaaaatgttagaaaaaaacaaataaatatgttacccaataaaactaaatgaataattctataagcaaccttttgttttctgaaaaaggttgtaccaattatggagtcacatgtgcaaatcgcagtgcaattatcctcataagtcataacaaatccaaataacgaaatttatagtaataaattctacagagaaccaaaagacaagtactatatatcttccgataattatttaaaaaccctacaaatcttattagattttgaacataaaaccccaaaatccaaagacgagtgcctccatctattattgtctctaagtgagacaaaacctacattgatatgaatacatacacatcaatgcacacatgtagtcaaattatttgatagagataatgaaaactgagctagacacatgttgcaaaacacatacatacaaaatctcatacaaaaagatctgtatatctataattataaacatatctctctcatctctcactctctctctcgcccacacacattcaagaagaatataaagtgttattaagtcatgggaccatatcgtttctgtagcttacattcgacctttttcgtggactacacgatctgtctctctctcactctctctttctatctctaaaaataaaagcttcagtcttttttctctctttttttggaattaaaaggtttaacctttacctttttttcccttcactatcgataattgatcttctctttcggctgaatataaatctgaaaaaatggatcaagatcagcatcctcagtacggtataccggagctccggcagctcatgaaaggcggaggaaggacgactactacaacaccgtctacttcttctcattttccctctgatttcttcggttttaaccttgctccggtgcagccaccgccacaccgtcttcatcagttcactactgatcaagatatgggtttcttgccacgtggcatacatggattgggtggaggttcttcaacggctggaaataacagtaacttaaacgcgagtactagtggtggaggagttgggtttagtgggtttcttgacggtggtggtttcggcagcggagtaggaggagacggtggaggaactggaaggtggccgagacaagaaaccctaactctgttggaaattagatctcgtcttgatcataaattcaaagaagctaatcaaaaaggacctctttgggatgaagtttctaggtttgcttcacttctcctctctcgattttaccctaatttctctctctcatcatttttcttgtttttttaaaagcaattatataaaaaaagacactatatgcatatttctcaaatcaattcataccacaagagtttgattcattcatatataatgtctctagctagttttccttctcttttttcaagataatgtctcctagtttaaacgttgatcaataatttgaagaaaattaatgatatttgtaactaaaacactaagtcgtagcttccatcttcttaacaatttttttttcaaacgttgagtattttgttgttgttgttttggattttctttcagatttgaaaagatttgacctttcatacgctttcttgttaaaaattagacctttcaagtgaaaatcccgaagacaattttaatctttttttattcttgtattaataacaagaaagaatgtgacctcaacactcttcttgggttcctcaatttaaacttactttttcagctgatctatacagacgtatatatataaatgtgttaacattctcacgtatatacgcagacacacatattgatgtataaactatagagtggtcagtttcaaacaatttctttaggagttgttttgttttggtcaagagaatgaccagaccttggcagtttcagttaagacactatcaggtgctttaaaaacccaaaagggtaaaacataaacaagagtaaaacaaaaagatttattatcttctttgactttgatttttagttttctacttttctttttactgataacttctgattcatctttcttagcttctgaagatatgtaccctcttcttttgtgtaactgagcattgaaacatgttcttgtgataaactattagtccactagtaactaagtctcaaaaacagtcttggtccgaaagttaacaactgtatgttataagaagacaaactttatgtgtgtcactatcgaatctaatatttgcatgaaaatgaatatgaatatcttatcaattgttaatgattcaagctagtttcaagattagggcactgctccgaattcaatcaaacatgagctgatttagctactttctattcttatttcttttattattatattcttaaataggattatgtccgaggaacatggataccaaaggagtgggaagaaatgcagagagaagtttgagaatctgtacaaatactataggaagactaaagaaggcaaagccggaagacaagacggaaaacattacagatttttccggcagctcgaagcgctatacggggattctaataacttggtttcttgtcccaatcataacacgcagttcatgagcagtgctcttcatggtttccatactcaaaaccctatgaacgttactacaacaacgtccaacatccataacgttgatagtgttcatggttttcatcaaagccttagtctttctaacaactacaactcctccgagcttgagctgatgacttcctcttcggaagggaatgattctagtagtagaaggaaaaagaggagttggaaagcgaagataaaggagttcattgatacgaacatgaaaaggttgatagagaggcaagatgtttggcttgagaagttgacaaaggttattgaagacaaagaggaacaacggatgatgaaagaagaggaatggaggaagattgaagctgcaaggattgataaagagcatttgttttgggctaaagagagggcgaggatggaagctagggatgttgcggtgattgaggcattgcaatacttgacaggaaagccattgataaagccgctgtgttcatccccggaagagaggacaaatggtaataatgagatccgaaacaatagtgagacacagaatgagaatggaagcgatcaaacgatgactaacaatgtttgtgttaaaggaagtagtagctgctggggtgagcaagagattttaaagcttatggagataagaacgagcatggactcgacctttcaagagatattaggagggtgctcggatgagtttctatgggaggaaatcgcagcgaagttgattcagttagggtttgatcagagaagtgccttattatgcaaggaaaagtgggaatggataagcaatggaatgaggaaagaaaagaagcaaatcaacaagaaaagaaaggataattcgtccagctgcggcgtgtactacccgagaaacgaagaaaatccaatctacaataatcgagaaagtggatataatgataatgatccgcatcaaatcaacgaacaaggcaatgtaggttcttcaacatcaaacgcaaacgcaaacgcaaacgtaaccactggaaatccgagcggtgcaatggctgctagtacaaactgcttcccgttcttcatgggagatggagatcagaatttgtgggagagttatggtttgaggctcagtaaagaagagaatcagtaagtaatttctcttaatgaagaagaagaaggtaatcatgtggttaactaattcttttgagttagctatatatgagataaaccttgacttagctattatatgtcacatgctgcttagaattaagaaatatttgttggggcttaacgaattatatatcagcatatataagatgagagtctaagaattatatcaaattaggctttaaccaacgtacgattatatattatgttttcatgtatttattctgtaagactttttaatatcaatctttctctaaatattgaattttgatcccaatagcatacgtattttatatatatccatatgctaaagcctaaagatcgtatctcataaaaaccaatgtttataagagaaattatttgtttcacatccaaaggcataggcacgcaagaccagacaagacatgtcataggataactaagaaaatcaaatcatgcatgagtctcaagccactcgatatttaagcgtaattcttctttaccctttaatatgaacatgacattttccctcgtccctaaaattaaaccaaaatttccgggggttgaatgaataatttttgatgattcatatgaaaggaattgactgagcccatacttctatgcttttctttggcagactatgaatagattcgagagacactaacatatgaaccaaacggtttgtccattggcatgcagcatttttaatgagttctgtttttttttggttttcctgaggacattagtttttttaaatacttgaataataattgctcagtttttttaagaaaataagtttcttgaagagaaactcttatttatagggtttttaagttttcattaggattaagaactttacaaatctaatttacatagtttttagaaaattcatttcttatttttcttcaaaggaaaaacactttttaaaatcttagttaagtaataaaatggttttttcaaaagatgaaaaaacactattatagtataaatgggggactataaaataaatggtgtaaatcataattgctttttcttcttctattcggtttttggaccaacttttctgccatggaaagttcataacatttaaaatggatcaaacatctctactgaattgtttagcttatcgttgtaaatcgtgaaacttgtttgatcttgatttggtctagaagactcaacctaattaatacatgtacataaatggagatacaaagaaaacatacatagaaggctagagctgtaaatttgggtaatcgtcctagagagagaaagagatggagatgagagttatgtagatggagacagagaggaagagtagtgaagtaagctctggtcgattcagtgtgttaatggtcagagagaaagtaaccatttgcctttatctctctctctccatgatctcactcttctccttttgtccctattccctatagagacagtgagacacgagcacgagtcaatacaatccttcgtacgtacacattattgataacgttgattaattctgaattgtctctattctcatttaagtgcttgttcgttttatgggttccacacaagaccatattcatacttctagagcttgatgattcttcttgtcaaactttatcaactgtttgatttgtggatataggacgatgttgatacttgaataagtcgtgtcctatattttgtggaaatttagagaacacgtcacacaatgacttttttgaagttcaatgtttactcttcagagcaatccacttctgtggaaatttcaatccatttaagggaactaattaacaacaaaacgttgaagactctttccatttacatgagctcatgaaaaccttatataaaaccttcaaaattttctaatatatccttatattcatttaatttatacttgtaaaaatttgcatttacatctgaacattaagaatatcaggttgcgaaaaaagaaacccaaaaagaagtagattgtagtgtatgcgaagactgaaattagagtaattaacaaaaaaaaaagactcatcctaacattatcatcacaaaagattcaaaactgttttgatgaccctattttgacgttcagtcactgccattgtctctctattctgtccaccctacgactagacacatcatcacctcattatatgaaatttattattttaatattctgctcattcaatcttcaaattcttctttctttagatttttttaaaagtattttgttatttatgtagcagaaaaagtctttcttttgtcaacgtagatataagaaagttacatctatagaacgaggagctacaaaacccaaaattaaaaattcctgaaacctaatatctacgttaatctgttttgctttaccttgcaaattaataagtgggaacaaaactttagcagaaatataataaaattttcttttttattagattatgaacttacatacataatttacaacaaaatcttcccacgataagggtttatcataaatgctttacaatttagatattcgagggctgatatcatatgcccaagtatagtactaaaaacatctaatcccacaaaaagaacaccaaaacaaattattatataatctgtacaataaaaccaaaactccaaaaaataatgaaattccgaaaataaccttttaatatttgtagtctttgacgtgaaggctctcggacgcaccttcacctaactgagcatcacccttgtagccaccaagggttgcttcagagttagccttggctctagccaagaacgccttttgagccttgtccacattctcctctttacctccccaagccttgagtgtactctgttgaagcgcacgtccatacgaaaacgtcaagctccatggtttcttccctttgagctgattaatggcgtttaaattcacagttgcttcttcctcactctgtcctccagacaagaacacaacggctggaactgctgcaggaacagtcctttgtaaagcacggaccgtgtgcttggcgatcacttcgggtttaactttagaaccactgtcagaacctggagtaaccatgtttggtttcaagagtgttccttctaagatcacatggtgatcactaagagccttgtaacaagccgcaaggactcgttccgtgacataagcacatttctcaatgtcatgagatccatcaacaagaatctctggttcaacaatgggaacaagaccgttctcttggcaaataactgcgtatctcgctaaaccataagcattctcatggatagctaactcagaaggctcattgtttccgattttgagaacagcacgccacttggcaaaacgtgcaccagcttcatagtacttcttgcaacggtcaccaagtccgtcgagaccagtggttgtggtttcaccatttgtaccagcgagctcaacggttcctttatcgactttaatacctggaagcactccagcttccttcattacatcaacaaatagtttccctgtatcagaaaccaaccacatcaatactagaatcatgagtataggatctgaacaagcattgttcaatatagtgattgaattaacctaaactaagatatataaacaataacttcacagatccttctatacacatcagaaacaccagaatcaacttcttctacaaatcagaacagatatatgaaccagaaaatggtgaaagttcttgtgaggttttagagttaagacctgaagcagttttctggtagagtgtttcttcgaagagaatgataccactgatgtattggagagctccaggagtggtgaacaagagctcacgaagagcacgtctgtttgattcaacgttctcaacgttaatgcttacgaaacgttttccgattgttcctgtggattcatcagcagcgagaatacctttccctggtgttcctatgtaagcggcattggcgatgagctcatctgtgaagaagatcggacaaaaacgagattcaggtgaattttgatttaggaattgaacagtcttcgagctatgatcaaagcaattttgtaacaaaagagatggaattggcagagaaccacgattgatgaaacttgaacaaaatcgattcgagcaaacgaatcagaggatacttttgaattccttacaggttctaatgattgaataacgacgatgccaaattagaattgataattgtggatgaaactggatgatcgaagaatgaaaagtacggcggaagtaagatttaccggcgaatttggatttgaagcacgacattgtgaataaaagaggcggcggcgacggagaagatatgattgtgagaaataatggaaacgattttacgtaatttttgaaattgagattaatgggcctttaaaaggccgcgttgtagacggacatgacgacaaatatagagattttacgatcggcccatagaaattgtcgctttgtgactccaacgactagtagaaatcgtcgctttgccagtgaaattataaaaaaaagttttttttttatctattttcaaaagggtcatttttgttacaatttatctgctatttttagtacttttcttgtggattcatatttggatttgggagagataaaaaaactcggtcaaatattgccaaggaacaagcatatgaaagaattagaagaaaagttggctttttgatcacacaaatatggtcatcactaaattgtcgacatgataaaacggggtaaattctggtggttgcgcccgtgaacttagcactagtgcatgcggctgaccagaatattaaaaagtaacaatctagaattagatgtaaaagtagtgaagattataaaaaattggataatggaaatctcaaacatgtgggtctaaaggaaagtccactatccacacttgttagcgtcatccgtgacgccaattgctcattttccactatttgatcaataaactatttctaccatttcacctttttcgaaaaaataatcatataaacaaactttatctcctcaaccatataacatatcttcgtaatactaataagtacttgttaggtaaaaatattcatcaacaagataatggtcaaattgcaaaaagaagttaattttatactattgtgtaaaatacatacctctcgtaaaaaaaaatatatgagaaaaaaaaaaactagaaagctatcatctccgactcatttcaacggaattaaaactatccgacccgagatttttatatgggccgggtgataacccattatcttcttctagtacccgtttctctcttctccaattcctaaacccgacataaaccatcgccaccattaaaaccaaagcaatcacagcaagcaaagacatcccaaccgttaatcctactcgactctttttcttccctacaccttcacgtaccttaaaataacccaatttactcggatccgcaacacccaacatcgtccgaatcgggtaattaaccaaataacaaaacccagacccgttattgtaaaccgccccgaaacacttgcaattatccacacacatctcctcacactctcctaaagatgacgtcgttttatgatccatcagttccttaaacggcacttcaacgccgtcacgtctcaccactttaaactccgtcgtcttatcacaaaaatccgccggtgatgaagccgcgtgagtacactctccgatcacggttctgttatcaatacacgaacaacccgatccgggagtacatagactatacggaccacacggatttggtagatcacaagtttcacgaattgcttcgtaattcaatgcccagtgagatccatcccagagatatccccggagattcccgtcggattctaatcggagaattagtaaaccgttgaccggtctttgaaaactattaaacgcttcaacatcgattggtatacttccggtttggtacataccgagataaccattcgggttaatccgagcgagaattggaccagctccgtctttgactttggctttagcttgaagagcactgtgtttccagtaaaactgttgagactcttcgctgactttagcgtataaaccgatgaaatcgctacctaaccgcatcgaatataaaccattgggtgaaaccaaagccatggcagatgtgaaattctggctttcgacgagggtatttccgggaaaatcaaaactctcccactcaacgaacgtcgacgttttcaccacttgaagatttgagtcgttacggaggattagacggtctccgttagtatgagttgaccattctaaccttgaagaaggatcgataattacgagactaccattgaagaagagtttcgttttatgcgaccagctagctgagcgggtcgggtcgagaacccatagtggatccgttaaatttgggtgggtgacggcgagagagagacgtgacccgtttacccttaagaacccgaatgaaaagttaccgtttgagtcagtgaggagaggctggaacgagtcgatggacgagtccggtttagcttcaaagccttttaccagctccaaaaccggttcgaccgcgttgactcgttgccatttatgagaaaaaaccaagaaaacgaacaataaaagtaaaacacgagtgaaagagtttaaacacaaaccttccatttttggaaacttgaatcaaagagaaagagagagaggttttttagctctcagaaatggaaagagattgtgatgttttttttttattctttcatgcagagagactccattgcatcatatacttagaagagtatatatatatatatatatatatatatatatatatatatttgtagaaagacgcataatatattaaaaaatgttttgccggtactagaatatgttaatttgagaaaaaggaacaaataaaacaatattaaacggcgtcgatgtcgtgggactgatattaaatatttgaagtcgcgatttgataaaagatatggttttctggtgggataaattgttaacataccaaccattaaccattactcgctaggcgcaaatggaccagttgtatataatgcgctaaaccaaattatttatacataaattactgagtaaagacaaaattattgcgcacactaagcatgtgttagtgtcagtatatgtgtgtatacatacattgatgtactgtatcatgtatgcatctaaatatgtaaatgtgtttaatgttttttttgtacgtgcatagattattttacaaacggagatcacagcatccctatgtttccaagtgtgcatactcttataatatagacagtaagacagatataatgaaatcgaatttactatagtgaagactatttatttaaaaggatgatcttctctcaattatgtctccgagggttgtggaaaactctttatataaaaaaaagttctagtcagtacttttttcaagcacaaaccacttgatcctaattcttattctcgtgttaaaaacattgaaagcataaaatgaggctgtgctaatgagtactgattctcgtgtaaaaaaaaactgaagatttaacgtatatgaattgcaagtatatctttcaaagaacgaaatttgaatttgattggttttgaggtcgtgtacgtgggatatgcaaattctcaggatctccgaatttgttcataatgtgtatgtttgcaaatatctctcaaaagttatacatcaaataaaagattatatgcagagtagaaaataggcaacatttattaaatcacatggtttagaagaaaaataggactaagatccgagttaattaaagtgattagtaaaacaaacaagcaaaacgatttttttaataataaaaactgtttgatatactaataggttatagaaaaaaaaatataacaatatatgaaattttttctattcgaatgatttatattattaaggcattaagcccctaatgcactggagccagacacacatttccgtaaatctttacaaattgaatggggaaatctaaaacgattaggggttaaaaatgaaatggagttatatgtataaaatgaagttatgaaagaagtcgtaccaaatctaaagggtcaaaagactcaagctctccatttgtttctgtcagttcgctgaatctctagatacaacttgcaatcttatttacaccgccaaaaacttaggggacgatggtgacatgcgtggtattgctatacgaatgtgcatgacctgatgtataagtttgcatcatttttttatttttttttgaaattgcatgttattgtacgcaattaaaacatttcaacgaatccacgtcaaaactgttatatataccaaatagactaaagcgaagaggatatcccaaatagtccaatctgataatatcaattggatatttctttttggatgattgtatatttttcggttcataaccaagaaagttcaaaatgatttatttcacaatgatgggtttagggttattatcaactcacatgggttgacttctaaaaggaacattaaatgtgaggagctgactaaaccggcgggaggatatgtatgaatgtatcgtaactaacacatcgaaagtctcaccaattcggattttgacttactttatatcctgatattattaatctatgttttgtttggttgtttatttatttgtttgtgttgacatcatttaagttcaaccacacaacaactcttttgttcccttcggtctccctctaaagaatccaaattttcttaccaaacctaatcgttctatcctgatgtaatggatttttgtgtatgcgaaaaattattttgtttttagagtagtttattatttagtacagctttgtatttcacctttcttactataaattatatttaaatatttttttacgttcaaggttctagactactgaattgagatttgcaaagtcaaatatagtttattactgatataaaaatcatatatatgattgttcccattactgtatcacttaaattaatcccccttaaattaagtattatataaagatgcagtttccacatataaactcttttgagccactatttacatcttaaatagcacaaatttgttttccaatttattttgaaaattagtctataataagccagtttgtaaaaacttctcgattatcaaaaaaagttactacaatatcacatctattaggaatatggaagaaaaagttgtgaaatgaagacaaaattacacctaaaaaatagatttttggaaaaatgatctagaccacaaagaaaaaagatgacctgatgcataaagcataacaccatttccattaataatagtatttatgttataaacaaaagtaatagaaatagtcgatgaaatcgaaaaacgaatctggtcgacagaaatgtatggacctttttctgcaattgtcaaagccaagacttgtttggaaggaaaaaaatagtttacatttcttctactgagaaaaatagatcaaaagaaatactatatgatatgttgttttagtaaagataaacaattggtcgcagtaacggatctagaatacatttataatgggttaatgtattatatgaattgaaaaaaagatttgaacctgttaatgggatcaactcaagaaattttaactattttctctattttttcttaatttttaatatcaaattaattaaaatataaaagttattgggttcaaatgttcaataaaataactaatttctattttgaagttgtttgttgcctaagacctacgctgcgactatgactaacttcaaattataaataaggagttataatgtttttttctaggtaattgattggaaaaattgttgacatttccattaagaactctaattttccaacttgctttgagaaaaaggtattaaaaggatcgatccataccaaacaaatcacatgaatatcttagtaagtttaagatttgactatatggcatctaacagactattcactgaatatgttcatttggtcttaattttctgatttcgaatatttttgcagtcatcatatattttatatcaaaatgggcatttaaagcccactgttaatttttaatttcattataatggcctgctagattcacttgcaacaatctatattcgatgggccgaaactaaataagcccaagtaagaaaaaattaatgttgacagtgggatttgaacccacgccctttcggaccagaaccttaatctggcgccttagaccaactcggccatatcaactttttgatagtaaaatttcaaagtatgaatataaccgatttgcatagatttaaatgacagggacatgccctaaaatcccttggtccgattaatagccttcacttcacggcaagttcacgccctaaaaagtaaaaactgcgctcgagagacgaaaccgctatcatcttcttcgagaactttcttctttgacgcatcgtctccttcaggtcacagtacctctcaagacaatggagttctggggtaaaaatctcctatcttccttcttcttcttcttcgttctctgcgcttcgtttcctgcatttaggtttttctttttttaaaaaaaatcttttggtttcatcatttttcttcgtttcctaccgtttcttctatgtgtaatcgtcaggttagctaaacgtgagacgagattacatgaatactggctattgaatttgtaattagtttataaatctgttataaaccggtacaaattccttcaatcaagacacaaaacataccccaacagacaagcaaaggagaagaagaagaagaagaagaagaagaagaagaagaagaagaagaagaagaagaagaagaagaagaagaagaagaagaagaagaagaagaagaagaagaagaagaagaagaagaagaagaagaagaagaagaagaagaagaagaagaagaagaagaagaagaagaagaagaagaagaagaagaagacagagagagagaggaaagagcttttgcattcgtacctgggacataaatgattaaaccagacagcttcagagagaaaaatccttttaaagaaacattgttccacttcagacctgcaaaaattttaattactcaagcagataaaagcataattttgtgttatatatccttcataatcaatgttattagaccctggattaagtgaataagaaaggaacaatcaaactcatcaatattatatatatgtataaagagtgcattcaaaatgaataatgaattaatagttcacccgataagaaacgggtttttggtctaaactatatatgaaaagatcctaaggatcattcattggcgtattatcatcatcatcaccagttggccagttgaatccagtctctgtgattcctgcagcaaattgttcccagcagacatcaggcaaaccatcacttgttgtttctgcagcaaaaccaaactctgagacatcattatagtccattgtgtttccccatgcatcggtgttgctgaaactcggtattgtagtatcgaaacccatgctccatgtcgtctcttcttgtttaataagtccttcaggagatgggaaggacatcaagtaatctggtttgctcatctcttcttctgatggatacatcaagttcttgccttttggatcgcttgaagtcatccctcctaaacccttggtgttctcagtctcttcgtcatacattagcaatctctcccaatcatcagcttcatacttcaccacctcccctcctgttggagaatcttgaggctgctggtggtgcttgatgaacttctttctcgccttttccaatccaagagctcctcctttttcttttcctttgaagttcttcaggcgttccaagaaaccccggttctgaaacaacttagccaagaaagagagcaattgcttctgacgttgctctgcagctttcagcctctggtttacagtgtccacatgtcgagctgtgcctctgctttgctgctgaagctcaaccatttcctccatcaatgcacgccgctctttcctcagcttctcaatctctcctccaacctcagtaggtgacccttggctttggctagtgctactgcagcaagtttggttggattgtggtgatcgacgacgatgaatgttcttcagaagatgcttcttgcctctaaggaaagcctcgttagcgaattcccacttgtcagtatcaatctttcgaaatccctggaaacattccaaccccaaaaaaacaactcaaacaagctcaagataaagtaagtaaacacatttacatcaagacaagaccaaatatctcaagatattagaaagattctacctctgaagtgtgaagaacatgtgagtaatgatgtcttaaaccagactgaagttaacattgtgagaaaataacaaaacttcataaaccaaaattctccattcaaacgaaaccataagtatacaagattacaagcttatttcagatgagaagttattataagatccaatcgaggccaaaatttcatagatacaaaactcagtgttacatgatagagagattaaacaaatcccaaaaagaaaagaaaattacaggtaattttttacaagttatcaaaaaacgagtttcaagaatctatacaaaatggttttggtcatcaaaaagattacagaaacataaaaacaaaacaaaactgaaagaagaagaagaagaagaagaatgagtctatctagaaaacagaaacagagcaagagagatgattacataagtgttaagctgtctgacgaagctggagaaattgttgtgtttgaaattccttggaagtatgattctggcaaactctagaggatcccaaactacgaagctagctccggtcagtccccaagagatgaccgggtcaagagtcgggtcatcaaccaaatcaaaagtcttggataaaaaaggtggaattggattcccttgtaagatgtctagtggcatgggaagtggtgacccagagaaacccatgtcagtgtcgacgtagagagacccgggtatatcggatcgtctcgaaacgggtactgaaattggagttggtttagaaacagcatctttttttgggctcatttgatatagtagaaaatttacgggttttagtgagagagagagtgagaaattggggtgtgtgtgataattagggggtttaagagaagaaggatgagaggtttaatggtttataaaggtttagggaaggaagtaaccgacaaactgtagtcagataattgaaaaaaatctggggaatagagaggcggtggaaatgggtgggtcagttcccgccaccgtggatttatctttttcgtcatcatgttccattgattcatcagtttagaagaaatttggaaactttagtgacaaataattgtacaaccgacattgaaattgaaagttgtttccttgcagcttcacttagctctctctctctgtgatttggtgaaggagagaaagtggtgacgatggtgggtcccacgtcatcttgagatttttgaaaggaggagtgatttagcgcgtttgccaggtcagctttctaatttggaactgggccctcacaaatcactgattcgcttttcgtgtttcctttttcagaatttaatattgtataattttgatttacgcaatcctattggttaccgatccatcaaacgattaattcggaagacaggtaaagtcgttttcaagtgtgggaacttacttagacgcgaaggcaaaaatagttgactatgtatctagatattttcagtcccaatgcgtttttaacgatttgggattatattcatctgtattagagtctccgaaagttacagtcttatttcatttctgttggtttatagtccagactaatcgcacagtgaacaaatgtaaatccaatgaatcatattgagtttgcaaaaccctttgacagcatttaccagctgctcttttttaccttcgcttagtaactaatttagcggtataaatgtacagcaatgtaattaaatatagctttcagtgcattgctacaaagacataacaacaaaatattgcttaccctttgggactagatagatagattatatccctcacattgtttccattactacatttttttttcctccctgtgacaatagtcatgtacattttaacaatctgcaacattaaaaagggaacaaaacagcagacaaagatcgcaaaaataatacatgtataaaaaccatgggattctgtaggatatgattgatagctcatgaggaatgtacctttaaagctatatcttaactagtgtctccctcctgggcagcaaaagaatgctgagagtatatgtgcatatcatgattataacaacttttgaatggaccgggggtattttacaaatccgagcggttgggcggaggaaccgctgatttgatcaatggtcttagcaagtccattatagttgcaaatgatggacgcttccatggctcactggtaatgaaacacatacataaacatgaagtctattcaagaagaattcaaaaaagagatagaaaatcttaacgtacttggtccaacaaccctcgattatggctgcaacctgaggattcagattacgcgggatctccagccgtttacacttgaaaccaaccgcagctacaacctatggaacatttttttgtatgatcatatatagcatgttatgaaatgtagagtgagggacttccaaatgcaaaataatatcattattatttgagatgtttagagtggaaagtacctgagccggatttaagttaccccatggttgttgcaatgtagcaagctcccacaagatgaccccgaagctgtacacatctgacttttcattagacggctcatctcgcaggacttctggtgccatccactcgggctgatatatcaaagtcagtaattatttagcttccattggaaataggacctagaagaaagttacgttgttcagcgtgttttagtttcaaacaaactgaacttacggttccagctgctgacttcgaggaaagaaacgtgctggccttcaatcgcgagagaccaaaatcacaaacctgaaatttcaagacaaattgaggagttagaataataatgttctgattgtttttaagacgacagcttgaggctgctgtatcttttaagtttcagcagattaacgcctttttgtaatgtctccaaaccaatttagaattaaaaatcataatttatatataagcttgtctcacaagaggaataaaatatcaaaatcaaaacattggacacaacaatttctaatttagattcaaaccttgactgtatattttttgtcaaccaataagtttggagattttagatctctatgcacaattggaggattgcgattgtgaagataattcattcccttagcctgtgacagagaattggaaagaaagttccatgtgaagaaacaccaagatcaggaagtaatcacccatacatgtaacataaggaattaaacataccacatcataagccatactcaggcgacgtctctcatctaattgctcccttgctccacttttatgcaaaagtctgtataaactacctctgtttgaaagaaatcatggtattagagtcattataggccaaaattctacactcagtacatcaaaccttccaaatccaagtaattgtaccttgacaaatattctgtcactattgacaaatttggaggttgagtgaccgcacccatgaagagaacaatgttagggtggcgaaggcgtttcattatcgcaacctgacagcgaatcaagatcattggagacattaatacaacaagttcattaccaaaatcaagagaaaattttatttgtgcacctctcttaagaactcattaacacgctcagcatggaagtcttgctccatgagaattttcacagcaacatcctgaaattgatagagaatattactgcaataatcaaaattagaattcttctagtgatagaattgtaaaattcaaacaggaagacaaatttatgatataaagacacatatacatctaaaatgggacaccttttgtccgtgtttaatttctgacagaacggagagtcacatatacaataactttgccttttataataccaagcagatccaaaagtcacaaccaaatttttagagcgaaaaaaaattcagctgcgtaaattctgacaaaaaagttcttaccgagccatgccactcagcacggtggacagtgccaaaggaacctgaaagagcagtcgctcaaattagagtggaagaattaaaggcaacagagaagaatgtaatctcaaaatgggtggcactttttccttattttgttcgagaacagagtccaaagcaaaaccacttcctcaagaatttcatatttctttgcatttttagaccgaatcattaatttttccgtaaaattattacctgctccaatcttttcttttatattaagatcacaccacgggatgtccatatcatcaccatcaagtccaagttccctatttgccctgtttggaactggctgactgattggtggggcattcataggtgctgcttcaatttgatttgacgcacgcatcatgttctgtggaggcatattagcactgggtggcaaagacccaccaccattttctgccaatgcgtcattctctccacccggattatcatattgcctatgaaacattgagaatcccatatcatctacaaccattcaaacaagcagatataagaaattagagtccagaagacaagtcttgcacataaatgcactagaattcataagcttgaacagcagactaacaagtttaaccttaaatatcattaggcaaagaacccaccaacaaacatacacatcaacagccaaaaacaactaaagtgaaaagagacaagaaaacaaacaatagaatcattctaagactactaacacttcagatactgagacatgatcaagaaataccctaaatgataggagattactcttttaggggaaatacaaaacgagatgtaagcagcatgcaaaaagttaacatattattcaggttttttgtatgggaatacctgatgcaggatcgaaaacaagattaagagactggctatcggagaaatattgtttggctagtaacctaaaatcgactgcgggttcaactggctttggtcgtggaaaccgcagaggagaagaaattgagatagatgaaggaccatttagcaaggaatcaggctcccataagtgacctggctttcctactaaatcaaccaggtactccctgaaaccaaaacaaattttccacgtcatcaacctaatattctgcgaaacatttggagctataattgtttttccagaaacaaaaagcaaagaaaataggaaaataaaggctctttcgcaatcacttgtatcatacctatcaagcccaaacctgacaaggcacgaagcggcatcgtctctattacaatatttacatcctttggcaattcgacagggtaaatcaattatgtcagccagtacctgcatgcaccaaatagaagatataaaatactttttttctttggaacattcaactatcagtaacctatttttttctaatcaataacaccacttttcacattcaacgttcttcatatgtattccaataaaaacaaatggatgaagcacaataatttatatgatcatttcacaagatgtcttaaatgtcatggggatagcatcaaagttgggatctcactttgaagagtaaagctcgatgtctgcagagtccaacagagaggctacctatgggaaccaccactttaaagatttcttttagaccatcaatgcactccttccacatgggaaccaactcatcttcccccatgataactggacccctggggaagcaagaattaacgagtacaatgtgagaaatcacaggaagatataaaaatataagttcaaagggatagtaaggattgtatgagtacaaaccccatacgattgcagataagctttgccagctgatcaacaacctcttttgtggtaatgcagctacaagatatgtcgtggactctattgtgaagttccttgaaggctggatcactacgcctatcaactatgatcgcttcaagcgaagaatcaacaccagaatcaacagctcttaatgattcaattgaagggatgcgaccactttcatgcaggtcgatgcataaggtccaaatatagggatccagaccattcatcatataaaacccatcaggaactttatcatagtacgataagcagccattaacctgatgcagcacacaaaacaatcatactctgcaatgtatctaaacaacatatctcatttgctactaatagacttttggtaaggagatctaactgaaacttcggaaacaagaggaccatatctctataaccacgattcaataattttgggaaacaaagcttaacaggaacaaatacccagaaacgatgtgaaacggtttcggctgaacttggcgaagtccgtaaagcagactcgtccggtacaggatccagaaagttcggatcgtcggcacaagtagcctccgacgaaagccttaacgccaatgcaagctgcagctgataactctcctccgtctgctgcgcccagctcttcccagatgaagaccctccagcggagtccgccgccatctgtatcctcaaatctcctccaccaccaccaaatccaagcctaaacccatcatcttgaggaaatccaacagattcgatctcgttagccgccgcagaaagcgtaggcatgtaataatccccagacaaagagctctcaccgaaactactcccactggattgcctttgcaaccctagagacgaagcatacatattattcccaacccgattcggttgattattcaacctatgatcaccaccaccaccaccgctaggatcccaatcaaatccgcctctctccgccttagctttcccggtgttcccgctgttatggttgctcctgttttcgctcgacaaggaatcatagtgaggcggaggagctccggtgacggaaactgacacctgatcgtcagaaaattgactaagcaaagtgtaattagatcttctaccgggcatttccatggaaaagagagttatcgcgatctagatgagagagtttcccgatcatataaacatcaaaccctaggaaaccgccattgttgaagaagtttggcgagctagctagccacttgtttctctctctagtttttcattttttttttgtactttttaaaaaagtctctctctctctctctctctctctctctctctaatggaattggattttttttttgtttttgcgttatcataggaaataaacttactcggtgcgtttctgttgataatttcgttatattcctcttttgtcctcctttttatggaactttgacattttttttattttttgtcaaaacaattctccaatttagtttgttttttagtgtattattatttgtctaatttttgtattcgactatgatatctattcatatgttttgtgctaatttaatcgctaataaaactgtttaaacaattaatttggtatttcatattttggtgataagcaactgaaattggaagataaaaagtagtatcgtagtgaaagtagaaaacgcaaagctaaaagaggaacatacacagtgtaaaatactaaaccatcttgcctatcaaatccaaatactatcaaatttgatcttttacaccaatctgaatccgtaacattggatccaagtttcgtatacctaaacatgaaattttcattcggctctacgtagtctaaaaaactcgacataaaataaataaaaagcctttataacgtccacaatatttagaatagaaagtgagagaatggactataataaaataattggagtcgagggggatgtattcgtgtatgcgaaaatggatgggctcttctgtctttatattccttaatttgtctattcaaacacattcgtatttctggtcttcggcctgcgacttctataccatgcatgcatcttatctctctctttttttttttttttcgttttcttttctacttctccatttttttttaatttggttatttttattgcctttatgttttttgtgtattatatataaatgaactaataatacttcattatgtttcgtgttattataagtgaatttttcacaaccattacaaaaaattatcttttgcttaaaagttaactttggattatagtacttcataaaaatgtaaagattttgatcaagtacttatcaacgcagcttgggtagtcaatgtgctgtcattaatttatctatcaagctatccacgcagcttggacaataaataaatatttaaattctattgcatatttatatcatttgatccgctaaggttcatcgaatactgccaggttcattgcactcaacgcatttttgtcattaacttacgttttttagccatggctgctgagaatataaagttgctactatgtaaagaaacttttgggtttgatcatatttgtgcacaaaaaaaaataaaaaaaaaatcatacttttaaaactagtattaatccaaaaagtgctaaaacataacaaaaaaaaattctccttaactactatacaaacatatatttttttatgcgcataaattaaaacttaacaattgattatgatcacatatgttgaaaaaaatcgaaattatgtgtgatatgtaaaaccggagtataatattggtaaactataaatttaagagcattggaaaatgttcatgattcatgccgagaactcttctaaatctaaacacgagaggccccgaatagatctaactaaaatgaattgtgtttaatataataatagtgttccttaattctcactcgtgcaactatccatttaataattttaattattcgtagtcggggaccgtacttagttttatcatataaactcttcacagattttgttaactggtttttctttggattagaaaaaaattaaaactttgcgatacattatgctcaatttatccgtgggacttattttgaggaatggagatagatattgtcatgaagacatgaatatatagaccccacatgttgacgaaaactccgtcagtcaaataaagtgttaaaagtccgttacgatccgtcctgacaccgttaaaaaaagccgtcaaaataaagtatgggcttgaaacgttagttttgttgggctaattttaaaatcatggcccaactaaaggagatattcgagtggaccgcgtaacagaggatccctaaaatcccttcctccgattaataaattccagcggacattttagccttctcacatcaacacgccctaaaaccgctctcgagagacgaatcgctctcagcttcttctagaaccttctccttctccttcgacgcatcgtcgccttcaagatcacactacctcgcacaacaatggagttctggggtaaaaaacatctcctatcttactccttcttcttcttcgttctctgcgcttcatttcctgcatttagtttttttttagcttctggtttcatcgctttttttcgttttgccatgtttttctactgttttttctatggaatcttctgtttagctaaacgagaaacgggaatagtgagtatatgtgacaatctagggtatggactgttcgtcttcgtagaaaattggggaaaactgaaaagttttctctctcgctaggttttaactccgatagaggtttcatttggggattttgttgcagaattactgatttgtatgctttctatgcgtttgcaggtgttgaagttaagaatggcaaaccacttcacctagatcctgggctagacaggctcgtgcacatctctcaggtacttttgaatttgcaagcttaatttgatttataagaatgtattttacagtgacgtttggtttatttttgttgaaggttgctttgggagagagtaagaacaatgtaaccgaaccaatccagctttacgtgactgttggatcggataagcttctcattggaacgctatctcatgagaagtttcctcagctgtctacggagattgtcttggaaaggaactttgcgctgtctcatacttggaagaatgggagcgttttcttctctggttacaaagttgatgcatctgatccatatcctttactatttgaacatttttgttgttatcgctttaagctttgttgatgaaaatgttttggggacttgttgctttactctgtttttgacttccttgactctatctcaccgagcctgaggatttgattgatgatcaacttgaggctgctggtttcaaaggtaaatggggacttttatatccagtcctgcaatgatttgtctccagttgtcttattttagtttatttaagaacatcaatctcttataaatttatttggccttggttgagccagctgctccgaaatctgctgcgaaacaggtgaactttcagttgccaaatgaagatgtcaaagccaagcaagatgatgacgctgacggtagtgaagaagattcttcagatgatgatgatagtgaaaactctggagacgaggaggtacttttatctatatatactagctcaatttgttatagaattttacttaggctcagtgacatgttgattaaacctatagacagtggtactagagttatcttaagtatgtttgtaacttctatatttgcattttcacatgaacccttgattacctattgtgttttagcccattctcacatttctttaatccttatcatggctgctttgtttcaggaagagaaggttactgctgaatctgacagtgaggaagatgactcatcagacgacgaagaagatgactcctcagaagaggaaaccccaaagaaggtaacatgacagtctcttttatgtgcttgttgatgggaaacctatatttgttctatcttatcttcctttgggagcaatttctctgcttctgtggtcaagctcgaatctgattctaagttttcttggtttataaaagcctgaagaacccaagaagaggtctgcagaacccaactcctccaagaaccctgcgtccaacaagaaggctaagtttgtaactcctcagaaaacaggtgattaaatcctttttaccaatctccccattgaatacttattttaacgatagaaaggaagattgatttgtttaattaaaaaacattcggacaaagcagattcgaagaaaccgcatgtccatgttgcaactcctcatccctcaaaacaggcgggtaagaattctggtggaggcagcactggagagacatcgaagcagcagcagacaccgaagtctgcaggagcgtttgggtgcaagtcgtgcaccagaacctttacttcggaaatgggattgcagtctcacacaaaggccaaacacagtgcagctgcttgagaagaagaagcagcatgatgactactctctataatatctactctagaactttgatgtcttttggtacttaaatctggaacttgcgagtgagccagttttagttggtcttttttttcaggcatttcttcctgtttaactttatcgttttggtagctgaaactgtgctaaacctttgtttgtgtttagtggtatggatattaagtctttttgtagacttttctagtgaaaatctacatttgaaattctctgtccaaaacatacattgattgaagattagttagcatgtcactttgtaacataatctaatggacccgaaattaaggatttttagggcttgtggttaatatgcagctactacaccagtttgcgtatataaatataataggaagagaaaaataataacaagcaggtttgcccgagtggttaagggggaagacttaagttcttctgcacataagtgcgcgtgggttcgaaccccacagcctgcatttcccctctattttgttaaaattaataaacttgttgtgttccttccacttttgctgtcttccaaaggtttccaacttccgcttcgtatttctctgattgtgaattaaccaaatcacaccaagaatcataatactaattggttttcatgtagagtttccttttttgcggttttcatgttgaagaaaaaaaggaaacgcaagtattagttttcttttaatcgagcttactttttaagctgctttgctctttatatacagattgctctgttttgtaagaagctaagttttgggttttgccttaatgcagcgactacggcgtttcgtctgtggtaatgtcggaataacaatggaagtattcgatgaacctgatgaggaagaagaacgccaaattagccaatacatcgatgtggtagactcacctagggtttcacagaacgagagtgagtatcaaagaaggtcatcagaaagtgtttgttcatcatcgtcttcaggattgcaggaggataaagaatcattatgttcgatctgtatggaagtttggaccaacggtggcgttgttcgtctaccagctgcaccttgtcttgttcttgggatctcaacaactatcacaatgtttatgctggactacagaatggaatggttttagtatttgacatgcgtcaaaacagaggacctttggtttcgttggctgacgtaacaagcaattcggttcatattgtagatggatttcatgtttgtctcaagagaagaggtgatggttcttattctcagaaacagtcatccacacaagctatagtagatgccatcagtttgccaagaacggcgattagactttggcgaggaaatgacacaactttttgcatcgtatgatgagtccacccgtgaactcatcttgcaagatccttggtcttttgctgtctcacaacggttcgcattgtcaagtcaacttccgcttcaagatgtgaaatacgctaacctcaatggctcgggtctgctcggtctcttaaccaatgatagattccagtttcttagaagcgaatctccatgatcgttgttgtagagattaaaaaacagtttgttgaagagcaaacatatatgtaaagtgaccaacttctctatctttgattgctactattagttataaaatctatatagctacaatatccataaattgtttaaagctttgaatctatttgttcagttaagttcttttgtctagcgataagtcaaaaatcatttgccttcaaggaatctgaaaaaaaccttcaaagtatatttcttctttactataagtatcctttatcttccacactacacacaccatttctgtaacaatggtatcatcaattctctctattcacaccaacaagaatttaaatagctagcgaatccaaaaagaaagaaaacaaatcatcttcttatcctcgagcaattcgtcgctcgaaaactcctttttcccttcaatggttaggcacaattgtcccaatttgcccgaatcccgcaatgaagaacgcgattgcttgtgcgaaaaggtatagataataatgattcttcccaaaaaacgcgtcataacatcccacaaataacagatacattcctacaccgagttccaacacatgaattctgccataacacacaaaaaaggtaatattagaattggtttggtacagtttaccagtaaccgaaatcaaattgaaaaagggaagaagttttttacctatctccaaatctaaaacgaataaccttctttgaagtcttggtggctgatttagccttaacatctcccagcttctctgtaacaatccactcattaactcttcctccttcgagtaaaccgataaaggtagcttttgttctgtgaagagacatcacattctcgaacagaatccaaaagaccataagatgcaatgacctataaaatacatgtaaccaacaattagaaccctaataagacttgagccccaagaaactctccgaaaatgtttttttaccttggtgtcccaacggcgttgaggagagtaatgactgaaggaatgtaaaccgctccccatttcggaacagtaacttccggtacaagaactgtagcgggtaagatcacacagtagaagatgaaggtaacaatgtgtgccactagctttctaaccacgaagaagctatatatcacatgaactttcttccacaaagtcacgttctgccaaaagaaagtaaaccggttcagttttgttatgttattgtatcttaaagactttctaattcgtgtagagggattgaaggaaaccttattagtcatgatttcgaatgccattttcctgaaaagattagctggaccacatgaccacctgtgctgttgatacctataagccttgaatgtacttggcaactcgtttttaacctatagtttttttaaacaaataattatttcacatgtcaacctttaagtgactctataaccatagtctataaaaaatatattatactaccttcaaagaaccgaggtacaagaatttccaacccttgagactagctctcacggccaaatccatatcttccacggtcgttctatctttccaaccaccagcttcgtttaatgccgatattctccatattcccgcagttcctataatttattgtatcgaaacacattcacaacttatgaataaaacggttcaaaacatgttctaacaaaattttaatttaaaatgtgtgttaaaaaaaagtaccattgaatccgaagaaagcgtaagtagaagaaccaacttcttgttccaccgtaaaatgataatccaaagacatttcttgcatccttgtcatcaaacattcatccgaatttactgcaaaaaagttgaaaaaatagtggaattcaattattttgtttaggaaaaaaaaatataaaaaaataaaacaataaatgtggtggtattaatgaaagacattaataaacaagttggtgaaattggaaatcaattatgaaatgatagacacctagctcaactacaaacccaattagatttcaacagctcgttagattttgtcacatgatgatctctttattttgtaagtttctctcctctaaaagcataattatcgaagtttttcaattattagtcgtttcaggatctaattaaataataaaaacaatttttttacataaaaacattaaaaaaaaaaaaaaaaaaaaaagtgagtggtgagagtgagagtgacagagactagttgtagtagaagagagtagctgggtcccacgttgttgcacatggagggagatggatggtgttggctacgtacacgtggcggatctagtgaaaatgacaaatctacccatactatttgaactactaaatgagaaatcattgcccctgtgtggcctacacttcccaaaatgttctctgcactcaattatgggacacgacaacgatgccagtgatgctattccactaaactctactctaatttagtaattttgatcaaattagattcctaaatttcatcttgtttaattttggtatttacgatgaaatatttggaaatacaagtaagagacggtatgatttaaatttggtctagaaaagttaagagttgaatggttatagtagccactatttatggtggataattacttagtaaaatacaaaatacgtgacagctttttgggtgccagaagttataaatacattggtggacaatttttattgacaaataatttcttttctttttttttgacaaaaaataattttttttactttgactaaaatatgaggagaacattactatgttgaaatgagtggaaaatcaatttattggaagaaaaagccaaaacaccaaaaccaaattttcaccaactcttgcagacataccaaatacaaattgaccaaaaaacattaataacttttacatttgttgatgttttcagagatttttccaaatgttttgttttcattaaatattgaattagtttttttttggtgagtcaaatattgaattagtttagaagggggtattgtcccagattatatgcctcctagatccttaaaaattaatttcgtatccttaactaacaaattatttaaatttatcgttaaagaaaaagtagttccacattttaaagctagaacaaaatggatacgtcaatatcaatattcgctaggtaggttacattgggacctcacaataaaacacccaccgacacttctagttaatgtaactaaaactttatttttctaaccatattttttaaccaaaattattaaaactccatgattctaaaattactataatgggaggagctcttaacatatcatgtgttaatattatatagtgttatataatacacgttcataggttatcgtttatcacttacatttatatctagttatagtattaatttgacccatctctactctctcttttttttagtcctccattaaaaaaatcataatttcccaagaaacaataaggaaaaacattatacagtagcatataagtatatctatctatttaacttataatgtgcgatcagatgatttcgtaattattactactaaatcgattttatgaataattgcactgatttgtacattctaaagtacttagcctaaaaaggaagtagtaattgagagagaaagaatctcataacccgtgactaactttctaactaagcagtgattagtgattagcacttatcaatcatgagaccacaataaacaaaagggccaaaacgatcaaatcaaaagtatgaaccttaaaaaggaagaaccgttaaaataacgaggttaaattttcttaaaaaaaacttaccgaatttccagcgagcttgaacaagagcaagcttagggttatggagtagatacggtacggttctccatagaaaatccgcttcaggttgaaaatcagcgtcgaagattgcaacgtaatcgcagcttttgacataactcttcttcattccttctttcaaagctcctgctttgtatccatttctgttgtctctgatctcatacttgatgtttactcctttactcgcccacctgctacactccatctccactagatcctgccacaacaaacgtaacggtttaggtttgatgtaattgagaacccatttcggaaaagaatcaaaaagaaaattactttgatcgttggatcagtggaatcatcaagaacttgaataacgattcgatcagaaggccatgagagtccacaagcagctccaatagatagttgataaacctgcattaacaacaacaatcaataacaacaaagatcgataaccaaacaattgaagaaagaagagaacagaattatgatttgggacctctcgttcgttgaacattgggatttgaataagaaccatcgggtaagcagagtttccaagctcgatgtcatctttgattggttcatatttgaaacgtttatctggttttcgaccaaacagcttcacaagagagataacaattcccatgtaaaccctttcaacaaagagcatcaccgacattgtcaaacagatgtaaacaccgagcctaagggctggaacaatcaatggagctcgtatctgatccaaaaccattgacatttgcattgttatgtcgtctctgtatcccatgaacgagtctggaatcaccgacgtcgtatctcctagctccatctcttcttactccgacgagaacaaaaagaaaacagaggaggaatttaaagaaaaaaacaggggagggaagcaagaaccctagatcaaggattctcttgtgagacaagcaatagggaacaatgtgagattctttaaagatgtctcttttggtgtaagaaatcaaagccaaggaaggacgaaacagaaacagagagacagagtttttcgttttttgcccttacggtgaaaatctctgtcttctctgcctgagaaactcagattgtcgggaaaaaggagaattcaatattttttttatgtgttttagtttttttttgtatttaaagggttttggtaagagaagaaagataatgaaaggtggagaaggagaagatgatttttggaaagaaagaagagagaagagagatctaaaaacagaaacagagggagagaagacacagtgttgtgtgtgtgtgtgtgtgtgagaaatcagagagagatcaatgtctttatatataaaggctctgtccttgtgtatattgttttagactctatttaatattccattattcttttattttatttctctagaatatagagaaatgaatttttttgcaccatcaatcaaccataaatttgctctttctatatataactaccaaacattattgaacgacacaaacattaatgacgtccaggcgaagatacaaaacaaattgttattttaagtttctgataaaataattttcttaaaaaataaaaatgtcattgttaaaaaaaatgcttcaatcttctcgaggtgacatagatgtataatataatacaaatgtgtaattgcctaattataattcgtaacaactatgaattatgtataaggttaaaactcgatagtttatagccgtctaggcgtccaaaactataggaccatctcagtcaaaacaatttgctagccagcgtttattattttattttatttttaagctcaagaaatcgaagattaatcagttgatataatatgtaatctaatatagaactaccaattaaaggctcaaaaaaagaatcgaaggctcaataacattttttttttttgtcaatcaatcaatcgaggctcaataacattacttataatattttagagctgaatgaaaaaactatgcattatagatgagcattatgtatatcagtatttatacaaatcatatggacttgcataaccggttaattccaaaagtagagtgattctaatggttcatttctcgaggaaaatatatcgtctcatattgtttgtcctcatctattgacaagatagcgaacatctctgatgaggataatcgaatgatcgaatccttagtacaagacatggatatcatgcagtggtccatatatagagtaacattgagttacaattttgtgaaatccagtaaattgatatatgtttttagcattgagttatatgccactatacctaatacattatttacaattcagtggaaatatgttatgtcatatatttcgaccaatcaaaatcgaacagaagctctccaaaggagaaaatgaatattcaagacattttaaaacaacgcacatttgccatgatgcttcaaatcccaccgacggtccagtttgttatattctaattaagtaccataaataaaaagttttctgtttgtttaaagtcaaatttttttaagtatacaaaaagtcaattatttcataaacttcgaagcacgtttcgacttcgttcatcaatcatttttacttcgtaatcttttaagttaatatattcaaatcgcaatttaaaggaaataatgttgactaaaaaagtaaatggatctcgatcatttttaaaacgatgataaaatgaaacacatagctggaaaataaggactgctcaacggctgaagttgactcttatacggtcattagttttgggttaaaggaaaaggatccatgtgatccaaacatttcgttgcttctcttggtgatgcatattcgtttggtctaattggattcaaacttgaaagtaactatttataaaattaatttgaattttaacttaattttatgtattgaaagttagttaaataattaactatttttgcggatacttaagccatcactcacattacaacaccttaaacaaacatttcagtttgtaaacttcatacgaatgattcattttctgtcggtccagtaccaaaattttaaaatagtttggaatctttgaaacttagattattttttcgcacttaattgtgataggatatttcctgttttaatcagttattaagtcagtaaattgacaaattaaagtctgtatttagttggcatgtcatgtgagaacacataccgagacaattatccaacataatagacaggatttaatttgttgatcttctagacaaacgtgagttaactattacatatacgagtatttcattaaactcatagcatatattaaaaaagataccaaattaccactcttcactatcattgtttgtttcaaactttcagtttcagattaccattctttaacagaaaataaaattttatatttttcattggctttgatttctttgaatgtgaaacaagtatgtatgatgacacatgagttacgtttgtacctatatattatcatggtaacttaaaccgtaataaaaaaaatgtgtgcagaggtataataatgaaaaaaagagagaataaactaataaataataaataattggagaaaataaaatagcactacatatgttgcatgcagccagcaaagtaacatgcagtaccatgcaagtaaacataatgtataaggaccaaataccacatgggttcttacagttggactttgcttatttcactcacatttgtcactattcttttcttgctttcgtcatttacaataattctgaatcggcaattttatgttcctttctttattaaaccgatcaatagatgaaatggaacaccctaaccaaaaatgaaaagaataaataatgacaggagtacccacggacaaaggcaactagtcgcaacatagactttttagttttaactctttatttactaatcggagcagtttagctttgaacgtacccaagtcataagtatgttataggcccctaccacaggaacaaagttttatttacaaatagaataattcattaccaaaaccaaaaagtttatgcaaatattagtctttcagaaaagagaaaaaatgggcatctttgttactttagctataaaaaatatgaaaacaaaattcaaagaatcaatcaagttttgtagaaaacataattcaggaactaactggtgggatccaatgtccatatacatatcatatataattgatatcctatctactttggcactgaaactcccctagacatttttttttaaggtgttatttcaatctttatttgtcggcatatatatacgcaaacacgtacatttgtgcgtatatattaaattacgtatctatcgaatttttaaaaatgcttttttagtctccctccccttttaaaagctgggaaggggttgttgaaacctctttaattaaatgtttaacaattatatactaagtatgatgttcgatcatctgatcatacaatattgtatatcttatagttctgaaacatttaggaaattttagtgtccatttttattcggcgtgatatacgtatatgttgtataaactataaattgaaattaacggttcattagaaccaaacttaataatttgtctaagcataattgttctacaaatgggtaaacattttataaagtcattaactcattatacagttagggatttaaaaataagaaatactcaacttcggatttggtaaaagtaatatatttaatcggctacgtagtgtgcaaagatacttgccgtccatattgaaatcatgaagaaaaaactattcaacatcaaaggatcaaatcaccataataacatgaaaaataagttcagttatatttttaatttgtgtaccaagttatactaagactacattatatatgagaatttcgagaagctatcattggatatggtctaccttctatgcgaaccaccgagttgatgtatacaatgtggctcgagtggcgaagtagacaccacaccttagtcttcaagaccaagtcttcatcactcttattctcacctacttcaatgtttcattactaattttgctttatatttatatatgtgtaatgggaaagttcctaggtcaagttttttttttttttttttctaattttaaaatatttcacttttagttggagtatcatatattaattacttttgccgcttttgacaaaactatagccatctttgacattatactataaattatttgttcttacgtcaattaatcaaatattttccaacaaacactggtcttcattatatttaaaaatatacataacctgaccagaattgcgttttaacaacggattttttttatggctctaagataaaataaaaagtcgttgcatagctagtcgttattatttcgtatttagaattgatatgtttagccacgtgaaggagaggaactaaaaacaaatataatattaacataaatatgttcattatattagagaatttctcttcaatatcaaaaatgtaactggactacaatttggaacttacaagttagtcgacgagataaatctgaaacgatagataaagctcaccggcaagcaaacatggcacgtgggaagctaaacttgttatcaaagttattcttcaacattttgcactgaagaattttcttaataaaatcagtgaaaaaaaggcaaaagggtaattctcatttcacatttgtttccacaaactacttttgaattattatagagttgtctcttttttcttaaaatagaaattaacagttcataatgtaacaaaatcctgcatttttaagaatcttaagatcattcccacacgtaatgaataataaatagtagttactttaatcgtcgttctactagttgggccatactttggtattattgggctcaaaaataattaatgggcttaaggcctcattagaaaacggcaacgccattgaaggagtctacggtgaaggaaagaagctaacgtcggcgccgtcgttagttgccggagacgcgatgaagctcggagtgtttgtatacagattatacagagctttaacctacggtgtctccccgttgattcacctacacatacggtggcgcagactccggggattagagcatttcagccgttggcccgagcggttcggtcatccctccgccgtaagaccaccgggatcgcttatctggtttcacgccgtctctttaggttacaatctctatgaccttcaaattttaactcaacgaaacaaaactgttcaactcttcattgctcattgaagctaatctccaaatcgagaaattatgatttttggtttgtttgttttgagtgactctcaggtgaaggaatggctgctattccggtgatcagacactgcaatgaagtaaagtcagatttgactatcctaatgacgacgacgacagtatctgcattgtatgtggctcattgttgtttcttacataaaaatctaaaattgaaaaagttcaaagtttttgtcttttgtaatttgatttctttgaatcttttggttgcagtgaagtaataaagaatcagctccctgttggtgtattacatcaggtatgttttgatttgtatgatgatattttctgtgaagtcttatagatatgctaaagtttcaaaatttggtcagtttgcaccactggatacacctttagctattgacagattccttggccattggaaaccgaatgcgattatcataatggagaacgaactctggcctaatcttatcatggctgcttcaggacttctagtaattctttgatccttcttgatgtctatatggatgtatcacttgtgcgaagatattgaactcttttgattgtgtttctgttaatctctttagattccgttgggattgttgaacgctcggatgtctactaaatcctttaaacggtggtcgagtccgctcttactaccgctggtatcgttgttgctatctaaattctcattgatagccccactggtatgtatgctaacttcagcaagtcatttttttttaatcttatctgattgtattaaaactatttacctcaaatgcgacagagcaccctgcagggtatacgttttcagttgctgcatgcgccaccctttgtcataaattattctggtgacttaaaatacggtattgtagtccactttaaaccttcaagatattcttatattggatataatgtgcaacccattatgttactgaattgctcatactctttctgttaatgcgatagaaatatccatgtgtgttgtctgctttttgttccagtggtaaacaagttccatgtatctagtggaacatctgaaagtataagagatctaaaagtagaactcgcagaaatgaaagtctggattgcatcttcattacatagaggcgaagaagaaggtacttttgtcctaaactagtatatagcataacctttttttagcctcgtagactatcgtgtggatctgaagtcacttccatgacttgattgcaagtgacttgtaaggaagtaggagtttggagctgattgactttttatttggtatgcttcttctgttgttctatgcattgcttaaaactaattatcaaagtgttgtgtgcagtcattttaggagttcacaacatgcttctcgaatcacatccggactctgttgtcataattgtgcctcgacatccacatcatggccaacagattgctcatgtatggtataccacaccttctgcttatttcatattaatggcttattgaaggttgatctttttggtgaatcgaatttcattgtcctcagctttttttgtagaaactgcggaaagatggccaaagtgttgctctaaggtctcaaaacgaaaagcttacaccaaggaagacgaatatatatgtggtggatacactaggttagggtttcactacttttagtttatcttcctagtgctagtcccttttctttaagaaccctatctgtgtctgcttggtttcttcaggtgaactaagggaattgtacagtgtcgctccaatagccgtcattggaggctctttcatcccgggcttaactggtcacaacttgtctgaagcagctgctgctggctgcgccgttattacaggttctcaatgataaagattagatgcttgtatattatcactctttctctcctttatctcaacattcatggaatctttgattaggttgtcatgttgggcatttctctcacatggtgaaggcgatgcagcaggcgaaccccttatcggtgacacaggtctcgacaaaactagagctcaaagaagctgtcgacttgctcctgagtaaccctgagatcttggaaacacatcagagagcttctaaagacgtttatgaatctctatcaagctgcattatcactaacatctggaaacttctcaatcttcatatctttagagggaaatcaagaaatcacattgaatgcaaatgatgaaatggctcgacaagtcaaaatttaattaacaaaaacaaaacctcttctagggtatataaatatctctatctgcaaaagtcaaataaaaaccatggagaatcacaatataagaccatatatagtggatagactcgatacaaactatagaggggactattgagctattctctctcaaactgcatcctgcttaatttcatcaagtgtggaggctttccttttctttactttcatcgttcttaatttcatcaacagtgtggaggcactcataatctaacaaccatcaatgaactagaaactaaccttgacactcacaatatgtccctgcttcatcacttaagttaaatccttcttcaaaaacctcatcagttgttgtcattctcatacatataacatgaaggacatttggtttcttaatgctcaacctggaacatggccgaaaaaagaaaaagagagaatagaaatcgatttttgcgaatactcatatttgaagaaaaaactgttgtagaaaaccagtacttacattctttggtggaaactcttgactttaaagtgactcccaagttagggttgtcggaagaagaagacgagaggaggagttttaggtattgtttaagttgttccttccagacccgggcctggaccgaagtccatgtgttttgagcaaacaagtttttagcagtccaaaacccatgcttctgagttggttattgcataagattaggcctgcgttttttgtccaaaccgaacagattgattggttcaaaatcggtttaattggaagaatcatgttcggtttacagtctgcttcggttcgaaacattcctacatggctcaagtttgtgaaaaatgtgtttactaccgttcctatatgttttagtcttttagaggccataaaaaaaattaaaaaaacatgatcaatttttatgtatgttgtatccttctttcctgagagaagactcttttaaagctatccttcctgtttttgaaaaaaaaaaaaaaaaacatgatcgatttttgttcaaataaacatttaattcttcttttcattcaaaaaaaaaaaatgtatccattgcaattgaaatcaaacttttatattattaaattaataatatcatagtttttaatataaatgtagtggttagattttttgaaaaaaaaattgataaaacgaaaagaaaaattaatgctttatatttgctacacataaaaattcaaaatgttagaagagttgagcaagtatattcatcaaattgttaaaagcgaacaaaaatattttacagaactatatatgttatttagctagcttacccaacaaagcacccgtggcctaatggataaggcgtttgacttctaatcaaacgattgtgggttcgagtcccaccgggtgtgttattttccttttttttcctctattctgtcaaggatccatttttcagattttacttttttcttttaacacatacaagttcgaacttcgagccatatattatctatactgaaaatctaaagatgtcgaagatacacaaaaagtagaagtcagttcttgtaaaggaggaacttttgtctattacacagatcaactcccacattagttcaccaagtctggcttcatctccaaaataagtcacactaactattgattacatagcagtaggggttagtgtgctgccttgttcgtttttgttcataatcttgaccatgctcctccatttgtccttgagatcagctggagtacgtgtttcgtggaacaccttctctcccatttccagaattttcctccatggcatgttcttgtttgcttctgctgcaaatttctccactcccacctgaaccaaccaaccaacacatatatcaacaacaattcttattcaattcatgaaaatacagctagtgtaggtttggtatatacctttagcatctcttcttcttcgtacgtccaaagtagcctccttctttgatccatcttaaagaaagaaatgtccctgcaaatccgtgaggtaactttctaaatttaatgtggaaatgaactcttgatgttccagtgagtgaagaaaaaggaacaacctcactgtctttgacttagccacaactttggttgttgcctgctggttcctcattctccctgacggggaggttacttgaaccgatgaagttacctgctcagttacatcttctccatttcgttcgttacttgatccctttgatgagatgtcactatcgataattttcaatcctctccttcttcgcttctcattctgctggacctggtcctgttcttttgctgaaaacgattcttgcatagacaaaaacgaagaaacctctctctttttccctgcacctgtattcaggattcttgtaccttgatctttagctgtttcatcatcttcagcgtcttgaaatttttctgtagctaccttctctgatgctccaacttcgtcaatcactttaccagtacccactttcccttgatccgcatctggttttgatgaacagccatccttctctccttgtaactcatgatcacttacaatgtctgtactctgctcttggtttccaatttcatcaccagataaggttatatcctcatccctgcttttcatctctttatctagatacttgcagaccgccttttccgcctcaacggtcttttctctcaatgttttggatttcagtgcaacaatcttgagccagcaataaggacaaaatggattcgaaacatcctcactactactactactactactactagtactacccaaatcagcatacaaacactcgccgtgaaacgaaagaagacagtcaaccccgcaacaacgagatacccgctcgtctgaaacttcacatacaatacaagcatccaagtccagcagcggctctacagatcctcctctatcagtagtctcactagtcccaagacaacgacgcttcttgtgtggcacatctctttcatcacattgtgtgttttcattagcttcatcatcctgtgaaaggatgaccagaaatcattcacaaatacatcaaccgtaacagtttctatttcgcgagttccaaatttaaaattcaacctccacaatcacacagaatccaaaacaagctttgattataacatacgaatcaaaatcaaaaccaaaatcagtcatgtagctgcaccaggaaattacaagctctagttttccgattctaaaggagactgttccgagaagcaaatagagacgaagggaagaaataggtttaccagaagcgaatcgagggatttgcgcgaagacctaaccggaatcgatttggttctcatcttcatcttcgacagtttcttctcaatcatcagtctcggtttaaaattggcactctcgaattcaacaatggggacgttatatgaacagtgaagagtgtctcttctcaattgtgaagcgtactgaggaagatggatgaataaacaaaataaaaaagtattatgtgataaatttagcaaatatagaagaagtcaattcaccttttaattaattatacggataacccaaaattttatgtatattgaatcaaaaatatattttaacttttttttatttatttagaatttttatatatttactgacattaaaatttcaactttaaacaatagtgtaatcaatatataaaatcataattcattaacagaaaagttttacattcgtaaatgattctttttaattgacttaaattcttgaaaataaatcacatatttttttgacgcataaaacatacacatgtatatactagagactatatgtcggatgattcatcataataattatttacttttttttaacacatataaatatttactataatgagattaaaataataaatatatttaattttttaaatcatgaaactactaagctagttattatagaaaggaaaaaaaacagagagtttagttgatacgccataaaacagggtttctttcttctacatatgtgttaggtcttcatgagtcatgaccattttagttccacaagccttcaacaattaagttaaaagaagattgtagctaactaaattttaaaatattgttgacttttgtaagtaataaacttgcaatgtataagtgggttagtcttatggaacttgtttaccttttttgttactatatatgtctggtcaatttgcatagcaacaattaaaatttgtaaaatgaatgttataaatatggtcttaaattagtgtctgactttaacggcgggatttaattgttacgtatttacgattttgaaactaatagtgaaaaaggagacactgtaccaactttaaccttcactgttatattcatctttagccttcttcacaatatttttaccttttcagttctagagttatttaatggtggtgtaataaatcttactatcccatttatctatgtgagggtggtaattagtttaacccaacaaaacccatcaaaaaaataaaaaagtaaatgtataattcacattatatatttcatattcacattaagcaattctcagttatatcgtatatatagcataaatacttggaattcaattgttatataatataagttcttacttctaattccttataaagtccctacattttactataatgtgacaagtaaatttagctcctccaagaaggggggacctttttcttgattaccgatcttagtaactgatggatctaaatgaaatcgtctttttaattttatttttatttttgtcgtctatatgaaatcgtgtatgttatataaaaactaatgaaatcatttggggaaagtctcaattctcaaagaacaataacaaaggaatttagttgtgaattatacctgtacatgttggattctcctcaatatctgagtttttagttctggctctcctcttttttttttttttttttttttttttttttctaatgcatgcatggagatgagagtgagactctgctaaaagtttttattcggatattatttaatttgtttgacagtattaacaaaaggcttttaacttttaagattctgtgaaatcattcatcatgaacccaactaattaccttctggttcttaacattatctactactcgaagagttaatatataaccctataacttcatcactagctctattctaataaagatgtatacgaaattatgaataaatattacattatatattttcgtatgtgaatgtataattaaatacacaaaaagttaaaaggattagtggcgataggacaaaacggataagaaagaaatggaatttcaagctgaatgatgattctaaatgattttatgggtcttaattttagtttatttcgaatacaaatcggtcttatttctcatttaatccagacaaggaaaaccatatatatattggcgtaacacgtaaacatttaaaagttaaaaacacgttatttttggtccatatcgaagactttttacgtagggtcttagctaaaatagtgaaatttgcatattatttttttaagaaaatagagtatgaaatgttgttatcaaacggatcctttacaatgaatgcaatcatcgaaaaaaaaccataaaaatattcttaaaaaaattatacactatgaaaactgtgatgtctcatctctttcaagggtttaggcttaaaagcttcccttttctcttatacactgtcgttagttttaaatctcattacttatcatcaatctgttcaaaccctatctacttttaacatagaaaaagattcctttccttccctctctacccttctctctccatctcttacactatttacacatcaacaatttgttaagtagcaattgaatatgagagagagagatatagggagagagattgtgtgtagaactgcaagttaataaagaatgtgggggtaaagagtacacagtagatgaagacaatgagacttagttttcaaacttcttctttgctttggcttttattggtcatatcagactctttatttatagatgatctacttagctctctgtgttgattcttagctttcaaaggtagcttttggcctcaccctatatactctatacaggttactgcacatatacattggtatggacttgccactagtgccaaaccttttgcacattaattttcacatatatataagtagatttagatggtgtatatataagacaaaacaataactgaaaatcttaggaccaagaatgaaggcataaccaaagaaggggggaaccacattgtcagtttttatggagtttttgggggaccattagtttcgtttcactctttctctttcacttatttaagcttaactttgacaaatacgtacccccacctatattactacacgaaattacaatatatttatatataaaatctcatcaatttcttttcaactacatttatgtttccatgtttataaaattcagtcaattaagacggtggtttaaatgttaaaggccacaagtagatttatgtgaatgttaaaaagtcccaagtttagaaattccgtcaaatataattaatccatgcagattttgatttaccatttattggtttacactagattttcaaaaggaatatttggtgcattcacacaaggctcaagattgtttgttttttcttcaaaaaatatgatattatcaaaacctctaattttgtagcaaaatcaattttatttaaatctaaaacatgtattgtcttggttggttcacatcatcttgcaaactctgtaacactataaattgttacaatttgtatgtttatcgaaaaagcgcaacgataatattgacataaacaagtagattaggtgtcatgatagtatatatattataaaaaaactaatacgaaagaaaaaacagtttcccgaaaataaattaaaaattccaagtttgacccttggacacaacaaaatatatcaacctatattaatgttagagagatgatggatgatgattgatgatgtgcaaatgagacaaaattatatcacactttccttttcaatctttaaattccaaaacaaaaggtactgttgggttgctcccttattaggtgaaaaaaacctcacacaacacagacaatttcactctgtctctttcactacacctctatatctccctctagatacatatccctatttatatatgtattgtttcgaacactgcgtgctctcacactttgttacacctccaaaagacaaagtacatagaagaagaaacttcttgtcacgcctctcttaccccttcccttgtggtccaataaaaccctaattttcttttctttcttttatccattgtattagatcctatatctttcttccttatagaccatctctcatgtcttcttatatatattaagatattcacaagaactacaaaagaaagaaaggagatggagtggtcaacaacgagcaacgtagaaaacgtgagagtagctttcatgccaccgccatggccggagtctagttcctttaactcgctccacagcttcaactttgatccttacgcaggtatattcacacaccatcgtaccaagtctgcatatgttacatgctttcgttttttttacttttagatgtgtttaattccatatttgacgaattcatgaactttaaaaccttatttatcccacttgcaaatgttctcaagaagtttttttttttctgtgaatgatgtaaagaatttcaaatatgacgtccctaaacttcattccaaatgtcaactaaaacgttacttttctgatgagaagctaagattttcttatcttcagtctacaatatctataaataaagtttcttacttttttcttgggatcctacaaaaacaatttcttgggatccaaatgcaaaaaggtaaaacgtcacttttgaaaagttgagattcgtttatggtatagttcactctaagaaaaatggttgcggacataattttattcttcttatacttttggaagtttttttttttttttttttttttcgtataatgattatattgttgcgcttctatgtttaaatatttccttttatcctttcggggcgtttgctaaaatgtttaacagcaggaaattcatatacgcctggcgatacacaaaccggaccggttatctctgtaccggaatcagaaaagatcatgaatgcgtaccgatttccgaacaacaacaatgagatgataaaaaagaagagactaacgagtggacaattagcttcacttgagcgaagttttcaagaagagatcaaattagattcagacaggaaggtgaagctgtcgagagagctcggtctgcagccacgtcagatagcagtttggttccaaaaccgccgtgcacggtggaaggcgaagcagcttgagcagttgtacgactcgcttagacaagagtacgacgtcgtttctagggagaaacaaatgttacacgatgaggtttgtgtattatattgcacaaaattaaaatcatgggatctaattacatattatcgttttcttaatttatcccttaaagtcttgattctatcagattgccccccttaaaaaattggattggtggtgcaggtgaagaagctgagagctttactaagagaccagggtttgatcaagaagcaaatctctgccgggaccatcaaagtttccggtgaggaagacacggtggagatttcatcggtggtggtagctcatccaagaacggagaatatgaacgcaaatcaaatcaccggagggaatcaagtttacggtcaatacaacaatccgatgctggttgcttcctctggctggccgtcatacccctgatagatgttgctgatctcagagagagggaaagagaatgagagaacgagagaaagagagagagagagattgtgtcaaatagagctttagactaggactttagtagtgttatagactaagacaagctttctctcattgtacgatcttaaaacataaatggcacgttcttggatgcgagattgagtctgaaaattgttgagttggttttgttgaacaactatactatgaacactcagaattggcgaatgtccgaaacaaaactagctataaaccaaaataatgacgagagtaaacgagattgtacaaatcttgacactgatgctcagcattttccgcttcccttcaccgaacttgagacctcttgacgcaaaaaaaagctgcttaggctttgtgtgtgtgtgtgtgtgtgtgtgtgttgtagcttggtaaaaagctaatctttatatgtacatgactgtctccaggtaagctttgattgaagaaggctttagttgttaaatatttaagaactttacatttcgaatcagagatcataaaaattgtaaccttgacagtattccaataactgtctcatattgataaaacatcagacgcaaaagccataaagtgatcagaagtagtacgaagctgccactccattgtttatatttggaaccgtcgttgctagtttgtttgggcctagtcaggagttattttgggcctaactaagagtcagtgaatctgagcttaaagtttggtaagatgtgtaacttgtaatgggccaatcaaattttgaaccaattttagtattttacaaaccaacttcgaatagctgtctttaaactgaaatatacttgatcctaaacattgaacacatgtataagtaataactaaaataattcaattgaaattaattaattaacagagtattagtatatgaacaccaaaaagtcgcctaattatatcgtcacagtatttcagtgcacaagctatttttcttcttcgaatgttccttgacgcctgattatttgtaaacttttaagttaacatattaaaatatgcaaatataactattatttgtttattacaaattaatgaagaaaaacgcccaattataattttacacacacacacaaacaatcccgggacttttcaattatttttcgttacacacgccaaacaaacaaaaaaaatctgacaaaacttagacttcacgaatcttcacattcaatctcctcacccaaatcgaatgaagaatcatatgaaacacatcaaacctcttagccggag

SEQ ID NO: 1402 - DNA, 96936 bp, Arabidopsis thaliana
gaattccataagtcactgcgagtttcgcgctgtggtgaaacaagaaactcttcttcataaactcatcaacctcctgaagaacatactctgtgtttggttcgtatccaactttcagacattccattatcagtatctccaatcccctgtatatgtctttctcttgcgggtgggatgtgtcacgcgcgtgaaaggaatgtattttgttctcatggattatccagcttttagcaggatgtttccggtaacctctttcccgcatttcctctcttatcatttcagagcgatgccagaatccggaagctgagtagatgttggatttgaggatgtactcagacggggtttctggctttgtagatagtataagctttgctactcgtttcgcaacgcttgtgtttgaatgtattctgcagctatcaagcagagctctcaaaacagagacctcgggctgaaccggcattgagtttattgtgtcttccgcttcttcaagaagaccccaatgaccaagaacacggacgaatgcagtgtaatgttcagtcgttggttcaatgtcatagatagtcttcatggagagaaacagatcacggcagctactaagcttatttgactctgtataccgaaatgcagaaataacaagagtgagggtgattatgtcaggcttgatctctttctcattcatcctcgaccatagagccagtgcctcatcaccatttctttgaaggatgtagcaagaaatcaagctgttccaagaaataacatcatgttctcgcatagtgttgaaaatctttatggcatcatctgagtcacaacatttcgcgtacatgctaatcaaagaatttcccaagcttatatcagaaaagtacccagctttaagagcatagcaatggatctgataacccatttcccgaaaacctaatgtcccgcagaccgcaagaatcaaagtcaacgaaacttcatctaaaaacaacttctgttcacagagagtgcgatggaatagcgatacagccttatcaggtaagccattccgagcgtaaccaccgattatagacgtcgttgctttcgagctatcgagattagaaggccattggtcaaacatctcctcagcatctgccatcctttcacaccttgtgcacatatcaagcaatgcagtctggatacaagggttgaaagcagttccaaacttaatacaaaacccgtgaatctgttcgcttactttcttctctgaaactaaaccacaagcatcaacagcgcttgttaaactaaaatccgtcaactcaacacctctctgcagcatatcagtgaataattttagtgccttcaagccatggccatttctacagaacccagccatgagcgcattatacgtaatagtgtttttttcagttacattcgcgaatatctcaacagcggaatccaccattccaaatgacatgtaagctgtgatcatctccgtgaaagtaacagcatcttgcgccatcatcatctcgtataaactctctacctttttcatatcccaaaatttagaataaaacccaatcagagcgttgttcacactcaactcctgcatcaaccctatcctaattgcacgaccatggagttctctacctctcaataagacactagaatcagtacaagagctcaaaagcgttgaaagcgtaaaactatcaactccaaatccttcgactctattcatctcataaaacaaatcgaaagctttatgagacttgccctctttcactaaactcgaaaccacagtgttccaagacgccacatctctctgaggaatttcatcgaacaacttaagcacatcatcacacgaagacccagaatccttatcatacaaactcatcagcgaattactaacaaacacagaattcaaaaaccctgatttaactatcaatccatgaatctgaatcccaagcgagaatcgggaaactctcacgcaagcagtcaaaatcgctacaaaagtatactcattcggctgaacaagacctgcttttctcatcctgaagaaaaccttaagagcctcaatttcaaggtttaaccttgagaaacccgagataagagctgtgtaagaaaccaccgttggcgaagacagagacacgaagacgagaatagcttcacgagggaaaccaagtttgagataagtagagataagggcatttccaagacgggttttttcttctctgagcttaagaaacgaagcgtgcacagcttttgttacctcgacgtcgtggtattgagcagacaatcgaagcagatagaaaaacccatcaataacagattcaatgtcttccgtttcttctttatcgaacgatgaagaagaagaagatgaggaagaagaacattcatggattgttgctggtgaaagagacagagacgcagagagagcaaagaggcgttctggttttcgatagagggagagagaagaaagaagtttgggacgatgattcggaggaattgaaggtgggatatgaggaaaattgaggaggcagtgatgattaacggtggacatgaatgaatttttgagcttttgggcgcctaaatcgccatggataaacctttctcacttgttctatttacttcagaagagaaggaccatttttgtaatcaagcaatttatttaaggtccctatattagtgggaaatatatacatttcgctctttactattgatatgatcaaatatccccgtaactgaaattatttatttacaaatttatttattaaagaaagcaataatttccaaaccaaacctttagttaataatctccaaccattcattgaactatataacgatctaggatatattttcatcatatattcatatttttgactgtttgagtcaatgttttggaataaagttaggtttaagagatgaggggtattccttggacaagaagattatttgcgataacacgattggctgcctcggatggatgaaaaccatcccaaaacacgtaattcgtagcattcgagcatgtacccaccgacaatgcattacataggaacgaagtttccattgtacccgttccacaacaagcccttcttgattcgaaaaaccctacagtttaaaaaaccattaacaaaagatattaatgggaacaaaaaaaaagaatgtaggtgttagtcgaaatgtcaaaataccgtaccatactcgacagggtttatgaccatgttcaatagaggattatagatgtcaaagacgaccaacttcagaccgggaagattgttggttaagttaatagacgtgttgttgagtttcgtattgaaggaaactgcatcctggtttagtctttccacgcacatattgttcccgaccccaccaaacagggttatcgctgctggtaaacaacctaatggcggtaacgtcgtcactccaatcctcctagcccctaaaccatacaaattctgccaaaaaagaaaaccggtttagagagtaaaccggtaaaattaaaacttggtgcgttgtagtgttggttaagttacttggacaaaggtggaataggatctcaagagatgatctgagtattgatcaggcgtgaaaatccggttaaggatcggattgatgtaataactttgaagaaaatcgcttgatcctgtgcttagaagatgaattgcacctgagaatatctcatttgctctttcttttcccacaatgttcgtcaccttgttttggtactctttgtagtttttcagctgctggctcaatgttattgcattctacaataatgatcgataagaccatatcaatgttatttattactaacttaatatatagctacattaaacaggcttgaggagattaattagttacgtaaaatatggcagttgcgtcgtcaaaaccggaagctccagatgcgaaattggctccggttaacaaatttgtctcatttgcttcttggctaaggtaagccaccgggtaagatgtaaaccctaaattctcagctgctcaacaacaaacaaattttaaggaaaaaggaaatgcatgatagattgtactataatgtgaattagctaggctggttcgaaccggtaaagtctgtggcaagttttccgttagagaaacggccagttgcactgtgggcgacgaagtcacgtccgtagggaggaaaattggctttgacgagggtaatacggtggttgttgttaccggcatcaacaactgaatctcccattatgattagagcccggtacaagtgtctcacccggtcccaacgcccggcgtagaaacaggcgataacccgataagcacatcgacattgtaataaacatcttcattttctggttgaatgcagtaaaagattttgagaggactgagtaccaagaagtcgtgaatgattagggttttttggaagagagattaaaggagttgcttgaaaaagaagataacttttagtttgtttgaacctgcttcgtagtacgtcgttcgtattcgaatttaaagagacatacgttacctcttacactattctgccataccagaaacaaagattttttctttttaattatttcgggaacccatttgtaaattaaaatacccattaattcgttgggtttagtccaaacgcgaccacgaagagatcccatgttaaatcatgtgaaagaaactaactttccccttgagctttctttgtttatatcaagaatagttttcattatatcttttttctgtgttttgtttgatcatataacatcttaactatctgaatcaatgttttggaataaacttaggtttaagagatgaggggtattccttggacaagaagattatttgcgataacacgattggctgcttcggatggatgaaaaccatcccaaaacacgtaattcgtagcattcgaacatgtacccaccgatcttgcattacatagaaacgacgtttccactgttccggttccacaacatgctcttcttgattcaaaaaaccctacgttcaaaaatataaaaaattgaaatatttaaaacgagaaattaaagtgtcggtgttagtcgttaaataaagttgcggtttgatagaaatcgtaccattctcgacagggttcatggccatgtttaagagaggattatagatgtcaaagacgaccaatttcagaccgggaagattgttggttaagttcatagacgtgttgttgagtttggtattgaaggaaaccgcatcctggtttagtctttccacgcaggtattattgttcccggtttcaccaaacaaggttatcgccgccggtaaacaacccaatggcggtaacgtcgtcactccaatctttctagctcctaaatcatacaaattctgccaaaacaaaaaaaggattggaccatcggtttagagtaaaccggaaaagttaaagataggtacggtgtggtgttggttaagttacttggacaaaggtggaatagggtttcatgagacgatctgagtattgatcaggcgtgaatatccggttaaggatcgggttgatgtaatagctttgaagaaaatcgcttgatcccgtgcttagaagatgaatcgcgcctgagaatattttatttgctctttcgcttccaacaatgtttgtcaccttgttttggtactctttgtagtttttcagctgttggttcaatgttattgcattctacaataatatgatgaaaccataaaatgttattaagtattccggtttgactaacttaatagccggattaaacatggttgaggaggagttaattagttacgtaaaatatggcagttccgtcgtcataaccggaagcaccagaggcgaaattggctccggttaacagatttgtcccattagcttcttggctaagatacggcaccgggtaagaagtgaaccctaaactctcagctgctcaacaacaaacaaaagcctaaggaaattaaatgaaatgatatatatagatggtacgtactataacgtaaatagtgaattaggctggttcgaaccggtaaagtctgtggcaagttttccgttagagaaacggccagtggcattgtgggctaagaagtcacgtccatagggaggaaaattggctttgatgagggtattgaggcggttgttgttgccggcatcgacaactgaatctcccattatgattagagccggtacaagtggctcaccggtcccaacgccggcgtagaaacaggcgataaccgaaaaggtcatcaacattataataaacatcttcattttctgtttgaaataatgtagtaaaagatagagataggagtgagtgaagagatagggttttaaaggaagatagattaaggaaattacattcatttgtttgaagcttgcatgcttcggtagtaacgtcgtattggaatttaaagatggtagaccttaacacgcaattcatccacaagaggacatacgacacctctcacatttttcatgcaatcacaacaaacaaattaaaggatttttttttttttggttttataactatttcgggactcatttgttaaataggtttttttttttttttttttttgttaaacagtttatcattcgttgggtttagtcaaacgatatacaaagagatcacatgctaaaacatgtgaatgaaactaagtttcacttaacttttacttcctaaattcaacaaacctttattgttttctttcttgagactcgtcctacgtcatctcctttttgtctagacctaattaatgaaaccaaaattctaatttgcttacgtcgagtatatagactgaattcggttatccttttttttcggttatccattaatatgctttcaagttttttggtttatagatctattgtttcgttataaacataataagttgctaagctccattttttcgttatttttacaactcacaactataaagtaaatatgaatttatataaacagagtaaagtgcactttatatattattgatcaatatgacaaccaataattaagattgatcgtctctaagcatcagcatatagataggataaaagtattaaaaattaatttgtcatagtatattaaacgagttgatgagagctacattattcaaaatatgagcagtaaaactggttttgaccatgtgaatattattacagtaatctttgaatacacacactgacttctcaaagccattaacaccaaaccttagctgttgggttactgttgcatgaccactttttccggttcaggccccaattgggtaaagtgggctttgatttggaaagaacagagatcgggtttacagtcaatccgaaccgatacgatggattaagaaaaaaatccggtatggactgatttaactgaaccattcggtttcgtcccgtttccttagttcacttctctcgtctatccccagtcgtcgccgattctctcttaccggtgtcaactcgctccaccgtcggtaagttccacgagaaccaaataaggtttccaatctcaatccaattccaaatcaatttcgattctcgtagaactagtccagtgaatcagttttgctattcatactctgttctcttatgaactaagattactatcttcaattcatagattagggacacactttgcataggttttggtgaattagcctgaaatgttgtttagttttcgaattgaagtaattgaatagatgcctagaaggccatcagggagaagaagattgtcaaagtataaacctttagcattttcatcgtttatacgttctcttgcctttgcttcaacggctagacgtaaattgcctcttccggatatgtcttttggttagtagtaacctcaaagattgagactttctctagacagaacatcgtagcgacttgatgagtatgtctcattcttaactttgtagatgaaaagttccataatttgtctaagaaagggaaagagaaatcatcgttggaatcctctgatgaagaagactctcaggtaaccgatttcgtgaagttactctgctattgatttcttttatctttttgttacgttttaattcgttgtttgatctttgaagggagatgtccaagcaggttttgtggatttgatactgaatcaaacagcgttaggaactgtggtaaaagtagcagatgatgaggatgaggcattatttgctcttatcactgctcttaacttggcaagatacaaggcaagtcatgtagactcacctctattaagtgaactttacatttatatatgcttaatgatcgacttgatcatgtgctgtgtatatgatttcatttgcttgttaagcttgttgaagtattaaatgatgttcaaaggtgtttattcgtatttgctattatgcttatggtgagcaatctattaacaaccgaatgatctttttttgtgtgttcaggagaataagtgctttagagagctaaaagagtttcttcttaaagtttgttcggagaagaatgtagcgagtgatctagaactactcttagagaaaaaggccaaagatgttggtttattggtctctcaaagagtgatgaatcttcctctacaactccttcctccactatatgatggattgttcgacgaagtctcatgggccactgaagacgaggtttgatctttcaaagttaagtttaggcaaattcttttcttatgagcaaattaaagatcttcgaaatttatcaatttgtaagtttctgtttacagcctacagaagagcttcgagggtcattccgcttcaagtcatatattctaatcgctaagatctacaaggtaagtgttctggtaaggttattttttccggttctcgaattctctttcttgtttcaacaatgtcgtggtgaagaagagaacgaggaacaatataacttaagcctgaagatgaaatttttctcgaggtacttattctcacattacctactcgacttcccgtctgttagcaaaaaaagttataccctaaacatgtgttacaaaatgtattgcagcttagctcttggtcattcatattacctatgtactcgcagcttgttacatctcaagaggtaagttatctctttaatgccaacatactttccctggaatcacaaaaatttgattcaagtgtttcaggtttgtaatctttggttataatggcgattggcgaatctagtagttgaagaattgtcagtgctggtcgtggagacacaaaagattcctgaattcagaaagaagttgaagtctctcattgacgaacaataatgaacatctcttcttcttaaagattcagctcaccggtcagttgttatagatctctgccagttttgatgaggttattacagtgctattttttgtcattctcaggctttcttcccctgcatattagtggaactgaaacattggtctactaccttttctttttttttgctcaagggtttatatgaaacagtgtgaaatgctatcaatgattcttaattgtaagtgttgaagtttagttagaaacagatgtagattggtctatttgattcataacactaaagttaaatgcacgagttagtgtaaactttgtatttatcttataaaagtatgtgtatagatatactcaaatgagacattttcagaagatgaaacagtagtgttgacaaaatatactcaagtatgtgttagtggatcacagcgcgttggaatacagtggtgatcattgggaataaacaatatagttggctatgtataaatgatctcaaagctatgcatgttaaccagaaatttcgagctagattgtgtaaatcagaaccaagattgtgaacagcaaatgtgttatctactctcttcgtcaacccttggactctcccaaaagacaatttgcttgtgatgtttttactttggtaacaaatagactcttccaaaagaaagtctttgagcttgaatacaaagttatttgcaacagaaaaaaaagaaaacaaacaaaaaggaaagtaaaaccagaaaaaaatgaaaaaggagaaagagacacatgttttttgcagctttcgcagtacaaaagcatcgcagaagaagctcctaccacttgaagatatttttataagaaaacatatatatgatttatttttgtttacatagaatctttatgttttaaaaaaaaatattggatagaaaatagttatacaaatcataattcttatttcttagttgtaactgatgaacgatttgattaattttattcacaaaacataggtaatctagttacttgtaaattaattttgaattgaaaactcataaaactcaacatagtaacacaatatgaacacacgttttatccaatccaaaccaaaaactgatatgatcaaatatgtatataaaattgttctaactggaccaatccgaaattgatattaaaatgagatcttgtgaagatgaaactgttggaagaattatccctaacaacaacatattattcgtttcagttttactttggttagtatttttagatcctaaaaagaaactcaaaattttccacaaaaaagaggattgattgaaatccatatagccttttttttgtaacagcaatacaatattatgggttagctataaagatggaaattgtttttattagaattttttttttttggttaaattattgaatttactttgtctacatgtatgtgtaaatgtacctcctcctcactttatgttggttacttgttgtgagtatatattatacgaggatcaaaccttaacacatgaggggacctagcacgactcttcgacacgttaaccaatcaaatttagacagcctttctatgttacaaagccctaaacttttaaaatattagaatttatgtgtttatacgaaggaccagtagactcggtccaagggttagtatgtttcttgctttctcttttttttttttgttactacatgcaacacgacaggtcgtctcttttaatcgtaaggttattgcatgttggtttgtcctcgagagtcgttctaaaccgaagtatggcggctaataatttccactgctggttaatcaccaggtttgcggcttcgtaccggtgaaatagaagatgttaatgtacttataaatctatgtaccggtagatataattcgttagttaatgcgtgatttgaatgatgtgatttatatgtgtaccgtgaaaaaaaaaatgtgtaccgtgaaatgaaaaagaaataactatgctcgtacatgtagaaagtaattacttgtgacaagacttgagtttgcataaattataaatcagatacatcaaatttataacaatattttattttgcatgacagttttgttttttgattttagattttttgttttatttttggtttttgatgaaaagagaaatgaaacgaatataaatgatcttcaaatgagttttagttaaattttatgtataagcaaataatacatgtacttggcagttggcagagagatcatatgtttgaacgatttttcttaaatacgtatttatgaatttcaaaacgattttcagtttcattttatgacacatacgaagagcatttcgatgcgattcacacccaaacagtaaactaatttttggcaatgacaaatatatttagattaggcaaatttttgagtgaaagaagggagggaacagaaccgagtacgtgttgattggtaataacaagggccactcattttatgaataaaatacgctataaaaagtgtgttttactgttggaaagatatttagccatgaaaacaaccataagtagttaaacacaacgcatggacattatgttttactgaaaccctaatactctacataatgttttagacttttagttcaaaacgattcatacccaaatactgacaccaatcaccatctcaattttggcaataagaaatatatttagatgtagcaaaattttgagtaaaatcagggatggaatggaacagagcacgtgttgatttgtaataacaccaaacgcgaggggccagtcattttataaataaaaatggtgtttcacttttggaaaaatatttagctatgaaaataaccataagtggctaaacacaacacaggcacattatgtgttactgaaaccctaaaactctatataatgttctagttcacagtgtctttttcaggcaaatcctaaagtctttgcatgcccttgatttggtagcgaatcaatttgcctacgtaggtgtactgtatatacttctttgttttttcttcagttttttctttatttattttagctctgaagtcttggaagcaataattacataagattttgttatggcacatgtgtagataacccttatcttatccctttttttttttaattcacaatgaaaccaaaaccagtttgtttttgatcaattttgctttgactattcttaagcaaaaataaaataaaatgattgaaacccacattgaacttaaactcgatttcaatacctttagtcattgagctggaacgaaaaatgtttatgatatttggtaatttgttaataaacgagaatccaaactatgtaatagtaatctaacaaaatcgaaacaagttactaagttagtcgtattttgctagatttgtttatatgatagcgaatatacatgtagagaaccagaagttggtcggcgttgaggataattgtaacagtacttagccgctaaccactgaattaatgacacgtgatctctcttgagtttaccgttgaaattaatatttcccacttgcatctctcatttctcaaagatgggtctatcattcaggctgtactatattctttatacacccaaaatggccaatccatttaaaaaaaacttttctccatttgaacactgaatcaatgtagaatgctaatttcttcttgttgtcaaaaactagactgttaattacttaattatacttttgcaacttgcaaggtagcaaaaagtaaaatcttaagtaaaaatatgaaaatattgtaagcattttaatgattaagacttgttatttaatggttattcggttgaatatagatattttttcttaaaactcttgacaaaaaactatatctcatacctcatatatacatataataaatattttattgaagactgacttttctatctaatatgtttcgaattatatagtttgtaggcagagacattttttgtttaccgcggacatgtctacgctagtgagggatttatacccaataaatctatatttttgacgttgaattttggaatgtaataaatatatatatagagaaagggtccctatagagaaatatacatatgcctattagatttttttttgaaaataaaaggtggttgtttgtcacaataccagccgtgaaaatagatatgaatatgatcgccgagtaagaagaggagaggatcatattttagatggtcatcaaggtcttgtcactttgaccagaactaaaaaaagttttcatcgtttaactatccttttccgtatctccacgtttatcatataataaggttcactacatgtgatgtgacctatcaagccatgtatgaggatttaatgatttatatactacagcaacttagattttattaattaatcaagagtttactatttttgtagtattacaatgctaaacatgatatgcaattaatctagtttttattctgataatcgacagatcgttatcaatacttctgtaaactcaattgatatttcggattcaactcatctttggcagtttttattcagagtacggaaattcagaacacaaataaacatgagattacatgcaaattttcttctttcatttttgcagtttatgacaatcatgaaactagcgtttgcgtgcagcggtttctctttgtgcgttaaagaagacggccgcgacagggagaccaagatcatactcgaccgcaaatttacgagtgttgaagtgatctctcgaagggatattaggaaagataacacgtctttgcttctgcctgaacagaacaaacacaaacctatgtatccctatgcttggccttggcaattcatagctcaccacctctttgcctatattacaatgcaaatatttttatttctatataacatgatatatgtataagtatttaaattacaagattcatgaagaggccttaccaaacgtagcatctgttgtgccgggaatgtttgtaacgatcctattgaaacattcaacaatactaatattattactttacagaaaaagttctgagaactcatggcgatggagatctttgaccaactcaaatgtatataacttacacccaaaaaaaactttattagggttataacgaaatgatttaaatgcaatgtatatggaatatgggcccaaaatgaaaagaaagaataaataaattaaacgtaccagtgcaggtgttcttttagaaaggggtcactaggacctggaacatctgggtctatcatcacctgttttgcatttcggttgagttttaccattaaaaaaaaaagactggaaaaaggaatgataaaaactaaagctacaatttataagattattgagttagaaatggaaaacttgtaagaggaaaaggaagtgagacgttttatatggttttttttggcacaatataaataaaaccaacattattataaaataatttaaatatatgtatttaccaaagtgaagaaggatctgagatcaccaccatggatctcaaccctaggcttggaggaaacagaagaaggaaagagctcatggccattggagacttgcttcttgttataactaacattcatcttagttgttggagtgaagaaatcaagaacatctcctaccactctccccattatcaatggctctatcactctagttcccatattctccattttcttttgttaacttagaggaaaagagagatttgtagtgatttgggagacaaagagacgaccgagacatctatttataggggttttccgtcttagagagagagagaaagataaaagaatcaatagacattaattcccaattatgtgtactaacctctttctcttttttttttctttttctttttctttttgtttgctttctcaaacatgtacaccaactatattaaagtaaatttggggggttttaataagtaacttattttaggtgatttaaaactataattatatttaattgaattaagaaatatcacttttttggtattcactatataattacgtttgacttcttcagcaacattgactgcttcagcaacattggcatatcatgcatggtttcaagtttcaacccctatctatgaccaagactttatataaataccatatcgatcgctagatttcgttaatatatagaatatcttttgtgtcacgaagaacaaaacccactaacgtctaaatttcgacaaaattcctagctatatatacctcggcgaataaaaagctatttttaagtctcactggtcgatgaattcaaaaagaatttcagtagaacatataattggccaagattaagatatttgtcataaaaacactctcatcgtactttgattctattacaactccggatacaattattgctcagagtaggcctgggcaaaaaaaccgctaaccgattaaccgaaccgaatcgaaccgaaaaacatggttcggttcaggtttggatagcttaaaataaccggttgaatattatatgtcttagatttcggtttcggtttcggttaggttaataaccgataaccaaatgaaaaccaaagcatatatgtatgatagataatatatcacagtatgtattgacacttaactatgtttttctctttattagtttgcaagttgaatttcgtgagttgtgaatcaggtgttttaatattatggagagtatggaccatctttgtgagttgtgaatatttctcttttttacgtacgttctatatcggttattggtcaaattttttggttgtttcggtttttagtcggttatttcggttttagtttatttatggttaccaagtttaatatccaaaccgaaccgaaccgaaagatatccgaaccgaaccgaaccaaaattcctcaaatatccaaatggttcttatattactataaccgaaataaccgaaaccatgcgcaaccgaaccgaaactgaatgcccaggcctagctcagaggctatttgaaagaaacatatcgcagatttgggactccttgctcgtggaacgacaacgcattgtcgcattgattcttaaaaaaacttctttttatcgaatcaataaaaccaacgtgaagaaccgattcttcaaattgggattctatatatgattattagttacaaaaccttaaaacttccgaagattttacgaatgcatatttcaaccataatactctattaatctgaaataccaaaagtgttatacaaatcagaaaatccgtagactaatataaacacacccaaaggttttgtcctattgaatataatgattattaacttattatggattctccactaaataataatttatttattttcttatattagaaagtcttgattgatgctttattaagatttggtaattaatcagaataaaggcacaaagcaaaatatatcaaacttatataaagttgtctacaacaaattctccaaacaagacaaccctttaacaatttagaaaaaaaaaaaaagataaatcgaattttcaaaaagaaaagagaaacatcaatgtgctcaatacaagtagacaacgtatcaacgacaaaaaaaaaaaaaaagtagacaacgtatcaactagctatttagcttaggtgaagcttaatccaaaagatgtagcaagcaacaacttacgacatgagtcacgaccccaaacccccccaaaagaatcttctctatccccggcctctggttattaactttggcgaccccaaaacacctctttgacgaaggaagctcttttggcaagtaagagccatagaactcaaatacgagaagcctggtcactatggtgacaaagtagggatgttatcaataaactaaagtctacactcgctacagtcttaagactcttaccaccacggatgaaatcaaggttggactcagaacggaccagggtagaagaaagtgattctgatgaggtattagctgctctggttggagtactactttaatttgaagcagagatttcaaacattagggtagaaacatatttgctttcaaattttatcttagccttgtagcttcctatatcagttttggttgatacatttcagagacattttggactcgattaaagcttcgattttcaattggaaaaaccaaaccaatataaccattcttctacgaatccaagatctgtggcgatggcaagaccacaccactgcttacccaagttataaacataacccaaaacacatgattcaggtagaacaagatggagaatagagcaaattcttgatgaacaatataaaaaagggatgaagagattttgaataccaaacaacttataaatccagcagcaattgtcttaaagcaacaacaaaattaagactccaaatgcataatccactaatccaatcaaagaaagcaaaagagaaataaccaaatgttttcttgtttccgcattttggagtatgaagaagaagatcaacgaagtctcctagcttctctctcagactcgagcaaggtgaggatatcaccttccctcactggtcctttaacattcctcatgatgtaacgatcagagtcggtaaacttcactcgaacctgagtaacctgaccccttgaaccagtcctacccatgaccttaaccaccacagcgtgcttgatctgagaatccattctgattcaatcaaccaaaaccatgaaaattcacattaaaacatcaatcaaatgcatacacaatcagtacacagtttcatgtaaagcaatcaactttacagagattatcacaatcagaattccttgttatgaaagtttcaatcttcagagtttctcatcgtaacaggagcaacactagggtttcaattatctaagaaaacaggggctaacttcaaataacagattcgatacaagacagatttagcagaagaaaatgtacaagagatagcaatcgattcgagatacaacagacaagatttgtaaacgatgaagatacctgtagatgaaggttgacggagatgcggcgataagcgtgagaggcaaaaaccctaattttacagagacgaaagaataagggatttctttgcattttataggcctgcttaatttcggtactcggttttcaataaccgaatcagttcagttattttaattttgttttcgcccagccggttcaataatttggattgaccgaatccatgcttttatgtttaatttacaaatccaagcttaatttatcaattttgtatttgtttcattgcttcttcttcttcatttttttttcgttaaagatggcgttttcatttactttggtttatttttctttggtttcaattacactttacgataaaattaatcactgaattttaatttaagaaaaacaagttgaatttttggaataacaaaaaaaacaaattaaaaaatttgtatgataaatgtaaaaagacaaattgaatttttagaatcattaacaatcaaatgacgagatttagaatctgattagttctcacgtcgtattctaaatttatcatccaatgttttattatttaaaatttcgaagaaaaataaatttcaaataaaaaaacttgtatgataaatctacataacaatgtaaaaacaagttgaatatttggaatcctaacaatctatgacgggatccaaaatccggttagttttcacatcctattgtaaatttatcatccatatttctattatttaaaattttaaaaactaaaactaaaaagataataagaaaaataaatttcaaataagaaacttgtatgatagatccacataacaatgcaaaaaaacaagttgaatatttagaatcgctaacgatcaatgacgggatccaaaatccggttagttctcacatcgtattgtaaatttatcatccaaatttctattatttaaacttttaaaaacttaaaaaaaaaaaaaaaaattgtgtgataaatctacataacaatacaaaaacaagttgaatatttggaatcgctaacgatcaatgacgggatccaaaatccggttagttctcacatcgtattgtaaatttatcatccaaatttctattatttaaaattttaaaaaacttaaaaattatataaaaaagttttaaataaagaaatttgtatgataaatctataaaacaatgtaaaaacaagttgaatatttggaatcgctatcgatcaacgacgggatccaaaatccggtttgttctcacatcgtattgtaatttatcatccaaatttctattatttaaaaattaaaaatgctaagaaaaaaattaactttaaacaaaaacttgaataaaatttgcaaaaaaacctttgaagagaaatggttgagaattaacctggcaatgggctagtcattgtttgatgggctggaattgttgttgttgggcctctgagagcacgctcatgtgatcatctgtttccgttaccgccttaccgggaaaacgaatcccccaatctccgacgatcgctccacctcctaaatctgtcgccatctccgtctccggagagaacctccaacatcatgactcctgaagccgctaactccttcgaatcgcctccgtttctctctgtttctacggtgagatcatcacaggcaaacaaattaagaatgtctctctgacgtttatatgagacgacgtgatgcttgtgtgtgtatgatctctctcgtcttattcatagctttttaagagaacagagagccgttgtatatatgatgagtttttcttgggccagaccaacgaatgattctttttaaacgaagggagaagaaagaaccagggcatcatcatctcgaagaagagaattgaaatcagagaaattgcgtctttagactcgaggagataacaggaaacgaggtatatttataaaacttatatgtttaagaattgagactcaagttccctttttttcttcccaaagtttccttttttccttttcacttagggtttgtttaagtccagactccagagcaaacaccaaccttaggttcggtgataatcaatctagccgttatacacggttcgggttaaaccttagaggtttggtgataatctagccgctagactcaagtttcctttttcccctttcacttaggaagtccagaccaacctttggttccgtgatatataatctagccgttatacggattaaaaatttccatttactagctgatacgctcctataaattgtattttgattgtattactactaacgcattgcttctcattttgatcacgttgatctattgttttgcagaacagggctaagaagaacagaaccaaagtatagcagtcttaaagattttttcatggtttgaacaaataaaatcacattgataaagatgcttccacaatacctcaacaacagaatgaacagaagcaaacaccaaaaagtcttcataaacattatctataaagaacatgagatatgtgtcccaaaaaacaaaacaaaagagaaaaccaaagaaagaaagtgacgagatttaacaaattatgttaatatgtagtcagggacgactttttagcgttgttgatcttactattttcacagacaaaagaagaccagagcccatccttcttgtagttatcaaacaaagaatccatgagccctacacgttgccttggtgtgctcagtgatctcatcttttgcccttgcagactctgtcacactcatgtaaggctgcaaaccatcggagctttgaaaccagctctcgtcctccactaatagactctgctccaaacggctgaaaaatctccttaggaaagaaaatggagagtcttgtctctacaaagttgtaagcttcacttttgtaggaacaagcatttcacttggaatgagaaattagtttatggattttgcagacttggattgatcaccccaatgttccagccgacagcttctcatccccatatctttagtgtacaatgactccacaagcatatgaggacttcttctctcctaccaaactgttatatgtaatcaaatgctctgcttttggtgtatctacaatgtctaaacaacacattaaggatgatatagaacatttatttcttactggaaataaaagaacaagttttgcttattacaatataccaaaatacagaaagaacaataacattttgagaaacagacacaaagaaacaaaagcacaaactcatatctcaacccctctctcccctttccttcttcatcttctttctttcagagccttgagacattgatagggtagtgagctacaatgtgattataaacagcaagtgtaagaaaatcatcaagctcaggtgcagtacactgctttgtaaacatcttgcaagcttccttatacattccattcttaaacttgtctttcccaacttctttctcaattctttccatctcttcttcgacaactctcccaaacaactctttactcactcgaactccaagcccgtctccatcaagttccactccatacctaatccattgccaattctggacacggcttatctcagccgtagcagcatcttccattaggttatagagtgggacagatcctgatcctgttaaccatgcggctaagtattgaattcctacacgtgtgttcagccttaaaccctcgagtgtacgcactcctcgcggtatttgaagcagatcttcctctgttattgcggctgcgtcctcgcgcttcactgatttgatttggtttggactttttcccatgtgaccagtgaatgcttccatgcagattgggatgagtcctggatgagccgcccatgttccatcatgccctgctcttacctctctcagcttgtctttcctcactagatccaatgccatctcattcgcttttgggtcatctcttatcggaatctgagccgcctgatcatcataccaccgaacaaatcaaaacattttcaactttatttataatgttttcacagagcattcatgtagtttgaaagagacatatagtgaactagtgttaagaggggactaaccatgccacccatggcgtggacaccgcgcttatgacaagtacggatgagaagatcagagtaacttctcatgaaatgctggcccatgccaactaggacacggtctggtaagagccggtcagggtgagcttggaaggttttgacatagctgaagatataatcccatcttccacagtttaaaccgactgagtgatcacgtagttcatagagtatctcattcatctggaagacagccgggagggtctcgataagcacagttgctctaatgcttcctctctctatcccagccatcttctcagcacgctcaaaaacactgttccatatctttgcttccctgacaagaaaccaagtaacctaattaaccctagaccgaaaaacatcaatttgatgaccgaaccaggaaggtacctagaatgttccattttggggagatagaagaatggaccgaaaccggaaccttgagtctgtctaaatttggcgtagttgtggaagaagtaaaggccaaaatcgacaagacatccagtggcgggttcaccgtcgatgaggatgtgagcctccgggagatgccaacctcttggccggacaaaaagcttagcggtttggtcgttgagcttgtaaactctgttccttgacttgtcgtggaacgtaatggatccatccactgcatctttcaggttcacatgccctctcatcagattctcccagcttggagacaaagcgtcctcgaaatcagcctgttcaaaccccaacacaaaatttacttaatttggttagtttaaaccggatattatatacagcagaacataccaaaccaaaccaaatcgacttgtatcgaacatagataaaaacagaaccggatcgaaatacaccaaaccaaacaaatttgatattaactagcctgccagaccaactaaatttggtcaattcctctgaatagtaaattcagacataaatataacaaaaccaaatttaaactgataccaaattgaacgcggtccaattaaaagtttgttacagtattattcaaaagtttcaccaatgtcggtcaaatccaatccaaaccaactaatgtgttgtataaagagagagtgaaagaaaatggaccataaagactttagctccggagttaagagcgttgatgatcatcttcctctcgaccggaccggtgatctcaactctccggtcagcaacggcaggagggacggaggcacagctccaatcaccgtctctgatgaacttagtggaaggatcaaacccaggaacggcaccggagttataacgccgtcttgcctctctccggcactccatggcatacttcacatggccacgaaactctctctgtaactcagccacaaagctaagagcttctctcgtcaaaatcttggcgaagatttggtcgtaccgtcctcgaacctccacaccatccggagaatcataaacggcgacgtttggtcgataaactgaggtctcgagctccatatttatttttttgtctaaattttgtaacgtgatatagtgatatataaatgtgatcgtgtaatatgaattataaaggtggaaatggataggtataatcggtgaaacgcattgacatgtgtgcctccttgggaaagtgtgccaagttctgtatgattttcgtcactatatcggttaggataggattatcacaaattttctatttataataatatccttttcgtcaccatatcgttttcatcatccaatacctctggctctgcataaaacctaaaacagttttagttgtcatgcaaattagtttactgattgcttctattggatgatgagaccaaaacatccttgttaacggattgattcagataaaatcgaggcactgttttgggttcaatccaaatgttttgaaatttggtcttaaactctttttttttttttttttttgttaaagtggtcttaaactcttaatatcccaatatgagatattgagatacatgaatgggagaagtttaatttttatcaacatgctgtaagatctggaatcaatcggacttgtaggtgtgcttgggccttggaattacccatcctctataactttatattagcccatttataaattagttctactgggttggtggtgtactggtgttcaccaaatctaggaaaattaataactgattgattcagataaaattaattcttgtaaagacaacggtcattattcttaattcttattttttgactgcatgataacgatcatattaacctattaaggggaaaactaaacttcacaaagataaagaaaccaagtatgactctcctaatatttctccatccttgactaaatataaaagtataaaactatcatgaacaactgaacaaggttgccaagttatatactataccggtttaataagtcaaaagctatttcatccatcagttttagatatcttgagagacaagtgcactaacaaaataatcgtagcccaaagtccttaaaatcattgatattatcttaattattcagtcacgaagctaaacacctaatgagaatctaaattaaacaaatctggtgacaaattcttaatgaatgatacccattgatttgaattgaatcttaaaaatgaaaaaggtttacaaacattagaaacaaattccattaaactagtagtagtacacaccaagagcactaaacacggctttagaaactctctctcaccaaatcattacaaaccaaaatcaacccttcaaaagtcagcctccagaattagggcaaaactgattctcttttttaagaacaaattggacatagaaccaaaccattctcattacacttcaaacacttaaccatactcttcttctcttcctccctaaccttgcagcttccgttgcaaacaacacacatcataaatctcattcctccacatccacggcagcaactgcctccaagcctcgccgccggaataccttcaagtaatattcccaatttgccctcctcttctaacctcatcacttcctcaacacttcctaccatcctccctttaacgaataccgcaggtatcttcacatgtttcgttcccataatgcccctgatctcttccttaaaaaccgagtgcatcgacacatctcgctctgagaatcgaacttcgtgtgaatctaatatcgatcttaccacattacaatcctcaaacgtcttccgtatccctctaagagttgttatgtagatcaccacagagtgctctcctcccggtggacatttctctgggaacttctcaagaattctctctgttttctctgtttttctgctctcgtgcaccaccggagaaatcaccatcttgatctgttctttctcttgagacaactctctttcgtaagaagccacaagatctggatcaaacattggactataactcttcctcctctgcgtaaccgtcaccgaagattcttcagatttaagaggaaaactcaaacgcattacacctctcttcggtgtttcaagaatgttcttcggcttcagaatctgattcggactcacacctctcgaattattctctttccctccaaatctcttactacttcctctcttcggagattcaacaaccgatttcaccggagtcttccatgatttaccgaaaataccacgagatttgggactaatcttctgtggattagaaacgtgcattgaatcttcaagatcttccataagctcccaagtattgataatctccggatcatctctcttaatagatcttctcggtatgatttcagattcaaagacttcgcctttagtaacttccagtgacttaggagaggtctctgctcgttcatcgagatcgagatgaccataagtagttgaagtaagagagacaatgtgatcgccgccattgttgactctaatctctcttatgagtttcttcttgcctagtttcgaagaaacacaacccatctttctctctctctctctctgtctcttgttttttttttactgaggaaagtttttatttttgggaagaacagagagattgaagaagaagaagagaggagttattttgtttttgtttttaaaacaatttaattactttcaacggtcatatttttcgaacggacgttgtggaagtgtaagtggatcgaaagatttttgtcggaagtccctgatctttatgttttattacgttttaatcgaatatatccttaaaatgttatgattggacctctgatggtagtacttaaaactcctgatttatttcatttttctccctaaagtatttgtttgtttagttttgaccctgtgactcttttatttctttgtcctagattctttcaattgcagactgcaacggtctattattgtacgttaagcgaacgttaaacgctttccaattttacctgtccttatgaatttatatatttcaattacaaaagttgaccattcttaattctttattgtataaacttatacgtaaaatttgttgaaatattttgataaaattgttggaagcaagcttacttaataataaacatataacaattttgtgttaaaaccttctcaatgtatatgatttttgatgatatcaataaattttgtaaaggtaaagatgcaaaattgcaaataattaagttacgtgtagcagttttattgttattttttactaaagagggacaatatatagaggaaaaaggagggcatgctaatttcaaagtaaacaaaaaaaaatagaaaatctagaccaataccatcacccaagattgcactttaaattaaaagattgataataataacagaatttgcatatctgaatcataatgccaccatacagaaacaaaccgtgcttagcctttttcagtctaccttttgtaaaaggcattcgttttaaaataaaattttatgaggcacaacaataaattgaatttatatatagtacaaagaaatattagtttttgataatcgttatttcttgaccctactaatgttggcacaactatatttccctccatttatgtataaattggattttcttagcttaagatatcgataaaaatgtaatcataacaagcaattaacaaacattattcataacaacaagtgcacaaaacgacacaattcaaccactaacaacaaacaaacaatttatatggccatatttcgaaactttagatttgaatttccgaatttgttttagtttattggttaaataactaattttggaaaaatctatatacaaaaggacacagaaaaagaaacaaaagatgatccaaattaaaatttaaataaaacggaccacaatgtgttgactgttgatagacttttgtaatcatatataatccgactcggaccacttgtagttctcggacaatcagcatgtgcctcttccagtctcttttcatccatcccatgattttgtctatttatttattttaccaaaaaatcagctttaaaatgatagatcatcatcaccttcaaattatgtacaccgaaaatcaaaacttggaggattattgtcacaattcctttacttatatataagtacatgtcttcatttaaaacctctacagataactgcgttcattttattgggggaacagaaagtaggctgaacatacacacaacaattaacatatatctatacggtataaagtgaggaagacgaacacttaggcagcataagtttgcttgagatactcaacaatttctgcactctcaaacatcgcgactccagtgtttggatcttccaggtaaggcacctataacaacataacacgaccatcagtgtcaacatactttaaaccttctcctctctttctctaggtatgtatttctctaactcacctgaaagtgaccagctttctcaagcaatacctgccgtttggggctaccacgagcacaactgatgaaaaagaacaagtaaaagggtagtatcaataaaagactgactttgaacccttgaagaacagatggtggaactggtctaagagactaagagtcttctttttgtggttgccatacctgcgctgaatgtgtggtaactccagttctacaagaacttcgcgtacaagcttacaaaacggagaaccctgcagggaaattcaagtagagattatttgttaaataagattaggtaatttgatgattgggaaaaagtgatgagatcaacacctcatatgcccagaattcgagtggcttaggtggtagtttcgctggtgtgtacaagttaccctgcgtggtaaaagctcaagcattctgtgataaaaccgttgcttataccaatattgtatcaatacatagtattcataatagagtttcggtgatgctatgctacctacccaatttattatagcatactcttccgtaaagaaacatttgttctttatgaagttttcttttcacattattgtctgtagagaaaatatgtcaaaagaatgtaatggaatttgttcttacctttcccatacgaccaatcattgcaaagcctgctgttatagcctacaacgtcaaagcagcaatgttagttttaagctccttgattctgaagcaaaggaaaataaactgcaacatgtgcaaagaaactgaccgttaaagcaccaagtgacagacttaaaggaactgttccatctcctgaataagtttaaccaaacagagggaaacagtattactcaaatagaaatgatgatgacaaaaaatgatgctattgcgataaccacaaaaggatctctaaaaacaatcagaatcaggcataagcagagaaaccaaccatatttctcggatagatatttgatgattccatctgattcatacatggacactccggtattgggatcaacctatgattaaagaaacattatataattcataaatacagaacattaaaatcatatttcttaccgatgaaagtggtggtaaggtaacagaaggagctttaacagggaatataagaatataagctcaatttggcattctaaggttttaggcagttcatgaacaaaaaagaacttgatattgcaaaaatttagcaattacagatgtattcttaaaccacattcctgtgattaacgcatcatgaatttgaactcgaagcaaggacatttcaggggcaaagacaattacttccaagaatggttttcgtgggaagaacgaaaaagaaatagaaaaccattaggataaaatgccaaaccatgtacggaaactgttgtttcccgcccatctgtttaaccttcgggcggaaatttggactccctcttggacaaggatagtagagaatatcaagatccaacactgcaaccatttccctgacctgcaaaaatctccatattagtagagttcactaagctgttgcgatacatcaagaataactacgaagacataaattttgtttaaggggaaccagaaaaaaacaaagaagcaaaagctaaaatgatcagtgggattcgaaaacttattttcatggtatcaagcaaagattataagtaaaataaaatcttcaggatcttagctaattgtgaaacatctaagacaatcacattgatcaagtaaaaaagaacaaagcattaccttccggcagaagggacagcttcattcgcataccggaaatggagaaaaagaaatcattcattcaatatcaaaagaaaacagaaaccaaatgtgtctaaatgaacaatcaaacacacagtcattatatatacatacccttcaaactcatatatctcaatgggtttctcaggacgaggcccgaccttagcagtttcctttaccgtgatccctacacatcataacatcaaccattatgattaccatctatgcacaaactcctctgaaacaaaacaaaaaagtccacagctttgaagggaacttttcgtaatgcatcaaaatcccttctaataacataaaccactagacacagaaagtgatcatgattaccgcctaaacgcaacgcatactgatcagctggaatctcttccttagacacaaaagatgcagagtacctactcagatacaacaacgaaatcaaatcaattcaatgcagataacaacaattgaaatcatcaagctttcgactgtgtacacactcaactcaagctaaaaaaaagaatcaactcaatttgggggaaagagaaataaacgattacccagaaacgaaaacaccagtgccgaatcggaaaaacaatccaattgctgcacccaagacatcgaagagttttccggatttgacggcgaaccgttttggctccggtggcttgaaaccaggaggagcagtgaacacaacaacagctccagtgtcgtcactggtcttcgtggagactgaaacagactcggaaggttcagaggaagaagctttgaccataactagggttcgaattgaacttcttcgcgaagaagaagaaagcgatcggagaatcggaggttgagggaggatattgttcactagtatccccgccatcgatttttcttcttctaatttgtttttggcaattcatttattttaacgtcgttatatcacacttaatgggccttacttttgggccttaagagtcataatttaggtttccaatattttgctcttgacttgttggagtgaaaaaatatgagcgttgtgaaacggtaacatataatgggccttaattttgggccttaagctttcagagattttttactcagtaaacggatcaaagagtcttaagtgcgtttacgatttttactattgttctaacgtatagtttgatttgacttgttgacagtggaaaaaatatgaacgttgtgaaacggtaacatttttcttcccgtttgaaattataatattttattggaaagagattcagataatgcctctctataaatactcctttcttgaatcagaaatctgaatcctctttacttggttattttcttacaaatgtcgaatacagtctttttttttaaaaaattccgttcttctactttaggagttctcgtagtcaaacttgtctacattgctcattagccgagagaaacaaacataagcatcctctcttacaaggtaaaaatactcttgtcttagttattctagttttttttttaatcatataaacggttcttgttagcttatagatatgttcttcatctttttaacatcttttatggagttgaacttggaatttaaattaatgttctgttttatatacattgctgtcttgacttcatctatgaactatgacatacactgatttttagctacatatgtgtcttaaataaactgaaattttatatctagatatatgttctttttgttgctgttgaaattaagctagatatatttatgttctgtctaggaaaacatagaatgaagattttagtttttatgtaaaacataggaagaatgggttttaatttttgactgaaatgtttgatttgtatgtaaatgcatgtgcaacggaaaaaacgaaatactgattttgattaattaattttgcagaaggttgaagaagggaaaacgaagccttgggactatatccagtattttccattttctgctgtgccagcctttgaagttgacaagactgtgcaatattttgtattttcctctttctttccggataaagatacatgtatgtatgtagatgtgaatgataatgtttagggtgtgaatgtgtagatgtatgatagggtgtgagtatatagatgtatgtttagggtgtgaatgtataaatagatgaatgtttagggtgcgatggtttagatgtatgttagggtgtgatagtatagatgtattattagggtgtgattgtatagatgtataaatagggggagattgtatagttgtatgtataggttgtatagatgggcgtgtgagtgagcatagcgcccaatgcgtgactagtgtagttcctacagcaacctacaacaaatcgctagacacacacaagaaaataacaaccactctaaaataacaaaaacaaacaaaccttggaatgacagtcgcccaaatgacaggtacccgaagcccctatttaatgaatttgaacctgacccgaaatcttagtttattttaaataactaaacacgaaaaacgtgaatccgaaatactcgaaataaaacttacacacacaactaaaagaataaagaaagttttttagtaacaaaaatggtagtcgaaacattaaataaatcttaaaagcacaaaaacagcaaaataagtctaaaaacagtaaacaaattttttagtaacaaaaaaggaaaacaaacgaaacactaaataaatcttaaatcgcagcacaaaaacagcaaaataagtcgaaaaacagtaaacaaattttttagtaacaaaaaaggaaagaaacaaaaatgttagtttcgaaacactaaataaatcgaaaaacagtaaaataagtcgaaaaacagtaaataaattttttatcaaagccccaaaaaaagaaggagaataaaccattaaatgacaaaaacacgaaaatgtcattcgaaacaccttaaaatgccagtcgaaacactaaataaaaaccacactaaaaaatattataatgttagtcgaaacactaaataaaacttaaaacacagcacaaaagaagcaaaataagtcgaaaagtaaacaaagtttttaccaaaaccccccaaaaaagaagcaaataacttagtcgaaaaacaaagcttgattcaagacatttcataaatattggaattaaataaaattcaataacaaaatctcaaattatggcaatatataacaaaattatgtaaaaaatggtcgaatccccaattttgaagatgattaagagaattttcctattagtagtcctgaaacttgaaaaaatttgtaagaaagtgaatgtcaaaatggaacgatcactaagtatataaagagtaaagactaacacaatcgcatgtcttgaataagccaaaaagtaagaaagtaaatacaacaaaaatccaaacgaaaaacatatactccagatattacaatataaatccaaatgaaaacatatcgactccaaatattacaaccgtttaattttttattttcttttaggtttcgaattggttgtcactaaattcgtaaaaagcaattcatgaatatatactataaatgaaaaatataaatttcgtaaataaaatttccacacaaaagaaaaacttggtcggtttgaaaatatattcatatcaacttggtaatctatttctggttttttggatcaagtcagatgggaataaataatcatgattagcattaaaactaatcaatattaagcaaaaaattctaacttttccttttatttttctttcaaattatcaacgctattttcatttcatatagacttatttaatgaaacattaaaaaaaattgtttcatgtagatatataccctctgatatttgacaagaaacatatatataaacttaaatcaagattatctgagcgtttaaaacttggtagaagcaggcaacagcaatagtttttagaaagaagtctttggacggtgcctaccaacagaaaactgccacgtgttgcaagtatatttgctggagcctagcacgtgagccgaccaaaagcatgggaacttaggctgagaaatctaaattccttttgccttcgtcacttcgtgttttgtccaaaagggatatcacaaaagaaaaaggctctgtactttccaaaagagaatgagaatggaatctcaatcttgactgaaattgtcatttatagtaatccttatctgggtttgtgttgcttctttttgggtaaactcatttcgttacaaactacaacagatagcttacattattttcttaagttgaattacatactaagataatgcgtacatgatttaacgttttactgtaatactagctaacctgtgtatacacgagctaaagcttgtatgtgtatatatactccaatttatatatgaagtacatggacatagtttgattagtagttttaaatagtttgaagataaaaaaataaaaataaatagtttgaagatagtttggttatagagatatctttggtagggtagtgtacaataatgtataattgatagtagtaattacatgattcctcttaatcttgagaactaactttatatataacccaaaaaaaacacattaagagaatactataatatttgtaaaaagaattttcaaaagtgaaccaaagcaaatcatttgttgatttggcctttgaatgtgggctgcgtttgctctttgaaaacaatttttttcctaggacatatatgtggtgacaaattagagaaaatgacatccatatacaaacactatttctaagtccgcgatcattacctgtaaaactagtgcattgcattcaccaaatttctgcgctcttaatcttttgttgttgtttctcctaattttcgtatgtcaatcttgttcttggatataaaaaattagtttcaattttaaagaataagaaaaactgttctcgctataacataacttcctaggttagacatactgatgacatgcatatgattttttttttctaccattaaatttggagtttgtcgaatatttttaattcgaaaattcctacaatattctcaattaagccagagtaatcaaccaatgtgcttagtttcatctgaactagtcaacctcttcggtttcatagaaacctaactcccctcgccaattcgatttgcagtcgatttgattgattttataaaatttggttattttaaaagtgtatccccacaaaatctagtggacctttggacatgggacaagcatggtgagttgccactagtaaggttttttatatataatatctcagtgtaaagaataaacatatatatctaaatgtacaatgaccacatacaaattatgtaaatgtaatttaactattgcaaaacgtctttagaaattagattaaagaagagtatgtgaataatctatctaaaaaccaattgtctgaatcattaacgaatacttaggacttggtcaaagttttccaaaacaaattccaccgattgagaaatgtaaacaatttttctgccaccaccactataagagagctaggaaacgcattcaatgccctacgttagtaaggaaaattcaatgtcatgcactgtatcacaaagtcataaacatttaattgaaaccctatacctagctagatagttcttatatacccacccattaccagtttttatttattaatttattatttaatagattgtgatgaccatacctatacctttcatcttttagttttaacttttacctctatgttcgttgtcacactcatcttttaaagtcacattcactttctcgtctcgagttattagtaaattaaatcgaattacgtttcttgagatcatggatattaataaaattgattttgtctcatacaaatttatttgtgaaatcatatgaaaatatagaacgaaaaaataatatagactgcattatacgttcgtctttaaaattaaaaattaagagggcataacgcgttacgcgtgcatacgtagtatttgtatatgtaagattttaatgtataataagctcatgttgcatcttagtatgggcatgcaattgcaagtgtatccataatgtttttaatttgtccgtggagtattgaacatgatctctaatttaaagggatacgttttttatttttgacgaatgaatatcaatttatatagtaaattacacatgacatgaatttttttggatttgatttcgaaccaaataatttcttcaagtatatgtatactaggaataataaatatcttgcatgggatcattatatcaaaggcgacacaacttggaatcgtgatgatactaagctcacacagtcgtaaatcgtaatattaaatacgatcatcatgtacacttgcaccgccaactcatgatcatgtaaaggatacattgagtaatgaacaaaatgcaccaccccgaccacaccaccccacccactataatatattgaaggaaaaggagagaaaaatcaaagcaggtcccacttgataaaatggcactaacgaaatcccaaaaaactcttataaatatacaatttgtataatacaaacacaaatctccaagcaaagaacaatagataaacgaaaaagaaaaaagtaagaaaagaagaggaagaagaggaagaagaggaagaagaggaagaggaacgaatatggggaactgtttagtaatggagaagaaagtgataaagatagtgagagatgatggtaaggtacttgaatatagagaaccaattagtgttcatcacatccttactcaattctctggtcactccatctctcacaacaacactcatctcctgcctgatgctaagcttctctctggccgtctctattatctcctgcctacaacaatgaccaagaagaaggtcaacaagaaagtgacctttgcgaatccggaggtggaaggcgacgaaagattacttagagaagaagaagattctagtgaaagcaacagcaatatcgatggtgatgacaccaagaacgtaactgttgtaagaatgaagatcgttgtgcataagcaagagttggagaagctacttcaaggagggtcggtccatgagatgatgtaccagactcttgagaaacaacttttacttacttcgtctgatgatgatgatcttgaatgtaatagcggctggagacctgcgttagatagcatacccgaatctgaaagtctcagaagaacataacagatagctcatatatactcaaaaaacagtttgagctttgttcaaggaaaaacttgtttttaggttttgtttgtaaataaagctttaagctgttataggaaaagactgtgtgatattgatgataacactaagactttttgagtcaagctttttgttttccaagtaaatttaaatgaaaatttcatccatgtttttccatggattgagaagaactcaataggaaaagtaacaaccatgtattagatttaatataacatgaacaaacatttatatgcacttattatttatcatatgtttcagaaccagccttagtttcttgctcatgtctcttcaaatctcttcatcagtataagattaagttaattttgttcatagtcaacaaagaaactaatgtgttttggtaaagtaacgaccactctatgttgaaccgtttccggtttaagatattctaaccggatgattgagagtcgtaccgattggtttgaatcggttttggattttgctgctctatcgtcgtgggagagagataatcatcaatttttccaggcaaaaagcttcgattttgaaccatataaatcatctcccatggcggaaatcgaagtctttaactaaagaagaagaagaagataaagctttgtaatttatagaatggcgtgtgtatcgacatgcttgattctctcccctaggttaactcaagtgggtttatcatcaaagaagccttttttgattcggctcagatctcctgttgatcgttactcttttcccagaatgttaacggagaggtgtttgagcactcgtcggaagtttaatcgccatggaatcgctgtggtgaaggctgcgagtttagataaggttagcggcgcaatcaaaccaggtggattggtggagagtgacaagttgccgactgatgtacggaaacgagcgatggatgcggtagatgagtgtggccggagagtaactgttggtgatgttgctagtagaggtggcttgaaggttactgaagctcagacagctcttcaagctatagcggctgatactgatgggtttttggaggtattcgctagttcaatttcatgcccattaactcaaattgagatgctttgaggagagtctgatataaagtattgatctttattaagtaggaaagtaacaatacattagaaatttgaatagctgtcatgagaatagtgtattgatttgaggagattttgatagaaagtattgatctttacgcgattcatgtttcgttttagatgtgtgaagttgctaaaatcaatgaaatgtttccttcattcaggtgtcggatgaaggtgatgtgctttatgttttcccaagggactatcgaactaagttggctgccaagtcgttaaggatacaaattgaaccattccttgaaaaggcaaaggtagtattttttttctgttaagatttattgatttccttttaacagtgaattgctttgaatttgaatgttctgagctctattatgtgtctcgcagggtgctgtagattatttggctcgtgtttcctttggcacggcgcttatagcgtctatcgttattgtctacacgtcaattatagccctgctttcaagcaaaaggtatgtgtttgccttgaccgcaattaagttgtcttgttatcaagatatattatcattctgatcaatggacttgatttggattttgcactaaccttttttggattttgttaaaagcgaggatgataatcgtcaaagaagacgcgggcgcagttatgattcaggattcaatttctatatcaaccctgtcgatctgctttggtaattttaatttcatgatgtaaaaggctcctactctcaaccaatagagaggatcagtaattgatttaacagaacctcgtagtcatattctagtgtttttatgtaaggtactgggatcccaattattacaacaggcgacgagctcgagaagatgaaggaaagggaatgaatttcattgaatctgtaagtagagtttgaacttaagagagttttcatgctttgctaaatgtttcttcttttgctgcttatgagtgataatggcttgaaataagtgagggttcatctctaggttttctcgtttgtatttggagatggagacccaaatcaaggaatcgaagaagagagatggcagatggtaatgtgctggacttgaatttacttatgttttctatatccgtttcaggttactattcgataatgttttattttatttttcaataaaagactactttcgacatatctaaaggaaatgtagtaaaatgcttttttaaatcttcttttaaaggttatgagtttaaaagtacatcacgctcatataatgaaatattagtaatttactcgtttttgatacttattctcagattgggcagtatataacatctagaggaggtgttgttgccgctgatgaacttgctccataccttgatgtgccatcttcaaagagtgctatggtatgttttgcttattgtttcttgcaaagggagctaataaactaattttgttatgctgctatctatctttgtatttgtcctttgtactcctttacctcttgcgctagttgtatcactaaataatgtgaaagacataccgttcagcttcacaagttttcttttttgatgtttacagaacgatgaatcctacattctacctgttcttcttcggtttgatggtcaacctgagttggatgaagaggtatacaaatcctctttctggtgtcttgaaatgtgatgcccaaatgtgcatgatctgcagggttttcattggccatttttattaacaattttttcatgttgcttagggaaatattttgtattgttttccgtccctgcaacgtacagcttctggatctagtagacgaaaagaatatgtgggaaaatggtttgactgggttgcagatatggagaaattcttcaaggagaaaaaatggcaatttaggttcttatcgttgtttgctcctggaatttaatatcttacaaatatgagaagttttgttaattgcttttgtggttcagttcctgataatggaattttcgttcttcacagtaaaacaagtacatctgagagagcactggtcattggcctaggtgcggttaatctctttggtgttattgttctaaacacattgctaaagtaagctcctcatagatttatactctacctattattccctagtgtgtatatatataaatgtctaacgcaaccttgtttttgtgttcgtttagcgagatgtctgtcaggccaggtggatttcttacatttgttaagaacatatatccactacttcaggtatgatttagtttctgttcatatggcaaactactatcattaaattgtttcctcattctggttcttcctattcgctttaaacatgaatcttatgggagtttctaagcatgattactgacacaaacaagttcttaatagattttattttcgtaatccagatgactggtctttgtttgaaactttttgactaattatattgatctcattcatgactgtgcaaacgactattcagatatacgcaggttcattctttaccatccctttgattcggtggttttcaatcaagagaaagaataatcagatagagaacagaaacaaagctcggctacaatttgctcgagcacttgaatctccagatatcgcactacggcgtaaggtaggcacatcagtagtaacataaatcttgggagatgtttatttggtttctgcccaaacatgctctttattccaaagaggagatagcctcgcactacattttccactagtgggtaaactcttgccaactaacgtcaagggttaggttctgaatcgtctatgatacctgcatatctgtgggagatctctttatgtgattacccacttttgattgctttatgtgactcttttcttgccctctagcaccagccagactaaagcacatttcttggattcttttcctggaaacttcatatatatgtttttttcttataacttgggagttgtgaaataacgccttgaaatgatgcaatgcagctacttagtgcaagggatatggctcaaaaaacagtcatagggaaggatcggatcgtgtacagtacagatagagatatgatggaacaaaactatgagacagacgaatgggacaggagattcaaagagttagaaaaatcggattgaaatgtgaaatctggtaagtgaatgaggcagtttcacagtttcttgctgcaattacaaataatgggtttatatgaatcatgtacatctcttaatctcaatattgacctcatccagttttgcatttgacttttagggacttgtgaccttttgctgttatatgctaagttacgtagcagctcacacatcatccgcaacacagaattttcccaacaacgtaaaaacattcatggacgctggagttaaagcggatgacacaagccatggcacatactgtttagacattcttcctctctctgagacagaaaataactggtttatagaggtctcttaagctctagtggtaatagaccattttgtgatgctccgtaacacaacaagcttggtcttgtttaaatcatccaggagatccaagtattgcttgttcctgagagttactacaaatgcaacaatagattatgtacattaatttgtatatacgaaagtccaaattcttgctcataagaatgaatgttcaatgtattatcttcctcttcactttctagagaaaattgatgaattactcatcatcattaatttgcaatttaaggacgaaattgatttgaaggggattaatggggccaatttggaaaatgtataaaaatagtgggagcaatacagaaatagatgacgtggatgctaaaagtagcgtggtcttcacaacaccaatctttctttcgcctccctccgtcgtcgtcaccaaggtagaaaatttcgttccagagaaagcttaaaactttccatggagaaaaaatcataaaactcaattaattgtagaaagagactgagagaaaaaaggttccgaaagaattaaaaaaaactatgtcaagatctctggtgaaacgcgttgctccttatttggctggtcggattagagaaaatcatcgattgcttaatttttcttctgcttctgctatcaaagaagcatcttcttcttcttcgtcccaacctgaatcgtcttctaatgatgtagtccatctcagcgacaattgtatccgggtatgatatctgctcttttgaattgatctctttgcaattcgatacactaggtttttacgaaattaatttatattggatttttgctctaatttgacggctttttgatgaaaaagtaacaaaaattcggtttgtttcgaacacccatagttcacacgattctgcagaaatggaaaaaaaaaatgaaaaccttttcacttgttaacttgcttaaatttaacaaaaaagaatgatatgaactatgaagcatttttttaaaatgtgaggatttgcttccaaagatattcattggttattttggatatgtgatcatgggttttgtgaacatgaactaaacaaacctctaccatgtaatttctggcctttgcaacatttcgaatccttttacctaactatttagattgttggaagcaggcattgtttgttattttgctcctccccttgacctttatgagtgttatcatatttttcagagaatgaaagagttacaatctagtgagccggaaaagaaaatgcttcgcttgggcgtagagacaggaggatgttctggtttccagtataagtttgagcttgataatagaaccaaccctgatgacaggtactctgttccactttctattagaatcaagatttgattttggcttagttatagctgttcttgaatattacagggttttcgagaagaatggtgtcaaattggttgtcgataatgtttcatacgacttggtgaaaggtgctacaattgattatgaggaggaattgatccgtgctgctttcgtggtaaagccctcttttttcctttttgcatcttttcaatgcttataatctcaatagtcaccatcttctacactttcttctcatcattttgcttagatagtctatataagcatttgtgtatgctttgcctgagctgattggagtccataagcctatgattcttaactatcatttgcaacgtgtcttccttatgccctgtgtttttgaaaaggagacaagacataatcttgaaactgcatgttggtttaagtaaccattttaagattttcatttgatttttaatgctttggtgttcaggtagctgtaaacccgtccgcagtgggtgggtgcagttgtaaaagctccttcatggtgaaactctgaatcattgactcaactttcttctttacatggactagaaaccaaatttgatcatttgtttattacatgtataatgtcagaagttttgctatgtatcaaaaaggcataactagggaaagatacaaaaactctgtaggcttctagctcaacaaatgatttgtccatcctatttttaaacaataatggaaagatttatacaaagaggaatcttgtatcttctcttaatttacacaacagttggtctgtacatgctcttgatcatacttacataatctcaaatcacgagtccagctgatgtcagtgagtctttgtgagtacttaacagagaagagcgattcaattcctttagttttcccctctctaccaagaacactctctgcgccatcatcactgtctccagtctatgtgcaatcactatcacctgtgaatgcaaacataagagccatggaaccaggaagtttttgaataatatcagtgatgattcaattaaaaggttgtttagaatggaagaatcggatgtgtgcttttaccgtatggtcttgcattacacgttcaagagcttctctgactagcaactccgacaaactatccaatgctgatgttgcttcatccaaaatcagtatggatgatttctgatagagcgctcttgcgatagctagtctgcacatttgccaaatgagaacaagacgcagtaagcatcgtgaagagaatatatgaaacaatcagtcttccagaccccacctttgcttctggcctccgcttaagcttgaacccctgggaccaactcctgtgttgtatccctctggtaggtttctgataaattcatcagcatttgcagtttttgcagcaagctcaactctcttcatgtcaattcctgtcgtgagatctctgtacccaatgttgtcagcaattgtccctgaaaacagagtcttgcatgtgcaaaaaaagttatgtaactacgatgaaccattatgaaattcttgggatgaatcacgaaaggagtaaatttgaagactggaacgtactgtgtcctgtgaaactagaccaacatgtttcctcaaactttccagtttgatatccttgatgtcaattttgtcaatgatgatagagcctattaaagggaagaaaaaaacaaacacacatatgtgcttagatgtcaaaccgttggttcttaatattgtgattaagttaagaagtaagaatttctaaccagatgaaggttcgtaaaggcggaggagcaatttgatcagtgttgtctttcctcctccagatggtccaacaagagctacagtctctcctgctttaatatgaagatttaacccatccaaaacgggaagcatattttcgtcatatttaaatgatatatcgcataactcaacttctccagcaactttttccaattgaatggcctcaggtctctcgatcacctaattttcaagacagggccagaagcactttgcatcatattttgagatagacaacgaacaaaaccaaatcattaggagtataaactgaagagaagatcagaggaaagatagggtgtagtaccttagattccaaagaggtcaaatcaaacaaacgttctatcgctggctctccttgtttcaattcattataagcttttcccaaatcctgcatgttttttagattcaaaatcccaataagacagctcctctatacacaaaaaagtatagaggcaaggcatggaatgccacactgacacaagtatctacctggacaggatcgatcaagaaagctaatgatgccacgaaggaaacaattgcactagagcttaaagaagagcctgcaaggataacagctccaacacaaaatatcgacaatgatccgagatacataacttgaacaatctgagggataagtgacttcattttcttcttcttaaaccgttcatctaggtcagcacgagcaaacctctgaaacctcacactctcagagatctctgcgttattagccttgacaaacaaaattgcaggaagaacctaaacataaaaagctctgctttagtaattttcccgtaaattaacaagaagaagaaaaacaccaattgtaggaaagactaatacctcattcaagtaggtagaaagttgagcagaggcaatctgtgcttttctagatatcttacgaagccggtcaccaagatatgctataagaagcgcaacagatggtatcacctagaacaatacccaaactaataagaaaactctagagcaaaagagacacaaacagagacaattgattcacttaccattgcagagactagtgtcaaggcaggacttgcaacaatcatatgtgccgtcattacagatatctgaatagcactgggcacaactgtctgccatataaatgaagtgtagagcttatagttgttagccaaaatcaccacaatgtatcaaaaaattctgaaaagaaggaaactttctcttcgcaaaacattcataacaagcaaaacactcacgttgagaagagcatagatagtgtcagcaacttcagaagcttcagcagtgatcctgtaagcaatgtctcctgatgaaatcccattgccaccttcaaagaactctagttctctctctaaaaccctcctatacgcgaaaacccgaatcttgtaaacagtattcaaagcagcttcccaaagaaacgcttgctgcagataataagcaacaaccttagccaaaaccagacccgccaaaacgagacattcgcctttgagcttcgtcaagctcgcggcgtttgcgttaaggttggaagtgaaggagccgagcctaggaacaatctgagaaagcgagacaacagagacacagctgcagagccagccaagtaggacggttttagattccgattgaagatagggtttaatagtttcgagggcttttagtgaattgactgttgtattggctcggagacggagagcggagggtttacagaagctcaaaggtctcggagatggttgaaatggatgtttgagaaagagagatgagctccggcgatgagatagcggcggcggaggaatgagaagacacggcggcggtgttaggaggagaaatgacatttctctccaaaacaaatttaatcgaaccaaaacgaatcaacttctaattctaattcggtgataattcttctgaaccgaacctaaacccgaacatttaagcgattgctaagaagtaagatctgaggcctttatgagtttaatacccgaggcccaacctgatcttatcaagtaagaggttgatatttaaccccaaatagttttactttacaactattaaataaattttaaaactcattatacacactatattgaatatttcaagagatttatagtttttggtagaaaaacatttaaactaaatttcagttaattttgtttgcaatttaaaacgtttcgattaactttagttgaaattgtaacatattgatatatgtattttagatttaggttcgtaacatggtgggagaggtccaccacctagtataattatagagcaaatgtcatgaataagaagttgtttcaaaactgtaaaagtagtttgttgacacaaatgaaagtttacaatcagttaataacatatgtattttgttttgtgagagaattttaatttagtttgaaataactcagagaataaatctaattagataaaaatatgtgttaacatttgtcaaaatatttaacacccttatctaactaatatttaataagaaaaaatcaatactaaattaaatcataaaaaatctctaaaaataataaaatctgaaaattattaatttattatagtaattaaattaattcattattttaatatctaatccacctagtatgaaatgttggactcataaccatgaaatgctgcagaatggcccataatacacctagctagtataaatctacaaatttccatatattttgtaaattattcaaaaaaatactctatattattagaatatatgacgaaaattaaaactctatattagatatttaattgtaatcaattttagttccagtattcctaattcattgaggatttgtaccactatatataaattatggagggtgaatatataaacacaaaattcattccaaaacaaagagaggttaaaagtagatggagaagtccccggtggtcatggccgaagaaggagaacactcgggagctaaggaacttcccaaacccaaaatctccatgtcggatctcacctttgtcataggcgtgtacacaaccaaatcaaagaagttaacagttgtagaatttggcgcggaccgcgagtttaaccctaatgaccgggtcaaaatagaaatcgtagacttgagtcgttttgaactgcccaagtctggtatggatgatgtaatgatcacttgggaagtcgtttataagaaagattggcaaaacattgtcacaatcgttaaaggtcgaaggtcattagacacaaacttacgatggttgttcaacgatcttcttgctccagaagatctaatcagacgtggcctaaccggcgatgtcaaggtgagtttaaacggcgacttacttgacaagatcagccttgagatattcattgaaagcgaccagagatatttttcccctgaagatactcttagatatcttcaatgttttttcccctctaaaaactaattattatgtatatacaaagtctgtgaaatttaaaaatatgtaagcgtttctacctaaataatcaagagctttgttttgcaccaaaaaatttactgcaaaggcgttgatgcttgatgaacaagaaaccaatcccctattttttttttatcccctattttcgagggtttaccggagctcagaggtctcggagattgttgaaatggatgtttgagaaagagagatgagctccggcggtgagataacggcggcggtgttaagcggaggagaaatgacatttctctccaaaacaaattgaatcgaaccaaaaggaatatcaacttctaattctaatttgatgataattcgtcttaaccgaaactaaaccgagaatttaagcggttgctaagatctgaggccttttaaaccccgaagcccgttaaagccctttaacagcatattaatatcatgacaatagtcttagtggttccccgtgccatgcataattgcatattattaattaaatttatatttaaacctatgatattaaatacatacaataataatgtagtataaaaatatgttaacacataatgtttaaaccatgagcaataaatttggaagttaataatatatgcatgtgaaaaggagattataggaattcaatattttgttataaaaattactcctaattaatcaattaacaattaatgagaattaatgcaaaaaaacataaaaataattgagagtcattgtggtgagatataaagaagatttgtaacactaaaaatatggatggtgaataacataaaactcattccaaaacaaagaaaagagaagtcacaggtgatgatggccaaagaaggagaacattccggagctaaggaagtgaaacttaccaaacccaaaatttccttgtcggatctcacctttgtcatttacgtaactacccgagaaaagctatcatcttctaccataagttgtgaggagataccacttaagaaatgtggcgcggagctagagtgtggctccaatgatcgattccatatacaagtcgaaaacttgagccatatgggaatctccaagtctagaatggctggtgtaaagatcgagtgcgaggtcatttataaggaagactcggaagacgaggcggtagttagaatcgttaatgctgaaaggccattaggcacaaactttggatggctgaacaacgatcttcttgctccactagctcatcgtggtctaacagccgaaatccagctgagtttcaacagcgagttattggacaagatcgacctccagatattccaccgaggcgaggggagatatttttcccaagacgatactcttggttatcttcaatgttttttcccatctaaaatctaagtattttagttatgcaaagcctatgaaatatttaaaagtacaatttgtatgcattttgtttggtcgattatatgatatttaaataagaatatatttctacctagataatcatgagttttgtcaacaaattggtaattaacttgtaaggtttctgtctcattcattaacttatacaaaaaaataatccgtttagaaattaaccaaattgggctgaaatagttttagttaccagagccgaagccacgaggaccaggcttgcttgatgctgactctacaaatttcttccttgagtctgcctttctcttcctccttgcagttccaggtggagccttaagatacatttacaagaccccattaaactctggtacatgttaaagatgaagaagaagaagaagaagaaatggaagaaaccttttgttctgctttcaatgcgtcctcgagaccgcttaatgctggaattgatcctccttccatcactcccatcaagttcttcattttcactctcatttggaagatttgtgctacaagtgcgctcacctgaaccaacaacaacaaaatggtattgagaatctccttcttcttgtctgagatctgcacaaaactaagctcacaatctgagcgagagtacctgttgttctgtctttcctgaatctttagcgattctttttcttctctctggagattctgctagtaactctggtctctctctttcctctgttccaacagatttaaaccaagaattagacaaccaaaatctagtttatgaaatgcttgtttatttaatggaatggaagaaaggaacagagacaaaccgggtgtcatcacttcaatcattgcttccatgactaaaagattcttttccgcttctcggatttgtgctggactcactttccccattccgggaatcattccaagaactcgtgtcatcgaacccattttcgctacagcacgagtctgctttagaaaatcgttgaagtcgaactttgcactcattatcttcttctgcagatcttctgcatcttcttgacgcatctataaagacagatgaagaaggcctcaatggatagagagagagggagaggaaaacatagttttgattgtaattttactgagaaagaacttacaacttctgttgccttctctacaaatgaaagcacatctcccattcctagaattcgtccagccattcgatctggataaaagggttcaagatcctccattcgctctccacgtcctaccagtttaatcggttttcctgatacctagtaacacccatttaagtgtaaactatcaatgttgagcaacattaagtaaatttctataaaataattgattaaagaagaagaaaacaaacctccttgacactcaaagcagcaccacctcttgaatcaccatctagctttgtcaaaatggctcctgtaattcctatctctacattgaatgtcgtcaccagtgctgtaggaagtacagaagctcatcttagtatatgaccgatacagctacggttttgaatctaatccattttcaggatgtctcgaatcttcttgacaaaggtaaaatagaaacagcgtacctgcagcttcttgtccagtcatggcatcaacaactagtaacacttctgttggattcagaaatttcttcacgtcttttaattcgtccatcatgcctttatctatctgtcacaaagaggcaatttcatgactgaagctgcaatagatttatgatacaatgactcttaaagacgaaacattacctgaagcctccctgcagtatccataataactacatcaacattgttctttttagcttcttttagaccttgcttagctatatctgcaggttttacatcagtccctgctgtataaaccggcacaccaacctgacacaaagagggcatcagggaatattgatttccggaatcaaatatcatcacatattcacacagaggttaagccatttcaatacctgttcacctaaaatgacaagttgatcgatagcagcaggtcggtatacatctccagcaataagcatgcaagattttccctgtaaacatcattattagtcagtgtcattgacagaaagtagtaacaaacaatcccatcaaaatctccactgtattcatacctgcttctttaggtaacaagctagtttagcacaaaccgttgtctttccaactccttggagcccagccaacaatattactgtaggacctgatttagcaaactgtaactcagatacttctccacccatcaatttcactagctcatcatgtacaatctgcaataaagccatgataagccacacttgagtactattgataccaaaatgatcatcatagagtgaatcaaatatcaaaccattatgctaatgaaacaaaaacaagaaccggttttattgctaattaccttgaccaattgctgatctggtttgactccacgaatgacacccattccaacggcttggtcactaacagactgaacaaaccttctaacaactgggagactcacctgttaacaaaattacttttataccacattcttcacaagaacctaaatgaaacagaataaaacaccactcacatctgcttccaggagagctcttctgatatcccgcattggctcagcaatattgtccttagtcaagacctctgcaagttcaaataacgtaactagcttaaacccgtgctcatcttttctgcatcttctaatagcaaacactactcttaactacaaagttttcttcattgaatacatcaataaaacttagtctctattcattcctcctaatttgagctcacgggcaacgaaataagaaagaaaaaaaccgaaccttcgcctttgagtttgctccaagcagcctcgaggccaccagtcaactgaccaaacatctcggctctcacttggcttcttctgtatcttccatggccaacaacagtcttcgatttcacccaactccatatctctcgctactcaacacagaacatcacaaacaagactaaataaccagaaaatcttacaaaaccaccaaactaaaaaacgaaaagaagcaaactttgaagccaaaccgtggagagattcctagaggaggacagagaagctgaattgatggtgccaccggtgaacgcagagctgaaggcagccttaattctcctatttccggtacagctcagagtacaaggaactctattcacgctggaaaattgaagagcctccattactagtgagtgagtgatcaaagctcaaaacttttcacgactctccgcaatcttcttggtacttctatcttccttttggatggttccattttatccgtttcgatgacgtggcccagtaacagaccgtcgatggtgagctttccacaaaacgctgcattttaaaactagaaccatctctctctttctccttacaggcgcggctcagatcccgacaagtgtacggctaagatcacgaatctcttcttgaaagtaatcctccgcgattacccaatcggttatcggttcggttccactcgatttcggttctttcgattataaagtttatttgaatattttaaaatttagttcagtttggttccacttctttcagttttaaaatttagtatccattgttttagatattttctggtgtttcggttatttttagatatttttaagtatttttactattatatatatttttcaaaaattaaaaaacttttaatagtggtaaaaaattgcaaattttaatttattttttttaaaatgtaaaaaaattatatgtataaacatattgaatttagaacaccgcttaaggacctcatattatggacaagatattgtgtccaattagtttacacataattaaaatttaacatttaaaacaaaaatattttgtataaaaacaaaaacaaaaacaaaaacaaaaaccttaaattttaaatagtgatatgaaaaatacaacttaatatattttaaaatataaaaaatgttaaaatttaaagatgtgtataacatattgaacctagaacaccgcttaaggaccttatattatggacgggatgttgtattcatttagtttacacatatttaaaatttaacacttaaaaacaaaaaacatactatgtatatataaaaattattttatctaaaatattaattagaaataaaaaaaatattaaagtttaaatagtggtagaaaaaatacaaatttaaaatttttttaaaataaaaaattgttaaacatttatatatatgtaaacatattaaacctagaacaccgcttaaggatctcatattatggacgggatgttgtgtccaattagtttacacatactaaaatttaacatttaaaacaaaaatattatgtatattttaaaaataaaacacttgatctaaaatattacttcaaaaataaaaaaaaaacttaaagtttaaacaaaaacttgaataaaaattgcaaaagattttttaaaaattaatgagaaaaaaccctttttttcgacatcactgaggaaaaaccctttaattaaaaatatattaatttctaaattaaacaagaaaatgagttgcgaaataacctgacaatggggctcattgtttgatgggctgaaattgtttgtgttgggcctccgagaacacatcgaccatctgagagcacatgcgatcatcagtaaccgttaccggaaaaacgaatcccccaatctccgacgatccctccacctgctcaatctccatcgcggagaaaacctccaacatcatgaatccaaaagccttaaatcccggcgacatgtaagcctttaactccttcgaatcgtctcgctctctctttctacggtgagatgtggtcccaaattgacggcgaagtgaatatcctccgtcgtttatacgagacgtgatgcttgcgtgtgtgatgatctctctctctcgtcttcttcgtagctataacaagtgaacagagatccgttgtatatgtatgagtctttcttgggctttgacttgtggaatgattctttctaaacgaagggcgaagaaagaatcagagcatcatcatcttgaagcagacagatatcgaagaagagaattgataataaagctaatcagagaaattgcatcttttaactcgtggagatagaagacgcgagacgcaggtatttataaacttatttgtttgagactcaagtttcctttttccttttcacttagggtttgtttaaagcccagagcaaaacaccaaccttaggttcggtgataatctagccgttatacacggttaggtgataatctaacagctatacatggttcgggtaacaaactttccttttttaagttgatacgctcctactaatttctttatatacgcttctcatttatctaagggtaatttgcaagccacaccctttgatcatgttttattttcaggaattgccaaagtgaaaggtggttttcacgttttgtcttttcagctgaaatttgaccattttgcccttgctgctacagatgagaaattgttgaatgtacggtttagttagtcaggtttagttaggtacactgttccggtttagttagagatatttttgtttcacgttgaggagcgcgctgtacagttagaagagagattttttcattataaacgaaatgacatcaacatttaatggcccaaaaagtttagacgtgactcttgttataattaatgcaaaatcatcattacatgttattatattataaaattattgataataattgttgagttaaagatgaatccaggaacaaacattaattgcgaacgtacattgatgctcaagaagtgttgatcttgtctatttacgaagtttggagccaagataagcattatcgtgtaagtaatgaagttttaaagattttttttgttataacacgctatgatcttcattttattcgaaatcgactttgtttttttatagaaaaacccagaatttttttatttccaattttgttggttgaaaatgctaaatgtgtaaatatttatgtttctaagtgtgtacatcgaaattctatttatttttgtagatataatcatgttttcagttgcatttaatgggtttctcctgaatttatgatgcagttgggtaatggatattcccgtatttactatggtcggtgagtggagatgcaaataagataaatggaaatttgaaccaaaggaaaacatgtttggtcgttgtgtacgtgttaaggaaaacaggacgtacacggaatttgtacgtacactaagcgaggctttcagtttgaaatccatagagatcaatcccataattagttactggatgccgggagagatgttagtgatgatagatactaaacgccctcctgtctacattgacagtcaagtggggttggatacgttctttttaattcgtggtcggtatccttctctcaacttgtttgtctctttcattacaaccgtcaagacactcgagaataatgtctctaggactcatggtgatgatgctgaaagttaccgtgtatgtgatagtgtttcaaatgttgatgaaaataatgaggccgtagatgagcaagacgacgatgaagacgataaaacaaatgaggatgaagaggagggggacaacgaatatcgtggtgggtatgatgattatcagggtgacgatggatctatagggggaagtaccctcgatcctactattgatggtagtgaaagtagtggcgaagattatgattacaacaagtggaacgatgtaattgtagaagaatatggaatagggaatgttgaggagaacgtcattctcacaccaggggaattcagtcgtctgttggcagagtgtacgtacacaagtcagcgtgtacctggcggagataacatttctcactcgggagaccgcacaccagctgtgactccaagaagtatgtgtcaacatggtttgtaccaatgtacctacactatacattgagaagtgtttttaagaacagaaaatcatacaacaaacaatgtcttatctcaaccactgccaatattggtttaatattgtatcaataaatttttcttaataatttaattcacaaacaaaaatgtacgtatattatttcacatgtacacatgtacacatgtacatacattaatttaccaacaaaaatgtacgtacattatttcaccatctatttttatttaattattatgtatgtattgagattattgagatataagaatacgtaataaaatagttttagttattagaattcgtcccatatatgttccaataaataatttcgtgtacgtacactataaattgaatatacgtacacagaaaaaattcgatgaagggtataattgtaatttttcagtcatcttcaacctgtgtatccttttctgcaaacctaattttgcggccgtctttattagttttctgaaaatctcattttttttacgttttgattactatttataaataaatcttgtaaacctagagtatctttagtttaaaaagctaaagtgtttgtatctatgagctttttttttgcattttgttcatctctgaaaacaagaaatttgttcctcaattttggagttcaatgcaaagatgtcgaaatatgaaggagtggataatgaattttgaacttctttctacttctctctcgaaatactccatctctttctctttttcttcttcttcgatttctttgtttcagttttttttttttttttttttttcaaaactgaaccacagaaactaaaccgaaatcaagtgctgtgtggtttggttgctcccattaatgatattttagtctgaaaataactgaaaagacaaacggtgaaaaccatatctcactttggtaaactacgagagcaattcttttttcatctacttatgtgaaaatttctttttatctaattaacgttgtgctctgcctcctttgtattatttgatcctgttattgaatgttcccatactagtttcgatttgctacttgttcttttatttccacctctgttcaagagatactagttcattcacaagtttgattagacttggtggatgtatatatgttttgtctcttttctacttttattcctagactaagtggcttatgttttactcttctatatactttgaattgcagctttcaagaacagaggctaagaagatcagaaccaaagtatatttaggaggatcttgaacagaaatgaacagaagcaagacatcaaacaccaaaaaattgacctcttcataaccatatctataaagcacatgagatatgagatccaaataacaaaacaactgggaaaaccaaagaaataaagtgacatgaatgttcaagattcaacaattatgttgatatgtggtcagagacgacttcttagcgttgttgatcttactattttcgcagacaaaagtagaccagagagagactttatccccatccttcttgtagttatcaaacaaagaatccatgatccctacacgttgccttggtgtgctcagtgatctcatcttttcccttgcagactctgtcacactcatgtacggctggaaaccattggatctttgaaaccagctctcgtcttccaatatactctgctccaaacggctgaaagatctccttgggaaagaaaatggagagtcttgtccatcaccagagtcttgtctctgcaaagatctaagctttacttttgtagggacaagcatttcacttggaatgagaaatgagttgatggattttgcagacttggattcaccccaatgttccagccgacagcttctcatccccatatccttagcgtacagtgactccacaagcatatgaggacttcttctctcctgcaaaaacaactccttgaaaaactaaccagatatataaagatcttgagagagagactttacccgttgagaccgggagtatttcaacatacgatcgcgcttgatcacaccttcttgcttcctcaaccatatggcttttatatcttccttcgtgagagcactactgtcccaaccattgcacttcacctttgagttacacagcgaatggttcgatacctgaagctcctctttgatctcagatttggtattggaccaatgctttctctctgtttgtctctggatgatgtttgatgttgaagctttgttggagtgtgaagacttcaataaagcagaaacctttcgcctaacagctcggccacgcacaattgcttgaagccttacaagtgccttaagcgcccgcaacgctttcctggccagagaagccctgaatgcactctgaatcttgatagcagccacattgggagcgagcttcttgacaaaatgttgtgatgtgaaggcgtttcccgccatccggacaacctcagcagctgccttggcggctgcaaccgctgcctcagctgctgcagccgtggcaatggctacattcattgcatgtttcctctgatcctgtgttgcttcgttcaaagtccttgtctcttgcccacaagtggcaagctgcggtctcagcttcagccttttaaacacccatctcaatctccttggcttctacgtaaaaagaagaatcattttagattcagaaacataaacaattcatagtgtgtagagaaagaaacaaaaccttctctgctcttgctttggcctcgcagatgaatagtcttttcatccaaccgaaccacgacctcctcttcgccattagatggagttctctggtaacaaatgataaaatcctcttattaagttgatcaagaaaacagaacaaacatctaaagaagatccattaaagatcgaaccaaaataggtatatatccacagattttgtgtttcaagatcattagactcatcaatatataaatcacatcaatagaacaaacgatataatgatgtaacaacacattagtgtctaataggtatggaagaatcttactttacctatgaacgaacacaaaccaaatgatgagaatcaggaagaaagatgatgtgggagattcagacacttgtgaagagatgatttcaagtgatgtctaaatatagtgatgatcctctctctctctcaccttttccaactgtcactttcactatctatatgattactgacttgttcaaacccctaactctcctttttcttttgcttcttaaccaatcactttataaattcatacattcttttctttcttcctacttttggcttgtgataaaagaacatgtggcttgtcaacgtatctaatatctatgcctccaaaatatatatgaaagtatgttaaagtagattatacatattttaatgtaaccattatatcgcttgaaaactatatacattggactcgtaaattattatagctttgggagaaaagaataatgacgacaatgagtgatagtacagtttaatcattaatagagaaataaaattagatacatcaaactttggagatttttaatcaaagactattttgggtttcattttcttgtagttaggggtgattgttgtcttgttgagaatgctaaaaagtattagtcactaaatgtttataactcactaaaatgacattatacgaaatagcagtaacggagttttaattatgaaactgagttttaacacccaaacttggtagaaactcaaaacatgcacatatttattactttaaaagtttcataataatgagctaaatttatcaaagattcacaaatctcgtaatcggatgaatatcaataaaaattagttgatggtggtggtccatatagaccaaaattcgttgttgagtagatcattacaactttagttatcatgtcattgaaacaatgatgagccatgtgagccatatatatgatatgaacatatatagagagcgacctataggttttgtttaggcctttataaataatgcattggagtttctcaacacagttaaagatccttttgagttgtcataatgtcccaccactcttttaacaccagcttctttttcccttcaaatccaacaatattagtgatcatcttttttctaggcataatgcataattttgaaatgtaaatctcacttgaagtcagaattgttggtgcatatttagacgggtctctatttattcaaatcaatgatctttacaaatatcttaacataacattttcatcattcataaaaagataaaagggaagaaaaaggttgcaagcaaaaagaaaatagaaaaaaaatcaatgtaccaataatgagatcataaagttattatctgtacctaagattacatagagagaaactatgatctgtttcttagatcactacatgactttataattattattatgtttattcgttttttagaaaattgaaagaacaaacattcgtcattacatttcaaagaatgtggacattctccaagtgacccattaattcaacttataatattgaaactatttggatcaacctataacttaagaactatgtagacaagtgacatcgattatctgtgtaaataaattgatctgttttataatttgttagattgaaccatttgttctatgtgtaaattatcataaattagctacaaacggagtcaaccacaaaacgcagatccaaaacgcaaatgcaaaaaggcagagtctttaatgacacccatgagagaatacatcaaaaccatgagaggttcatcaatggccaaaaccaaaaaccttcagcatcaaaacataaaagatagttgaatagcctacatacataaactgattaaaagcataaactacttagttacttcctgcggaagaggcgttgcattgaggagtgtcgatcatcatggcattgttttcaaacagaggagaacaaggccaggtacgtcgaaagtaaggcaccactttgttgaaatcccaaacgagtgtcgattttcgtccttggtactgaactacttcgacccttttagtctctgtgtgatagatgaagatttgtgtatcacatctgatgtacaccaagtccgacttctgattgaagagcgcaagcagctgcgtttctttagtccaagtgctgaatcttgtagctaccgcttggttcattttccacatcgccttgaaattcaccttaaacagcaggttccattcaagcacattgcctaccttttcaagcttccatacctccattaccgacttattgctccatccgtattgtaaagacccatcatcggtttctcccagaacctgttcatcatagtcatatgttttcggaagctttatcacatcaatccgtttctcctcactgtttgagtcatatatggcaattttacctcctctagcatgccaataaacaacgcctttaatcactctccctggagtccacgggctgagagatagaggctcgagacaaataagctctgagtagctccacgtagaagtttttgaggaaaaagtctctaccttcacctttgtactgttaacaggaaaggctacacactctgcccggaccaccttgtagctaaacccttgatcaggactatcctcagaaatcaaagacatacaaagttcttcgaaatgaactctgggacgtggaagttgctgctgcttctgtgtactcggatcccacaagtagtaagcttttggatggcggccgcagagtagaagaccatctgcagagtcgatgtagtatccaagctttttcagaataccagaggattcaatttcatcaccaatactgctggttgagagcaaaggaagagatggctcagcgcgagggcgacgagttccatctatgcgtcttccaaggtacattgagctgcagacgaagaagccaatgagttcaaaattaggtttccacttggctaagtaagtgtgacggaagcaagggctggctataatctcaagccatctcttggacaccaaaatcagcttgtatatcgtttctggtggaagcaggataagaatctcacacatagtatcattactgttaagaacctcatgagtactcagagcagaagtcatccccaaattggtttttaacctggcagaacaagacattgcagacactgtttctttgttcatcagtaatagaaatccaacacaatcaaaacaaccacacagaatcaaaagacccacaagctacaaagaaacacaaatcaatttcaagtatctagtggattgagaaaactcaataacctaaaatctccaaagagaatctaccaaaacgcatgcaaaatcacaaaagatgttattttggttacacccatgaggaacaagaacaaaagtcggagaatttcgcagaaatttttctgaaaccctaagcttcaaagttacgatttttaagaacaggaaacgattacagagcgagactcatcactaaggtagaaaaaaagacttagcattacgtcaagaaattggaagatacaagagctaaaagaggagagagaagaaccttggtgacgacgaacgctgaacgcagagaagggatgcaaacgtttcttcacaagactaaagttatacaatgctacaatataaagggacaagtactttctcctaaccggatctcgttgcgattgaaccgggttcagttcagtttaaatttggttcggattgatggaaatccagaattctgattggatgaattgctttaatttgatttacattatttttatgtttggtacgatttcgttagggtttaggtcaatttgttactacaataaatgtgaaccggttatgctatttgctttttaacctttttttttctgacatcccctctctggtttcatctgacgacggacaagatttaagggataatcgaacggtcaaaattataaactacgggacagatttcgtttttttttttttttgacaagcgacgaagatttttctttctttcaaattgtgtttttctctatattcgattcgagattaaattctgaaatattgttctttttttttttttctcttttgtggcatgaacataattgttttcttttgttctaggaatgtcatttgtcacttttgttaatgcaattgagaaatttgaggttgcagttaggtatgcatttaaaataagattgtctagtagaaattggacttacgatttatatgatcttcataagtaaaaaaggatgctaacatattttaaaaaatctgttgttcaaaaaaaaaaaaaacatatcttaaaaaatcaataaaatctaaggatgtaagatattattacaaatagtagagatttataacttaacaaaaaatcgaggagggactaaaaaataacgctcgtaattaagccctagtacacttgatctgtgaaagaatctgattgttcaagaacttagacatgaatctataagccttttgagtcaagtgcactccgtcccaacttatgaacttgtgtggattctgacacaccggaactcccactgctccgtatggcctctttccgtcgtagttgtaagctccaccggtcccgcaacacgatttcaaagctacactcttgtcgaatctttcacttcgtagaacgtattgaaacgcattgtagtaatctccgtatactatagccacgtctggaaactcttttctcaaagaagctatagcttcttggagttggttattgtgatccattgcgaattcgttgagatgcgtcaagcaaccgttgtcgtcgtaatcttttgtatctttcacgggaaaagacgtcaagtaaatcggaaaacatcccactggaaagtttcccgggacgaccacgttaaccgcaccagcacggatcacctctctagctgcggctgtgatggctccaaccacgtgagggatgtagcttctgatttcttccattggtttgccttggaagaaaccgtagttgtagtcgttgcctcctatctcaccgaccatgaaaagagagtgcttcaagcaatccgaagaagagccgtgacacgtggaacgtagatgacccttgaaccaagcaagctgcatggagagaggagtgtttgttgccggaacgtggagatttctctcggagaagaaagagctgttgagtgctgtgcttccggaaactccgaagttaacaaagacgttgtgttcccgttgaggtaagggtttaggagtgggagatgaagcctgcgtgccaagtaatcgatcattagcagtccgttagatagacgaccggtggcttggtgaaagtatgtttgaccgtatggataattagcggcgtgagaagatctggctccaacagggccgttgcggattaagtttccagtgtcggagatggagtcaccgaattggtagatagagttgataggacattgatccgatgaatgaacaagggacacgaagagtataaacacaagaagcgataatgctttggtcgtagacattgttagagaagtttgagagatttgtttgttggttttagacaaagagaaggatgagagaatttgttgcctatgtgtgtgtatatatagagtttcataatctagctcctagttagtctgtgatttagatagatatattcaataataattattgatagtgataaattcaagaaaaatatttgatagaacgagatctgagaaaatatgtcagaatttttattttattttatattattaaaaaacattattatttaatatttaatcaactagaatcaggcaaaacgaggcaacgtatcgaaaattcctctttttattaatatcaatattttgcctaaaacaaaaaggaaataaatattaaaacgctttctttacttttttattttcacctgaaaaattcgaaattaagaatgaaaaaggaaaccacaaaaaaaaaagaatgaaaaaggaaatttctagagagaaatctctgtgttctttgatttttcttcacctcatcttcttataaatcatctgtttcgttgcagagagctctaaaagaaacaacaacctttctctctgattatcttcgccatttctcgtcgaaattagggattttgttcattaaatcttcctgatttggaaggtattttcattgtctgcttgaaaaaaattcaatctttgtcggttcattatgagtaattggagaagacaaaaacccagaaacaacaacagcaataattatagtcgtcaacgagggacgacgatgacgcaatcatcatcaaagccacctcttggtatgatctctgttctctcctctctgttttttttctttcttaaatttgtgattttgagttgttcaattatgtataacctttcgtcgcttgcaaatcgagttccttgatgtgtttctcattgggttttcctcttttgtgttcttaattagggtttgtgttcgttaagcaatgttcggtcttttaatctcttctatgtattttaggttagtgaaattagagaatttgtaatactaattgactctatctttgttaggtttgtgagttttttttaatcttaatttacttatgtttccttctatatactaattcctgcatgtacagtagaaatatatgaactttaatctcttctatgtattttaggttaatgaacttttgattcttaaccctctgattcttgacaagtttattgtttgtagcttttgcttgatctgtaagttattcttcatcctgtgatcagaatttctaactcttggattcttatgtttttttgcagctaattgcaagatctctgttccagcgtgggagaaggatttttgtgctgtgattggttcagttccatggtggaaagttgtagaggccaagcggtttatgcacatatacgatagagtggtccaatgggacgactcagctggtgaagacgcattcaagaacgctaaatctcgtttctgggcagagataaatggtttaacttgtgacttatctttgcctgatcctgatgtttacattgatgatgttgattgggatgctgaagttgacaatgagttgatacttgaccttgaacgtggtccagaccctttaacagaagaacaagagcatgttgtgatactcgatgctttggttttatctggacagtatggcgggcttggttggggaactggttggggtgacgctgaagggattaacgaggagaatgttggaaagggtaaaccagaaaactcatggggtgatcagaaatatgatggatggaatgaagattcttgggggataaaggagaaaactgaaacttgggatcataacaacaacaacaccaacactgattcttgggatcataacaacaacttcaaagctgaaacttgggatcagaaaaactgcaacaacaacagcttcaactacaagaaggttgagaattggaatggtagggatcaaggaagagagaacagagggtggagaaagagaggagaagggcgacatggaggagaacgagtggaggattgtcgatggaggaatgggagagggagaagcagaggcgggtttcagcaacattcggcgaatgcatggggttggactgaatccttctgaatcagacacagagtctctcttgataaaacattttttgaggaaagagctgtagtatagtaggtttaactatatagtgtgagtgtgttccgtgtgtgtgtgttagaatcatactgatggctcaaaattattttgtctaaaggtttcagaggatcttatcacttaaaatgatatgcctatataagtttctgagtgattttggaaattataatctaatatacaacttgtgaatgatagagctcaattcttgaatatatacaaaacgcttggagagtgatgatcgggaaaatgtacgagtttctctcatgcctctggctcgagagttccactgttggtcatcttcatgaacctttggaaagaaaacgaagaaagcttctgcagatttctccaaagaatgtctctgctacattttaaaagatcttgaggacttgtcctgaaacataattggatctcaaactttttttctaccaagaatctcttacaaaatctaaatcacaaatacctcttgtttaagaatatacagatcgatactcttgaatatcaatagataactgagtcaaaagagaaggaaaacaaaaacaaaaaactgtttcgctaagtttaagagaagagacatgaattaagcttaagataacaacacctaatatgtgaagtttaaacacaatatataaatgatgcatccatgaaaaactaactatatataaattaagctcatagaagcaatttctagtaaaaatagaaagcattttcgagacaaaaatacgcacgtgtgtctgtgaagcatgaagaacattctcagagaggcatcgtgtgaagatgtcctccaccattagagcggagatgaaaactgagaatatgctttttgatggttagaacaaaatatcattgttctttgattctctctttccccatatagaaagtgccagtgttttatctgtttggtggtgacaagagaaggtaagtctatgatgtggagatataaataggggcaatattcgatattggtgacctgaagagacaagtaggatatatacattgttatgctaagaacaattgcttcttttgtttaaaaattaataatgaggctattatgctaatgaataattagaaagtgctataggagacaaaataaaaactagaaagtgataaaatactaaaagaagttattattcaaatgctcttattataaattatatgtattgtacaactctagtgttttattatttttgaagttaaccaatactcttatagcttagtgtgtttttgctttgaaagtgggtggtaaaatcgtttatctgtttttttagataaattgatagattttcttggctttgcaagaatgggacgaaaaaactaataatgtatagtggttgccaataagagggtcatcaaataatatccaagtagctgagtgctagctatgattagccactttgaaagatatgaaatagtatttttttgtttttataaaagttctaaatattttttttttaaaaggagaggaaatgaaagtcttacttcataaaagttagaacaggacattggatgatacatatgagctaaaaaagcattgtggagtctcttcaacttgagccacttattgaatggtgattccatttttctttctctcattggttttaatttgtcccaccagctaatgatctcaacgtaattgccacataatgataattctgatttatagaatgattggtagtttccataatccatcccccttatatcaaatattaaagtcctttaaaaactttttgctataagcagggcaagaaaacatatttagattcatcttgacagaactaaaaactttctataaatgtagcaactaaaaccagagttctctaccttggaatgatccagccttagtccatcatcacaattcacacataacaattgaactcacaaaacccaacaagaactatagaagcaaagatttacactttcggatagccaagacccggtctttgaacctctggttgcgcttcttcataatcgcgtgcagatcggattgattcctcaaagtcagtcgagtcactcgccacaggaaggaagcttccaatgtcatctttagcaccaaaccctccagctcttatcacatcttctgctgatatagaagcttccatgttcacttcaccatgaggctgatctctaccatcttgactcatatcattctcattagtagcactgtgactttgcctctcttcgatcttggaccctcccggagataataccctcggctcttttactttacctgcacctttctcggaatgattaattaaactattcatagaatcgagtaaaactaaagtcgaagaagaggatttgtaccatttgagacatctaacgccgcaatttgctccatttagtaagtgaatttgattctccgagaatctaggaactacacgaaaaatcgagcaaagatgtttaaagatcgcttaccctatgtgagagagaagatagaacaaagtatgtttctttcttgttttggggaaagtttttgggatggagactcagtgtgacgtggcgtcttcgtagccgttacagttacacgtgttccctgcagtttcaacttcgtgtcaaaactgacaatcttattaaaatatttaaaagcctaattattaaatttcaaaaccctaattatttaatattggaatttaatttgtatcggaaaaaaggattctgatcgaaagtcgcttaaggaaactatgtaaactttactttagccagaacaaaaagatattgtacattatccattagaaacttgttgacaaaaggaatatacattagaaatttctaggttacttgctcaacaattaatccacactcgaaaactattagtcgacaagaaaacattggagatatctcaagacatcgtcaacgaacagagacttccagttgcgtgaatctgcaatagcgaacacgactttatcaagaacatcttcattaaaacttggcttgacttctcccaccaggttgctaccgtcacagtaacggttctttgtccccggaagttcatcggtgaaccatccaatcatagaatctaatgactttataacagtctccgacattagaaacattctttcgtaattccttaacacgacgttccacgacatgctcacgtctttcatatcggcggtgaatcccgagtcgcggacatcagcttcgatttggaaccgctcgttcgagccaaacacaagatccttcccctgtttcacaaccactgcttcttttgatccagctgacacgtggacgatgaaaacaagatcggagagagagatctttggctccgcgggttggttgttgcggcggcgttttgctgcagattctgcttcagagattagacgcttgtacgataaccaggcgggcttagctccctccttggtgatggctttagcgaatatagaatgtcgtgtggctggtagagacttccatagatcttccgaggagaagcacttcgaccacgtggtggagacgcaagaggctacggctagtgactcagggtccatgtaaggaccaacaaggcagagaatctcccaagatggtggagacggtttggtatgttggtgctcgtcgtcttctttgtgcatagccatgagtagtacgactttctcttcagtgatctcatcgttgcgtttgcgcttcagagggttttgtttcatggtggcgagagagaagacagaggacacgtatgtggacatgtggaagttgtctaattgtttacttcagtacttgttttatttttcttcttctaaagcttggaactgaacatgtgtatttatagcggtatgaagatgttgatgaccaatgtcgaatcctattaggaaacgcgttaaaagttaaaacaataaagtgagacttaatctataattcaaaaaataggaaatatttggattgatttagggtgagtatatccggattcgatccaaatatatctttgtaatcaaaatacatgtttaagggtttttatttttacaataaataaaataattgttaaaactattagcaaaataaactatatgttgaaacattgatgtattttagaatggttataagaattctatattctaaaattctttaaaactcaatttgaaaactcttatatttgagattttcgtattgaatatatttttttaatttttaaaataaatttttcgtattattattttaaatattttatttttgaattcattgatcatacaacaacacaaatgacaactatctcagctctaatatcacactgagtatatactgttgttttatttcttttatatcatcaaaatcaagagaatgtgtatatagacgaaactcaaagagttttgacaactctgtaattgaatccattttaatcaaaataatgaatcaatgcaagaacaaaagacaaagaaacacatgagataatttgcaagagcaaataaaatgcctttagttatcttccggttccttgattagtcttttagatattgttcttcatggttctttgttttctgaagctgcaaagctgtatcaagttatcatcaaacaatggagaaactaagtaaagagtaaagtattctgatgctttgtttaccttatgaactggaaactttgtaataagaaatattgcttggtctcagttccctgtagccgaaagtgactcaaacgcttgcaccaataactgaactttaagtttgcgagctggtgttagcttcgaaaccactccttgaagtgcgttatcgaccatccattcatcgccatttttcttgttttgggtttcttgatgcctaagattcaccttttccgcttcaacttcggggttcggaggcaagaaccgaggctctcttgggttgaatttccttacattctctaaggctttgacgaatctcctaagcaaaatcgctcttttgaggttgctccatcggtcaatcctcacttttgagacctgtagagtttcactcttctgtcttgtttcttcattgtttaggttctgatcttgactctcttcaagagagattccatctatgacttctcctaatagttccactgcttcggtttggtaaagttccatcttttcaccatccacacttgtgtcttctttcagttcttcttcttcttcttcttttcttgtttcttcaggcaatgtttggtttttctcgttgtcttccatctgtttgcataatatccgccacaagctcgagcactgttgtttctcttccaaatctttggatacaccatcaagttttgcactctctttgagatcttcttggagatttctcagttttcctctaatgatctcagcattagcttcattttcataatgggccgccatagaagaaatgctggattgacgagagatgttcctggacgatgctgctgaccccggggttgaaccactccccatatcttgtaagcttatagtgtcgaaagcttgtgcaagaagagagacttttcttttctgagacggtgctaatgtcgatatggcttgtcgtagagcataatcgagcatccattcctctgaattcctcttccctccgatttcctgatgcctcaaacggatcttttcggtttctggatcgggttcccatggcaaaacacgaggtgtcttggggctgagtcttgtcagacttcctaagtcactaacaaatcgctttagaagaatgactttcttcacattgttccatcccttcactcttttctcagtaaactttggtttgaaggtagctgaagaaacttcactcttttcttcactgacttgagagtttctttcaaatagttcttgctccgtagttatatcactgtccatagactgatcatcagatgagttatccggaatttcagagagaattttctcaagcgcttctctaacaagtgtaactgttccgcttcttcttgcatcaatctgaagaccaccagcctcatcatcatattcactttcaactgaagccactgattcagcatttgcagaatcaattccttctttctctgttaccatgtgtttatagatgagcttccacattctcgagtctttccctttctcaaccacgattcgctgtttaaaatttctgataggaggcaaatttctggattccttaggcgtattatgaacctcctcttctcctttcaagtctttttgatgtacctgaaatcttgcaaagacatttttaatcttctgctcatctttgttgacttcacaaccttcctctactctcggttttccttctttagtttcatcattgttccggggagtatcactgttcttggtttgtttaggtgtatcatggccatcaaggacaatatcaaaggcttgcacaaggaggtctaccttctttctctgtataggagccaatcttgatatcgcttgtctcagagcataatccagcatcatttcctctccttctgttcttgttccttccattattgatcggtgtctcaggaatacattttctgcctcaaatgcagactcaacaggaagattacgcatctttctcggattaggaacctgtactttctccaagcttttcacaaatcttttcaaaagtataacctttctcaagctgttccagctcctcttggtctctccttgatgttctttctcctctttaagagagttagatgattccgaaacactctcttcgtcggacgatgagtcaggtatctccgagagaatcgtttcaaatgctagctgaatcgatttaacagctgcagcattagcatcatcaatacctgtcatctgatcagttccataggaccacttgtgttcttgctcagtttcattacgatttccctcgctgttgtctctcatgaccatgtgcttctgtataaggttcctccatgtagaaagattttgcttttcagattctcccttcttttcttcttcttctataaacgaacccaaagccaacccatctacttcttcttccacagcaagatgattacataaacttgcatctgctgttgattccaaagcttcatcagatttcataccaatacacagagatgatgatgattcactagttaagtttgtttcttcaagatcctttgctggtacaacttccagtagatcagtagtgtcttcattgtctctccagatcgttggtgagttcactgtttcgttctcttcatcagatttcatatcaatagacaaaaaggatgatgcttcacaagttaagtttgtttcttcaagatcctttgctggtgaaacttctagtatatcagtagcgtctttattgtctctcaagatcgtttgcgtttgcgagttcactgtttcgttctcttctcttgcaggacttacaagatcatcatgacctctagaaccaccatccattgggattaaactttcaaaagctttaacaagatgttttactttctttttctgcgatggagcaagtgtcgaaatgacttgcctaagtgcgtgatcaagcatccattcttctgcattcttcctctccccaaccagctctcttctcaaccgcattattgtttcactctctttgccatcagataacttacgcctctcttttcggtccaaagacttgagaaatctcttgagaagtattactcttttcaagtaactccacttcttgggacctctctgatgaccaaattcatctctcatatgaaaagtagaagcaatcacagacaaatgtgtatctctttctataacaggctgcatatccgagcaacttgaatcactcgaatccgctcctacatcttcttcccccaatccaacctctaaagcttcatccttcgtcatagaaatatcatcagacgagtcatcatcggtgatttccgcaagtatctcatcaaacgcttgcttaacgagcgttacagtttcattccatacatattcggttttctttccatcctcttctctcaattctccagaggaaccttctctgcaaacttcttcattatctcccacagttccatcactcgtcgttccatcgaccttaccatcatcatgatcgtgacccgtcacagtttgctcacatatagcgcgccatagtgtggcacctacagtctccgttttagattcctgaacctttgatgcaacagtctccattgcatccattcctctatccacattatcatcaacatcaaccattactgtctcactagatcttccaatcgattcattatcatttccaccatccacagagctggaaacctcttcttcaaacacctcttcatcagaatctccatctacattatcatccacctcctttgattcttgatcagtcacaacccgaccacctaaaggccctctctttctactcaaagtcctcttcaataacaccaacctccggttcacactcttctgcctattcataaacttcctcctcatcgacacaaaccgcttcaaagatggaacaccagcattgttatccgcagcgtggctatgacgcctaccatgcagagaacaatacctataagtgcaaacatcattactcctcttagaagaagaacctttcatagctgaagaacatgtagctttaagcaaaccattgtatctcaagcttgctattctcttcaacctagctgctccaagattcttctgattgttttcgacattctttgaagcagaagaactcgttggtctcaagtaatgaggctgtaacaatccaaaatctcccctatcaagattctttttccttagaatttgtctcgaatttgaagttaaacgcttcatagatctcatcttcttcaatctctgtcctgctccatataatgtcctcgttgactgtctcctaagaaccttcatgcttgaaattcgtgaaatactcttcgatttcgctcgtctcttcaccgatcttggcctttcctgaaaccaaaactcaccagatctctcattctaaggaactctaagattccgacaaaaacagagagaaatgaagaaaaacagaacagattgtgagacttgcctggtcaagctcctcattctcatcagatgatttcgagtaagttctggaatcatcagacatctcggaggaagaggaatcttcagactcggcagtgtagccggagaagatggccggaatctgatcaagagtgaagtcggaaccggagaaaccgaaactgggaaatctagaaagcttgatgggtttcttccacatcttcctctctctccttttatgaactcttctgctgcttttacttgttgagctctcctcccatttctccgggaacatcggattcgacattctctgtttactctaaagtttctagctttttgattgattgtcaccgcaaatctctctctgtttttttctctttttcaaagacagagatgaccaaaattcacaaaattgcaattcttcttatgtttctctgtgttcgtcaaagatcggaactttttattcgttttctttgttttgtttgattcgtgtttgaacactcttcgaagatgagaaagtcgccgtaattgaatttttatttttatttttttaagctgaagttgaattttatagcactgttagatttggataaatattattttcctcgatagaaatgatgacgtcaaatatcacttgacctgttttatcagcttatataatattttttttaaataattagtacaaaaattgtctttataatttaggaaattttagtttacaataaataaaagaatgttgtaacttaactaagaatttaagtcaattctttaattaaacgtttgcgttatatatatagacatattagtatcagtttttgttgatagaaaagaaatctgaaaagaaagagcgttcattgactaagaacatttaaacgacatttaatgatatagtgaggcacaaaatatctgtctctaataatttcaggcttaatacacatattaattgaggttggtgaattaattgaacagggaatgtgggtgttagttcgctaataatactacgtaattatttgtgaaaaatcagaagatatttcaactatttagtaatatatatagagatatatacatagttgacacttgaaaggaaagaattagttggtattaatactagagaggatacttcaacagtaatcagatgtgttaatgagttattgatgtttcactttgagtaatgttccaaagtttaggtcatataatatagatttgatttgactgaatcataaatcaagcttgtatcatgattttatgatctagtaaaagtagggccacaagaaaggtagtagtagaaagatgtaccaataaaagttaaataaatagaacgcgtaattgtgggacccttcttaaacatgtgtttgattatgacacatctaccatgtgatttcaaatatccctctgaaatcacctgtttttaatcaattttgaaacttgtagatttacaacttacaagacataacaaatatatacgcacatcaaaaacaaaagttaaatatcaaattttcttactatatagctgatcttatttcctatttcctatttaaatatcaaatttcctatttcgtatttttaattcaatgaaaatcgagtgtgttggaatatgcttttttcacacaaactaaatttcaagcaatattcacactctcttcacccattgatctttgcagggaagaacacctttttgttttgtttttgtaacaaatattggtgatataataatttcataattttctagaaaacagaaaaaaaatagagtacaaagagatagaacactagaagtatataaagatgcaataatctcgataagctagcgatacagctttactattgcatgttcagaaatgtaagagacttgtgtcgcaccacgaaatatagtttttagggtttccgacttttgatattctggagcacattcgattgatcagagcgtaaacatgttttaaggtctaaattttgatttacaaggtataattacgctagataggtagagatcgagtaagaaaaacactaatttagaaacagattactgaacagtgatatgcggcataaaaaacttattatcaatttaaagcatgacaaggaaattttttctcaaaaccattattcttatcgaaatctatagactatagtataatatatagatgcttaaaaaagatataacgtatcaagagattctataactataaaaaaatctcgctttgatcgttagcaaaatcagaaatctctaattacgctttcaacctacgtggtggtgcaaaatcatcatgaggaataggtgctggactacgtcttggaatttttggagtcgggctccaagaaccataatccccgtgaaatacttcttcccaaattacatctccctttgctgaatcttgcttcaccgtaaaactttctccggccacgaaagcaaccacaatgaggataagaagaaaccttacatggttcatacgaagcgccatgactcgtggttgattcaactagggctttgtatcttctctagaatatttaaacgtttttttgttaatgtgtgtagtcattgaagttcaactagtagggacttttgatcttctctagagtaattataagtttttttttggtataatgcgtgtattcgaaaaaagaagtagaatatatatatatatatatatatatatatatatatatatatattcgtgtggacatcataaatgcctaaatgataatagttgatttcgagttttattttcgttacttccaatcaaattctccttgcaccatatttatttttttactgtgagaacatatataagtatatattggaattacgtatccgagaggtttttgcatatttcgtttatttattttcgatatccacactactgtattattaaaaatttgaaaaattcaactagggcttttcatcttctctagaattattcgtttatttatgtcgatgtccacactattattaaaataaaacgagaggatatggttggatcatccaagtttcgtttatgactctttgttcatttacaaacgtttagttttccacttaagttttgaaaagagttaatttccaatatattcggcacagtttttcaagtgtattcatctgttttttttttttttggttggctatatggtccaaattttgatttgcaatatgagattgcacagagagaacaatctttcattatgattaattattgtacaagtaacaaacaccaatctccaatatactttggctctttagcacattgttatgctagaagttagcggaaatctatatgttgttaaacgcagcgtttaaattgaacagtgtaatttaccttgaaattttaagactacatgctgtttagaatttcagatgaaaacatcttgatgttttagaaatccacgtgggaatagcgtaaaatcttatccaacgaacttattttggttttgttgtatttgtgcaagtcgtcacgctaatcgaaaaaagaaaagaaaaaaagaagccgtcatgatcggccatttctcggccgagtctgagtctgactctgcgtccgtgtcaccattatcagatcgagcctgtcttatctcgttgcgattccctatgcaaaaatcttcttcttttttttattcccccatttatctctgatctcttctctcttctcaagtaaacctccctgcttcacgtctcttcttttcttgtcgattttccccagataatcaggtaaataaggctactttcttatttgatctggtggtctttgtgttgaaatctctgggttttctctgttgatttcaaagttctctctttttttttttgtttactgggtgctgtgaaaaatgatcttgtcaaagtctcctcttttcatcgaattgaaactctaattagaaaaaagatcataacttttattaaaaaaatgagtttgctttgcttaattttgcgaattgcttcatagattcattgattagcctatttggggtaacaaaaaaaagctgacacggtttcagattccaaaaatagatcatgactctgtttcttctctgcagaggttttaataaatatatgcttcttctcatgagttctcgttttttttgtcaccttcgcagttgaaaacacacccaaattcatcttcgaatcaataatggatataagtaatgaggctagtgtcgatcccttttcgattggaccatcatctatcatgggtcgaaccattgctttcagagtcttgttctgtagatcaatgtcacagcttaggcgtgatctctttcggttcttgttgcattggtttcttagatttaagctgaccgtttcaccgtttgtgtcgtggtttcatcctcggaaccctcaagggattttagcggtggttacaatcattgcctttgtgttgaaacgatacacgaatgtgaaaataaaggcggaaatggcttaccggaggaagttttggaggaatatgatgcggacggctttgacttatgaggaatgggctcatgctgctaagatgttagagaaggaaacaccaaagatgaatgaatctgatctttatgatgaagagttggttaagaacaagcttcaggagcttcgtcatcgtcgccaagaaggctcacttagagacattatgttttgtatgagagctgatttggtgaggaatctcggtaatatgtgtaattcggagcttcataaaggtagacttcaggttcctagacatatcaaagagtacattgatgaggtgtctactcagttgagaatggtttgtaactctgattcagaggagctttctttagaagagaagctttcttttatgcatgaaacacggcatgcctttggtagaacggctttgcttttgagtggtggggcttctcttggtgcgtttcatgttggtgtggttaggactttggttgagcataagcttttacctcgaataattgctggttctagtgttggatccatcatttgtgctgttgtggcctcaaggtcttggccagaactacagagtttctttgagaattctttgcattctttacagttctttgatcagctcggaggcgtgttctcaatagtgaaacgggtaatgacacaaggggctctacacgatatcagacagttgcaatgtatgcttagaaacctcacaagcaatctcacattccaagaagcttatgacatgacaggaaggattctcgggatcaccgtttgctccccaagaaagcatgaacctcctcggtgtcttaactatttgacttcgcctcatgtggttatatggagcgcagtgactgcttcttgtgcttttcctggtctctttgaagctcaagagctaatggctaaagatcgaagtggagagatcgtaccgtatcatccacctttcaatttggatccagaagtaggcactaaatcatcatctggacgccggtggagagatggtagtttggaggttgatttaccaatgatgcagcttaaagaactgttcaatgtcaatcattttattgtgagccaagccaatcctcacattgctccattactgcgtctaaaggatttagttcgagcttatggtggtagattcgcagctaaggtatgtatttagcatagttgtttttgttggtctctgtttcttttctttgttgtaaccacgctactttttcgccttttatatagctcgcgcatctagtggagatggaggtcaaacatagatgcaaccaggtattagagctcggttttcctctcggtggactcgcaaagctttttgctcaggagtgggaaggtgatgttacagttgtaatgcctgctactcttgctcaggtttttatccaaaacccgaaatcttgaattttctttgattggtatcagagattttagacttgcctgagattcttattgggttgtggattttgtgtagtactcgaagattatacaaaatccgactcatgtcgagcttcagaaagcggctaaccaaggaagaagatgcacttgggagaagctctcagccataaaatcaaactgcgggatcgagcttgcgcttgatgattctgtagctattcttaaccatatgcggaggctcaagaaaagtgcggagagagccgccactgccacgtcttcgtctcatcacggattggcttcaaccaccagattcaatgcttcaagaagaatcccatcttggaacgtccttgccagagagaactcaacaggctcactggatgatctagtcactgacaataacctccacgcttcttcgggcaggaatttaagcgacagtgaaacagagagcgtggagttgagttcttggacaagaactggtggacctttaatgagaacagcttctgctaataagttcattgattttgttcagagtcttgatatcgacattgcattggtcagaggatttagtagcagtcccaattctccagcagttcctcctggtggctcgtttactccaagcccgagatccatagcggctcattcggatatcgaatcaaacagcaatagcaacaatcttggaacaagcacttcaagcataacagttactgaaggtgatcttctacagcctgagagaacgagtaacggatttgtgttaaacgtcgttaaaagagagaacttgggaatgccatcgattgggaaccaaaatacagagttaccagagagtgtacagctcgatataccggagaaggagatggattgtagctctgtatcagaacacgaagaagatgataacgacaatgaagaagaacataacggctcgagtctggttactgtttcttcagaagattccggtttacaagaaccggtgtctggtagtgttatagatgcttagagtgtgattgattcaagtgagtatagattcttaattaaatttgcagagtttccaaagggtttagtgcaccacttgtgtatgtttgtattgcttattgtttgaaattcatttgtgaaatcgaaatatatctgtaaattcagaaaatattctctcatccattacaaaatatttgagtcaaaaatcattagtcaacaaaataatctaaaatatatctgtaatttgtgtgtgtatgctgacaaatacgacaatttgtgttgaaaaaataatctaatatatctttttcgacaaggagatgtacgtaagtatatgattggaaaatatatgaagatttaaaggagacgtgagatatacagtatttgttctgttcactatgtacaaaaaacacttacatgtacccaagattcgcaaaaggctaataatgtaaaacttttatttttgggctatgataagatagtaaacttttagtttgaaaaaatatagaagaagatttttttataaaaaggaaaaaaataagaagattataaggtaaaaattctttttcgccaagataaggtaataaatctaatatcgatattttttttttgaccaagtcatatcgaattgaaacaaaggagacacaaaaccccatatatataaacaagtctgcattcacccaaaatactaacaaaaaattgaagaaaatcgaaaaattagtaagcaacaaattaaaatggaaaaagttacaagcattttctttgttcttctcctaatttcttcatgtaagtttctcaaggtcatttctaacgtatttttttaatatataatttagtttagtttgaaatttaactctggtaaaatatatatacaggtctgattttgaggagtcaaggtcaatttcgatgtaagagtgttgcggaatgtgattctcgtggttgcagagtaggaacacatgtaatatgcaatgaacaccacatatgtacatgtgctcatggttctcccattggtggtcagtgtgatggagtcgaagactgtgacctttctggctgtccaccaaactctcatgttatatgcgatagaattggaggaaacttctgcacttgtgtccccaattgatttaaatggtctctaatgattggagtaaatttaatataatgtcttatatataaagaaatatccattataattcatatgtgtgagatgtaatatcagtaaaaaaaaatattgattttaattaaccattatgctttgaaaagtcttcgttgcttttagtttttagacacaagtaatttaaataaatacatattttactttacatataattcttaaaaatatatattaaaaataaatttaaactttagagaattaactttaacatgttttactaaaataattttattgagaaaataactcacataattaaatgcttggaaaatatacaaaaatttggaggagacataagaaatatttgtttgttactatgtaaaagtaacttacatgtagcaaatattaataacacttatcgaaaaatttaagttaagataattaaaagttaaaaaaattgaaacataattttattttattttataattttattgttgaaatctatttttctaaatgtttaaaagtttaaacaaatatgaagataattaaaagaattatagtaaaataaacttttttatgtccaaatcaaataaagtaagtctctttttctaaagaaaaaaatgattaatttgatataaaatatataaaaaataaattagtttattatatagtaattgatcttaaatagttagagtaaaatatctaaatcttcagaattttaacatctagtaaaaaagaagacatgtgtcacatgtggccctcattttttggttttcaacatgttgactctattcaactgtgtttaatctacatatgattttttgctgttaaacaatttattcaacacccccattactcatagtaaggtaaaatattttttttttccttaaaactttagtcaaggtcataagatcgaatgtaattaaatcacatctcagcaacctcttaattttgtagatcaaacaacaacacattttactaaacgaaatattaatagactaccattttcttatcttggttttaaacaaaatctgtcttattgaaaataagtctctaatttatttaaagttttttgatattggtcgaatcccatttatacattaacttaaaggttccagttgcattatttcgtacataaattccatcttcttgcgcttgccagaaacatatgttaggttttctccctccacatatatcatgtataaaactttctttcccaataaatgcgttaaacttcgcatgatgcacatagttaggtccctgaaaaaatatatgtatttcaaatatataaaacttgagactatcgtagtaatgaatatgtaattaggagtaaaagaagaatttgaaattaccatccatacgttgcaccatatcaaagtttttgggaaaactgtgaacttgagtgtccatacggtattaaagggaagaaaatcaactttggttgcttgttgtttgccggatctacaattgatcataagctgtttgttacctccaagttgattcgaaatttggatgttgaaatgcctaaatataagtaaagagtctatttgctggatagagataaaaaatataaagaggaaacatataagaattttctccatctttgttattatatattttttttctcattacatgaataggtatatataccctttttcacacacttgtataattgttaatatatttaacttcatttcatttattgtgtttcttttatactctttccgtttcatattgactatcattttataacttctaaaaactatatcaaaggaaaaagatctatcagcgataacataataagattgatcatcaaaacatgtatgttacaaaaaaaaaaaaaattgtttcacgtaatttggatttcacttgagaactcggcccacgaaacagacatcaaagcccaaaagtaaagtaatccatttcttctccaatttgttttctccctctctgctctgctcctcctccgtcgccgccggtgaacacttcgctgaactttttctattccatggttttgcggctgagagttcactctttctacaaccgtggaatctcattccttgtctcttcttccttgaggaatcttagtactgcttcttcgctttttttgaactccgaccaaaccatcactgagccattggtgaaatcagagctcgaagccctagttctcaagcaatactctcatggtaagttctacagtctcgttaaaaacgccgtttctctgccttgtgtccttctcgccgcctgtcagaatctgtctctctccgccaattcgtccggagatttagccgatcgtgtctcccggaggttctcaatcgaagaaatggggcgcgagatacgcgaaggcaggtttgatattcgttcatgttgcgtcgaattcatctcttcaagtcttgttcttcccaatttaaaactcaaagtgttgatagaagctattagaatggttcttgagattgtgtatgatgatcgattcgctacgttttcgtatggtggacgtgttggtatgggtaggcatacagcgattcgttacctgaaaaactcggttgagaatccacggtggtggtttcgtgtttcgtttgctcgagaaatgtttgaagaacgtaatgtggatatactgtgtggctttgttggagagaagatcaacgatgttatgttgattgagatgatcaagaagctgtttgagtttgggattctgaagattgagcttggtggatgtaatagtggaagaggttttccacaagagtgtggcttgtgttcgattttgatcaatgtttactttgatggacttgacaaagagattcaagatttgaggctaaagatgaaagttaagaatcctcgcgttggtacaggagatgaggaatcaacaggtaatgttttctttaagccagtgaatatttatgcagttaggtatttggatgagatacttgtgataacatcaggctcgaaaatgctgacgatggatttgaagaagcggattgttgacattttggaacagagactagagttgagagtagatagattgaacacatcgattcatagtgcagtgtcagagaagattaactttttagggatgtatcttcaggctgttccaccttcggttttgcgcccgcctaagtctgagaaggcggtcagagcaatgaagaagtatcagaggcagaaagacgttaggaagttggagttaagaaatgctagggagaggaatcgtaagacactggggcttaaaatatttagacatgtcttgaagaaaatcaagcagagcaatgggtttaaatttgaaggtgagatagagaatgaggttagggatattttccagagctggggagaggaagttatgcaagactttatgggttctctcgaagagcgatggaaatggcactggctgctcactagaggagattttctctctttgagacatattagagagaaattaccacaagacctgattgatgcttatgatgaatttcaggagcaggtggacaaacatttggctccgacccaggctaaaaaggtacttgaggatgaggagaggagagtagaagaagaagaggaacagagatatgctgaaaggacagttgaggatttgactaagttatgcatgaaggtgtcagctccggaggaacttgtcagaaaggctattaagttagttgggttcacaaacagcatgggacgaccacggcctatcattcacctcggtgactctcgaggattctgatatcatcaaatggtatgcacgggtagggcgtaaatggcttgatttcttctgctgttgccacaattataagatcggtaaaatcattggtacgtatcatatgaggttctcatgtatttgacactagcatgagaagcatggatccactaaaaagcttattagacactacacgaaagatctcagagtatcagatcttgacgggagggaagaggcccattttccatcggaaagagaggttaagatgatgggagacaagaacctttcagaccctaaacctgtggatggcacactatcgttgcttttgatcaggctcgcatctgatgagcccttgcatcactgtgctgctagtttttgtgaacgatcagatacaattatgcaccgtgtacatctactgcaaaaccgtttacatatcaacccactagacgaagagaaatgggttcctggcatgggcaccatccactcagctttgaatcggaaatgtctccctttgtgctccactcacatcagtgatgtatacttgggtaaaataacccttcaggatgttgatagtagttcattcatcgatctcaggtgatgtctgttactctcttctacaattggttataacatctgcacgagagtaagaagtaaaaatggccattgctgagatcaggcgaaaatgcgtgccaacagggtgtatcacatacacattttgtcttgatttcatcatgataggaaaatgaatgaatacttcataagcaactgtctggctgcgcaatggcatagtaagcttcataattgtcagggggtttggttcttctcaggatcaggaaacaaagatttgagcattagttacctgaaaaacgcaatgatcatctgcatacacctgagctgtaccttgcacggagcgaacatgtttgttcctttacggtcgtcagtatcacgctcagcattgtgatctcatttgacacaccaaaagcagttgacacgatggatatttgtcgaattggcggttggcaattgacagttgtataactataattttgcaatcgtgtaatgtatgaatctacattttagtattgtagtagtaagagggacacttttcttctgtatcatgtaaagaaagaagtgaggtcaattactgttctggtaaactcgcgaggacgtctagtataattgcgaaaatgtaggagtggatatgtgaatacaagaagttttgaggggccaatttgcaaaaagacatgaaaaagaaaaatgtgtcgcgtgtccctcacatggattgccgacgggaagcattaggggtaaagtcgtaaataaatttgagatcttcatcttctctgtctcctctgttcgaagctgagctttttttggttgcttcagtcactcaatagattcacatggtttcagacagaaaagtataaagaaagatttgaatagcaagcgtgcgagagttgaagaagaggaaggattgttttaagagcaagaaaggaatttgaaaaccatgggaggaggttatgtgttgtttggttcggctagatcggggcagatgataatggtggctctggtcctaatggttggatcattttacgcaggctctatcttcggaaacaattcacctatttacatttcccaaccttcttcttccaattcttcttcttcttctccatcacaatctggttcgctctctctctctctccctctgtatttttttaaagtcttatccttttctctgtatatcgttaaatttccatgctttgcttgatttttgttttccggagctatattgattgaaacccactagatttctattctatatcgaacatagctctcagtgtagctcgctagtttcttttttgaccacttaggtcttcagtttctgttggattaggacatgaatagataatgcaacagtttttttgttgcaggtccatcaaattttgctaacaaaatagagctcacttaccggagaacttctgtttcgatccctgagagtggggtgaatgtttgtccattgaagttcaatgagtatataccttgtcacaatgtcacgtatgtgcaacagcttctcccaagcttgaatctttctagaagagaagagcttgagagacactgtccgccactcgaacagcgtctgttttgtttggttcctccgcctaaagattataagataccaatacgctggccgactagcagagattatgtatggagaagcaatgtgaatcatacgcatcttgctgaagtgaaaggcggccaaaattgggtgcatgaacaaggtcagttatggtggttccctggtggtggtactcatttcaaacatggagctccggaatacatccagaggtatttgaaattatcatgtgtttcgatttctatattgctttggaattcgagggagaagaaggttagaccgggttttatacttttgcctaatgcattcccctgaatttctgtattgtaatacaggttaggaaacatgacaactaatgaaacaggtgaccttctttcagctggggttgaacaagttcttgatgttggatgtggagttgctagctttgcagcttatcttcttcctttaggtataaagacaatgtcttttgcccctaaagatggtcatgaaaaccaaatccagtttgcattggagagaggaatccgcgcaatgatctctgccatagccaccaaacaaatgccatatcccgcggcctcgtttgatatggttcactgttcaagatgtcgtgttgattggcatgaaaatggtatgtctcttgtgttcttctttttgtttctcaatgccttgcttggttttgtattatttggaactaaagagagtcatttgggtttgattctgcagatggtgtcttgatgaaagaggttaatcgtcttctccgacccaatggatactttgtttactcggcaccacctgcgtacagaaaggataaagatttccctgtgatttgggataagttggtcaatctaactagcgcaatgtgctggaagctcatttcccgaaaggtacagactgcaatatgggttaaagaagatgacgaggcttgccttaggaagaatgcagagctagagcttataactatatgtggtgtagaagatgtttcgaaagcttcatggaaagttcctcttagagactgtgtggacattagtgaaaatagacaacagaaaccctcttctttaactgaccgtctatcttcatatccaacaagtctaagagaaaaaggtacatttcttcttagaaacgagattatgttctgtttgtctcctttaattcacttgggaaaattttcaccaggcatcagcgaagacgaatttacattggacacaaacttctggagagaacaagtgaatcagtactgggagttgatgaatgttaataagactgaagtgcgaaatgtgatggacacaaatgcattcattggtggatttgccgcagccatgaactcatatcccctttgggtcatgaacgttgtacctgctacaatgaacgataccttatccggaatttaccagaggggcttaaccggtgcttatcatgattggtaagcgaatacgatctctttctcaaattttcatcctttctcacttaagcttagcaccgatagtaaaacttgttcctcataggtgtgagccattctcaacatatccccgtacttacgatctgctacacgcggaccatctcttcactcactataaaatctacggtgaaggttgtttactagaggacatcatgcttgagatggaccgcattatacgccctcaggtattttacaaagcattaaccttatcggtctcactaccatttagtcataacccatctcatcttgttatgtctgtgactggaaataatggttaatgcggattttggggtttttgcagggatttatcattatcagagacgaggaatcaatcgtctcaagagtccgagacttggctcctaagttcctttgggaagttgaagcacatgagcttcaagacaaatacaagaagacagaaactgttctattttgcagaaagaaattttgggcaatcctttgaaaaagtccacgtgtagaaattcttttttacttgtcttggttattactaagaaaaagaaattacagattacttttgtaatgtttgttcattgattaactgtaatagatgtctccttgtacatgttttgtttcgcaacacactctcataaccaaaactagaattagccgatgggcctttttttaaacttgtaaacatttttgtcccacattgaacactctgcataagcccaaagtgagtccatttgttctcttcttcgtcttcgtcattcttagtgccttgttcaatgtcgaatttagtctacaacggaaaaacccatcgattattccccggaaaaagcatctaatccttgcattcggctctgatttcttcacgagttcgcaagatcaagttgttagtctacagatttttgttcaggtacataaatttgatggagaatttgaaggaggctttgcgttttatctgctcatctaatttctggaggatggttctgttttggaacattgccctccttttttcgtactttcaattgcttaaaaagagtatctttgcccccaaatcaagttcctcttcttcttgctccaaattcaatcattcacacacacctgtttgtgttataactggtgtaagtcagtcattctctgttgcctcgaatcatgaaatgtagtgttagtttctgtttttatatcgtctgttgttgaattcattgcaggctacttcgggacttggtaaggccactgcgtttgctctttcaaggaaaggtttctacgttgttcttggtaaaagactcttgctttgaatctcgttttcaattatctcttgttgatatggagagtgataacttggaacatgtcttttgtcatatattcaaagtgatttataagctgagtctttcttgttgattttgcagttggacggtcctcgcacttactatcaaaggttttctacggtccctttgattttccttgtaccgatagatagaagaacctccgctttttccttgacgctagaatctttgtgattgccactttctgttgacagaccttgagtgatattaagaggcagaacgaggatgccaaactcaaagcttttgaagttgacatgtcgtcttttcaattagttttaaagttcagaagctctctagagcaatggctttttgagtcagatttgcattcttcagtccagcttttggtgaacaatgctggaatactggcaacatctagtcgtccaactgttgaaggctttgacaggtaaggttttcacttttcactatggtttcagaattttgaactctattgattacactttcagtctccatcgttttcaggatgattgctacaaattatgtcggcgctttctctttgaccaaacttctcttaccgctcctgagaaacagccctgtgccttcaagagtagtgaatgttacatcttttacacatcgttctggtgaatagtttctcataatcaatctgattgaatgattttgcgtcctaaatgagaataagatagttatgtcttttcttggtatatgtttttctatgtagcttttactgggaggtttgacatggattctgttactggagtgaacttttcaagatcaaagcaatatccttgtgctaggatctatgagtattctaaatgtaaggaaacccactcataaaaacaagcatgtgtgttttcccttatattgtagtgatgctgatatagtttctgatcttttgtgatatagtatgccttctacttttctcgtacgagctgcatagacagcttcacctcatggatgattcacatcacatctctgttgtgtatgcgtcctaaatactcatttctctttacatcatcgctcacttatgttgtctctagtctctactgttcataattgaaacaaccagtcttaaattaagcaaattactatcttaaacaattaggcgctctattattcctatatgtttataagttttgggattatgccttactcatgtgtttacactttttttatggtttgttgtagagcggtagatccaggagcagtaaaaacaaacataatgcatgagcttccttcatatatacaagtcattgcgttttgtggtctcaagattcttggactgatgcagtctccagaggatgcagctgaatctgtcattgatgctgctttagctccacctgtaagatatgatcttttggaattcttcatcttatctgcatcaaccttatgtggttgaagagctctatgttgatctgtttttgcaggaaatatcaggcaaatatttctttggcgggaggaccattgaatcttcaacactttccagtgacccgaaaatggctaaggaactttgggacacatcatgtctcatatttaacgaattgcagcaaactcacacttgaagatcaaaaagcttctagttgttgcttgctaatgacataatcctaggatccaaactgtatcaccttctggtttcttgtataaaatcagtttttgtgtttagtattcccttgttagcatctacgtagattcttcttttataattctttttgttcaaatttcttattgttaccaaaggaaatttttgcttagggatttgttgtcaacttttgagccattcaacttaaaagtatgattagaccaacattctgcttttaatcccattgtggtgatctcaagtaaaagtctccttttcacattataaaactcacggaaccatagtttctgcaatagacccttcgtgaaggaaggtataaagatataaacgaataaaccgaaagtcatgaaaaaaaacaaagaagaatatttcatctaacagtgccaccgttacacgtattagcttaagaaaaaacagagcttatataaagagaagcatccacaccacaatgtgtaatctcatcgctaaccaaaccaagaatcatattcccaaatcacaatccgcttttgtgtctttccacttgcataagtgaaagagccaagacaaagaaaggagcttcttctgtttttgtccatacttttgagaagatgcaggacatgagagatcaaaatcctccacaaggtcagattttttcttcggtttccagtaacaatgaatcaaacttattatagatttgtagtacttatatctctttacaggatatccagctgcagaacaagtatctgaacagcctggacaagacaagaagaagaagaaaccacggtttttcgagacaaagcagaaaggagacagaggcttcattgaaggatggtaaaggctaaagtagcaaaactaaatcattatcttttgatagcaaccaaaactagctactcagaaaaatcttttctgtttttgtttgtttcttttgatgcagtctctttgcactatgctgctgctggatttgtgaaatgtgtttctaaggaaacgaagggacacgtgacgcttctttcttctgtatctaagaatggctttccttatctatagttttacctgagagagattgaagtttcaggttgctcagtttcaatctccctaatctatttgtgtggtgtgtttattgaaagaagataattatactaataatgtaaaggatcatactattttatgggtcttacaagttttagacttggtcacactagcccaaagcaaaaaactgcttcaaactgattatacaatcaaaatcgaatatcctacaatgatgcaattaaaatcaacaggttcttaaatatttattactaaaaaccaaatttctctacacttgagaataataatattagtaatcaccctgaaccccaaaattgtctttcgaaaggtaagaatatctatgtacactgatcatgggattaaatcctgcaagtagttgcagacgtaaaagcatgactacgaagttccatgtgtaataaacctaattgcttcggaagttttcgtaactgaagcctgatgatatggtcctcaatctttcgtggtctcctgcaagagaaagcacttgtggttaccattcactcttttatttttctgcaagacttactggtgtctctagttcctgaatgattcagctttaagtttttcccattatagctgagatgagccaaacactccatgaaatctattgaactagagaaataaaagaaggtcaacaaagcttcaagtgctcaccttgatgttctaccctttcgctagagtccaggaaattttcagcatcagccaataggaacggtgatccctcgtagctctccagaatatctggtattaacaaacaatttacgtataaaaaaaaagaaaaacaacgaatcctaaattctcaatgccaaaactgcagttgctgtgcgagtttatgcacaagtgtctgcttaatatgtgtgcgaaggaaaaagggagaccatgtatgaaaataatacctgaactctgggaaaaatcagctgtcagatcagagaggctgaagttctgaggaatttgtcctaacgagccaaatgtaggagcatctggatcgacaagaggatcattcagggattggttgctggaatcattgctgaaagatgcgatggtgacatctccaactgtggactgtgcttcaccaccatacatgtatggagcacagttttgatatgcagtctcagacttgatcattccttgcatcaaaggcatatttgtggcctgcaaggagagcgagtttggtgaaggatcaactcttctagaatgggatgaaaagtccacataagaaggtatatttgtgttaattgctgagcctccattgaggtatggacttgacagattaggagaggattgatctggttccttgcgttcatagagtaattgttgctgattcactgttgaaagaaatgacgttagttgcaacatgaaaacctcttcacaactcattacttccatgcagtatccaacaagtaaaacataaaaagcctcaaaacagtaaaaagtctttggactcattaagctttaacagagggatgcgtgaatcagtgaaacaagacgctcaatgcttcaaacagatgatctaggtctatctaaatgattctaagagacaacaattatgtatcactagaaaatacaaatccacaggaaaaaactcgaactagttccaaaacatatcttacttggtggaacatgagaaccattcctgtttcgaacagaagcccctgcagttggatgcatctggcgcatgtggtttatctgctgctcaagcagttcgttatattccattatctggtgcttcaccatgagcctcagataatatgccttgaaaaattcgcggttctcttcttcaagcttctgccaaactgtcaactcagaaggaaaatatacaatcataatgatctactagagacaaataagttcaaccttcatatatctagttgctaatatcaaccacgatctatgatttttaaataatattcttccaaagtggttcaaaccaatacaagctaacaagtcagacttggtctaagaattatccaatcaggttcaaaaaaatccaggaagtgtggaggttacctagttctgtaaaaccaggttcgatcttagcctgttctagaagagtgtcaacaacttctttctggttcatgtaaagctggaggcatcgttcaattagattctgaacctgcaaagaaacaaggacaggccagaaagaatagtatgtcacatattctaaagaggtttacacacaaaagctgaaggccttccttaataattccaatgcacaggtgaagagaaacacacaaaaaaaaagagaagatctcatggctaacaaaattatttcctttcactgattcaacgcatccctctgtaacaaaattataccagttgtatatcttcgcgcgatacccttctcactgttaaacttgacatgggtgaaatatctgtagaagcgatcctgttcctgtcagaagaagtacgcatctaactcctgtcagaataacaaactcaaaaatgtacttaactgataaagcatacaattaagacacaaaaataccaagcatttaacatactaatctcctattaaactgagcttcaaattagaagccataacccataagacatcaatattcaacatatttaatacaacattgaatatatattttttttgcgataaagagaataacaagagctaacaaaatcgaattagtcgacatagaccaaaaaaaaaagaatccaacagaggaagatggatttaagagcaggagcttataaaattcgaaacccataaacttttccaagaattc

SEQ ID NO: 1403 - DNA, 93045 bp, Arabidopsis thaliana
cttgaagcgcaaattgatgcgttggatagaaaaattgatcatcctcataaataaaaattatatgaatgagatctatatgtatatagttaattttgcttaagattaacaactttaaaatgtatatatttagtaattttatgatcatttcaaaggcattgtgtatttgaaattcattagtattattttgtagttagtgagagatccctataattatgtcaacgaaataaatagattgaaaaaacagatttgccttgcattcctaacgacctccacatgttggttagaaccttctagaatcagaaacagtagctagggtgttgacgtgtcacctaactagataccgtcactaataaaaatatcaccgcaccgtcaccgaaaacttatatccaatctctcaccttcgtggaagattttaaaacctgtactcgctgcgtaatttctttcttttgctttaaatcctttttctttttttctcttttatctttttttcttttccacggttgcttaattccaatgccatcgtgatcgattcatctctctctctctcttccaattttcccaattcttttttaaaaccctaatttttcagatatctgattatctcttgtatttcttctactcgatttgctcccataaaaacccttactttcttcaagttctggttttcaccgattgatgggtcgtggctcagtgacgtcgcttgctcctgggttccgttttcacccgacggatgaggaacttgttcgctactaccttaagcgtaaggtctgcaacaaaccctttaagttcgatgctatttccgtcaccgacatatacaagtctgagccttgggatctaccaggttacaactttttctctcaatctctcttttttgttgtctagttagatcgaattatggagcttgattatgaatgatctagaattctgattgattcgattgattttgtgtgtgtatagataagtcgaagctgaaaagtagagacttggaatggtacttctttagtatgctggataagaagtacagtaatggttccaagacgaatcgtgctacggagaaagggtattggaagacgactgggaaagatcgggagattcgtaatggttcaagagtcgttgggatgaagaagacacttgtttatcacaagggtcgagctcctcgtggtgaaaggaccaattgggttatgcatgagtatcggctttctgatgaggacttgaagaaagctggtgtgccacaagtaagttttgagcaattgggtttgttttgttttccatttttgatctgaaagttgttttcttttgtgtctatggagagttattgactttgttgagtctttttggtggttggtggagaaggaagcatatgtgttatgtaggatattccagaaaagtggtacgggtcctaagaatggggagcagtatggtgctccttatcttgaggaggagtgggaagaagatggaatgacttatgtacctgctcaagatgctttcagtgaaggattggctttgaatgatgatgtttatgtcgatattgatgacattgacgaggtagcctacctttttcttcaaccgttccagaaattatttctctttgtgattagtgtgtagtgtaaaagtgattagttatatggttagaaagatggcttggaatatcgcaaatgcgaaagagtgataaatgcagtgttttcgtgttagcaagccttgggtgccttttgcttatgtgctggaatagtatacctgtttaggtttaagatgagtgatggatgttagttagctttaggtcttggcatattgatgatgatatagatctttacatcttctgatggtttggattcattcatgacatgtcttttatgttagcgtctgaatatgatttccttttgcagaagcccgaaaatctggtggtctatgatgccgttcctattctacctaactattgtcatggggaatcaagtaacaatgttgaatcaggcaattactcagactctggaaattacattcaaccaggaaacaatgttgtcgactctggtgggtactttgaacaaccaattgaaacttttgaggaagatcggaagcctattatacgggagggtagcattcagccttgttctctgtttccagaggaacaaattggctgtggtgtgcaagacgaaaatgtggtgaatctggaatcttccaacaataatgtgtttgtagctgatacatgctacagtgacattcctattgatcataactatttacccgatgagccattcatggatcctaataacaatcttccactcaacgatggtctgtacctggaaacgaatgatctcagctgtgctcaacaagatgattttaacttcgaagattatctcagcttctttgatgatgagggtttgacttttgacgattctctattaatgggacctgaagattttcttcccaaccaagaagcccttgaccagaaagtaagacccgttcttccaacgtgcttagtttatatatatgtgaaaaacttctgtttaactcacctttacatcaacagcctgcccctaaagaattggagaaggaggtcgcaggaggcaaagaggcagtggaggaaaaggaaagtggcgaaggatcttcttcaaaacaagatacagatttcaaggactttgattcaggtaacactcagatgttcatggaattccttttaaaacaagtcatatgatgactgattctgactcttttgaatctaaatcatgtagctccgaagtacccatttctcaaaaagacgagccacatgcttggagccattcctactccatcttcatttgcttcacagttccaaacaaaggacgcaatgcgtctacacgcagcacaatcttctggttcagttcacgtgactgcaggtatgatgagaatatcaaacatgactctagcagcggacagcggtatgggctggtcatatgacaagaacggtaacctcaacgtagtcctttcattcggggtagtccaacaggatgatgcgatgactgcctcgggaagcaagacaggaattacggcgacaagagctatgttagtcttcatgtgtttatgggttctcctactctctgttagcttcaaaatagtaaccatggtgtctgctcggtaataggatcaaagttgaatcgtctcaaagactttttttggtgtttgtacctctccaatcatatagcctttaactttggcagtgctttgctgctcaatatttaaatttttattcgaagggtttggtgtagcttgaattctctatatggtttctagtttgagtttctagaaataagaacataaacaactttcttatgacaattattatttgatcccgttattgttggaatcattggtctaaacatgttacattgtgaaatgatatttcgttgtaaaatctctagtaaatgagggaaaaaagcattcataacaaattgattttgaatctttgagaacaaataaagaagaacatgtttcccccactctatctctcattctcaaaaaaatggaattataaaccaatgtttgtttcgtcagagcttataggtatttgtgtcgccaaactgtttgggatttaccttccaaacaaaccccacacaccagcagagccttgcctttgcacagtcccgtcttcttcttcatcagacgctgacctctgtcttctaagcatctcaacttcagcttcgatggattgccctgactccagtgctttctgcaattctgctatttgtgcctgagacatgccattagataaaatcgcacttgagtttgagattttagaaaaagagaaggctattgaaaggttagaggaggcttataaacctcgagtttaaagcatctagaccgttctgaaataagttgaccttctacagattggagttcctgcgataatgtttatggaatgtgaaacatgttcatagaacgcaaatagggataacctgacagatagagattacgtacttgagatagctcagtgtggctactattgacttcatctatcttttccctgagcttcgcgttttctacttgagtttccgcaatagatgactccaatgctcttttttcttctttaatggtatcgattctgttcctaatatctctctcaggaagactgtttccatttccattgagagttggatttgcaggtggaggataatctgacttatctgacttggctatggcataagcagcagtgacagaggctgcagctgcagcggctgctggtgacttaaagattttgggatgtgaggattctcctggttttagcctcatgacaaatatctggatgaaaagaagacaacagcccaaataagcatatcaataagatttgacttgttgaaatctattgctatgtgcttacatcattgttatacttcccgttatagccgccaaaagctactaagatgttctctccaaatactgatgctgaacatacactgagaccctgcagttgaaccatacaacacataagaaaactcggaaaagaaacatgtacgattgggttctagttttggaagtatcaacctcactagcaagtggatgtcttgcttctacatgggttgatgtagaccaaaccagctttgacatatttagaacaagggtctctaaacaacctgcacggaaagaaaagagttaccgaggagagatgaatgcaaagtgttaactggaatcgcatgttgagcgagtaagacgtaattctaaaagcagagactgcatttaccagtactgttatcaccgcccccaactatataccagttttcgtcaatggtgattccagcgtgtcctgcccgaggagttacaacatctccctgaacatgaggctgtgaccactccatctgccatgagtaaagtaaattcatcagaatatgactaaattggcaaaaaaaataccaataaaatgtgcttacttactgtttgcaagtcaaggatatgaagatcactgtagaaaatcgaatgagaacaaccaccaaaaatcaagaggtagcgatcagaatgtgtggcagctgtgtgatcaaatctgggaactgggcgtgtctgcctatcatccaaaaaaaaacaatacagagcatttacttgtaagacgaggtagacagaagtgcagtaaacataagcatggcctagatctagctgcctgcacttttacataaacttactttgtctctacaacatcccaagtcattgtctcaagatgaagaacatgcagatcattcagcagtctcctgttcttatcttccccaccaaaaacaagaactcgggatccaaccagtgtaatggaatgtccaccacgtgaagcctagaaaacatggaagataatataacttaactatccaaaacagctacatatggagtgagcaacaatttagataacagttttcttaccggaacattcccaaacacatcaatgactccacatgaatgtgtttccaaatcaatgaaccgcactgtaagaaaaaactcaaacacataaataagaaattgaaagagcatccaatcagaaggaaagctggatacggctaacctaacatgttatctgatgacttcttggagtgtcccccgatcaaaagaagcttgtttccccacttaatctgccaaaatgcttcaaatttaacattttttttgagtattgattacaaaattcttcttcatgttaagaaaggacttaccatgcgatggtctgaaatagcaggaaaagcttcccgtaagctgctaccatcatcctcttgaatgttatcagcacttgatgattcagttttcagtttcaaactagaccaagtcaaacttctaagatcaaacacctgataagttgagtttttttcaaatcaccacagattcatgaaaacaaaaggaagatacagacacaaagaagaaacacacaatttacctggacatcagataagtatcggccattccggcttccaccaacaatgtagagcttctcatcaacaaccactgccgcatgctgcgtcatccagacaacacacgaaaagatttcagagaaattatctccaatttaatcaaatgcttaaccacagacaaagatataatcagtgaccttgtaacgagctgatgctcgagagccagaaacagggagtggtgtccattcatcgtgagctagatttgaatgccaatcaccgacatctatttctttcctgatctcttccattaccagagagaccacgtcacagcttcactctgccatttttgagaacaaaagagtttcgatctaacaattggatacaataaactccataatcaagtagaaacgacttctaaaatccagaattgagcttatcacgatccttcattttccaacaatgagatcctagtctttctcggagacgatcacgaaattaaagttggggacattgcaatcatacagagatctgaacactaaatttgaaagtgatttcacgaaagctaattaagtgataactgagaaataaagggaaggagaaacaccaacataaagttagaaaccgaaatggcggcgatgaccagagctgccggagaacgtgaatggttcggagccggagagggagaaggattgtgagaagcgagatcgtatctccaagtgtatatactaattaaaaagtttgggtcaattacgtacactagcaaaggatatgggtgcttctgtgtttagtacccaaatattaggggtacttcagaaaatagaaaactgttcctcgtcatatatataattatcagaagatacaagtcttacttgtaaatagtaaaagatccgagcacttgtagttaaataaaagtttcaggatccataacttgatatttactgaagagtctgggagaaaatttacaagatctgaattatgtaaatagagaaaagtaagggtctgatgtgtaaacagcagaagataaaacttttacggagttgatttttgaagagcttagtatttaccatcctcctaagtcctataccgacacaacacgttttggtatcatgaactgaaaatagttgataaaagaaagaagcaaatgcaatgtaatggctggttattgtaaattgttacaacagaaagaactcaagggaaacaaaacttcaacaaattgcaacaaagttattaaaagaacaaatgaaaatagtacttctctaactccaaatctgcttctctcccagagaaaaacacattatataatgtcgacatataaataaaacgaaagagagctcctagagagaaatctctgcctcactcaaagatgattaatgatccccatccgatagcttaagcctccacaaatgaagtcaacagaccaaagataggaaccgagatggattctcttaacggtttcaatcggtggttctctctgtggctgaatcaactttctgttttatcattgtctcagcttgttggattgctctctgtggccctgtgatactcactttcctgtccatattttccatttatatcaagttagacatgagaggtatcaaacacattgttctgttgtaactctccaataatcgtaactttacctatcagtggttccagacataaaatcacctcggtctgatattttaattcgggcaccagtcatctgcgggaagaaaagtgggttttaagtttcagtggaccgaaagagttttaactaagggttgccaaatacctgagtgatttccatgatgtttcttcctccacgtccaagcaccaatcctatatgctcatccgcaacaccaattgtcaccgtggtactagcttcttcctggaatatatgtcaaaacacagcttaagtaatgtagaaaaaaacgaatctctagctgtttaaataccaaaatgccatcttattatcacagtaagacgtgacaggaattgcatctccgatcaaatttattttcgtagtttggttcattaaaagcatcaccaatccttttaataagcctaattcctaacaaatatcagatgtagatttcacattggtatctcctaaagtttctgtagtacgaattgatccaaacaatcatagtaataacatcgatagggatttttcatgtatatatgcgtttacataaatagggtggaagatatgacttgtaacaccatattatccatagtagtaacacaaatagagattgattcatataaacgcataaatactaatagggtggaagattgtgagaagaggctaaccttgtggttttgatacttgcctccagaaccgttgggtgcgtagttaaccgaattgtatcccgctgttgcaacagaaggaagcgcatacgcatatggaggaccatgaaaaccagagtagaaaagacctaaaatgccgagtttaaaggaacttacaagagaattaagctacaacagacaaccatcatacacaaccctcaaaatggaaagaaggtccatgtgagatgaaagatactaaatgccattactataccttagttgacatctgacaatctaaaactcagtagaaaatcctactctaatcttacatttttatcaagggatatgatccagcatctacacttgacacttagattgttcacatgaccctaaaacaagaaatcaaaaaccttgtactgtgatttctagcctatctacgcctgtccatgtgtagtgactaaacagtcttaaaacaaataatttgatagtgtcaattcaattgtcaaaggaaactccggaaatgatctaaccatttactatattgctttccaacatgaataaatgcaatcaaagacatacagaacacgataacaaaagaagcttcaaggaggataacaaacctaactaagcaagtactgagttgatatacctgcatatgaatatggggaatgcacattctgggagtaatgatcgtcctcagtaagcttagccaaaatcaaatcgattgcccgcatctgctcctcgaaggtcccagataatgtcactaacctatcgctcaacccataaaaggtattatccagaggggatatcttaataccagctttagattcctcaatgaatgacctttttgcaaagaaagaaatgtcttgagggttagtgacagcagtacaactgaaatcagtattccttggaaaaaaacataaaagcaatgccatattctagaacttaaaaggaactagatattccatacgcataaactactgcaatctgagtcatatctaatactcagaaactttgttcacctgttatatatagggtcttgacttgtttatgcatgcattcagagaaaataattgctctcttaaagatatgaaccagagaagatttgaacatagaaacaatgcaagaacataaccagatacattatagatgatatttggtggttaagcgtgctgtaggaaatggtgtcaaaggaaacaggctatggattatagaaggtctgaaaacctcaaagaaactgctgcaacaaatacagaacggaaacttacttgatggtggcccctccttttccgattatacctccacaagaactgttaggaaccacaagtctaattcttctcctaggctcaacctcattaccatcttcagcatgaagctagcaaacagatagaaaagttaaaactgatttcattgtgacatactatataaactaaataaacgcaactgtgacatgaaatacaaatttgtcaaaaaagattacctcactgtgcaatttatcaaggataagttccagtccattgacaacttctttgattgatcccgatatcataataattctgtcagtcgtccccgggaaaaactcttgattacgtgaaagctgaatccttgccccagactttgcctgaaattcagtgatggtcgagccacctttcccaatgacggaaccagctgccgcattggatacaagaaaccgaatgtgtgttggcttctcagcagaatctgaaaagaggaaaacacattagatagtcaaatagatagcatggttcactaaaccgcatcagtattgagctaatcattgaattgaaacagcgtaatttaaccatccttggaaaatgaatctatcacacaggaaacattctcacaagttttcatcagcaaaaaaagacattaatcacacatgtccgttgacatatcacagagtacttaaacgagatccgattcacgaatgtgacgaaataccgaaacaattgagtcagagtcgaaggagaaaaaaaaacagaagaccagatcggatcgaaaataccagcttcggaagaatcatgcggttcaggggatctcttagccagctcttccggtgaacctgccgcatatgactcagtagactccattgctgctacagaagataaacggcattaaccaatcgacattatcaattcaatgaagagaaataagaacgaaatcggagagagaggaagagataagactcgttcatcgaaatctgagattgagaaggaaaaattccaaagtttacctgtcttcacacaattcgaatctgctccctccgtcgtcgtcgtcacttggcgccggtggttaaatgaatctgagcaaaactaagtctcaatcgtcgtatcggtgcttcctcggcttcttcgtctttgtcgccgagcggtttgtgaagtgaatgaaggtggctctggtgtccttcgtctatctatccactagcctcccttattctattattttttatttttcctaaatttaattttattgaccgcctctctatttcttttttaatttttttttcctctttcacaatcatctcactttttatttgttaaaatatcaaatcaactcaactacaaaatgtgttaacatcaaaatgtgctacgaaataaaacataattagaaaataaaacaccaaaattatcatttttctacaattttaaagcaatagaatgaacatgataataataaaataaaaatggcaatatgtgtctttttctctctattttctcattttagaatttgattttattgcattggtttgatttattttcatagtttgttagatcttgaattgcagtaaatatatgtttatcaaattgtacggtagagttgacgaagacgatagatacgattaatggtaatgcatgtttatgatttgaatcggtcgatttaataatgtaagttcaatattattataaggtgattttggttttttagcccggcaataatgggaagtggctctttagccaaaataaataatgggaagtggcaacctgtgttttcttcacgactacagattcattggttaaaaccttcaataaaataatcatgttattttgtgaactttaaaattagtaatcaaattcctcacacattattattttcaataattagataactctttttcgcattttcttaattaattttgtactctttaattaggaaaaaaactaattattttaatcaaaaatactgacaagtgttatggatccaaccgagtctggttacatgacattttcatatttacttactcaaattgcgaaggttattcgttgttggcccaatatatacatttcacgggctcttgttgggcttgctttcaatattcagcgtattttaactgtagcgaacgaaacaacgtcagcaggctaacatgcgcagtcgaagcaggtggtgatggtggtgccacctcccaaatcttcgtcgtcccaataatcttatcacgtttctctcactctctctccttcgcttgtgtgtttaagctaagccgttagtcgttaaacatctcatatcctaaaacgccgtcgttttagctatggcgttgagctcagctacgcttagacttacctctctgtcgttctcggcgaagaagacgaatcgaaaccctagaaatccagctctctccttcaccatcactagctcatcgtcctttgacgaatcacccaaaccttcttctctcgccacttcctcttctacgtcacctatacgcgtctcctctagttctacccccaaagctcgattcatcgctcgtcagaaacaatccgtctccgttcgtcagctacagcgacctctaagtaacttcagcgcgattctctctgatctaaatttctgtttcctgtggatgattaaatctggatcggattgtttgattttgaatttgctttttgtttatggtttgcagttgagtatatgagcttacctgcgagtcagtactcggtgcttgatgcggagaggattgagagagttgatgataacacgtttagatgttatgtttatacgtttaaattcttcaactttgaagtctgccctgttttgcttgtcagggttgaagaacagcctaatggctgctgcatcaagctcttgtcctgcaaggtaattcttcttttgttcttttggaaatgattgaatttgcaaacaaagagaggaacttgtggcgtttagacatatgtcaaatcaaatccagttatgatttgttaagactgtgatgatttttgtattttcttgtgccatatagcttgagggatctcctgttgtggttgctcaaaatgacaaatttgatggtaagcatatccctgtatacgcttcactttgttaacccgttttgaaagtactgccatgttgtcaagttttgtgtactgaaattatttaaatttagtgatggttgtgtgggcttaacatttattattttctagtcatgcagcttctatggtgaaccgggtatcatgtgatagcactcaggagggctcatcagagcaacaaattacttcagatgcagtcattgaggtagctaagttcttcattttttttccttttgcttagttaatcagtgcattgctgtggtatctctgacttacttggcgattgtaggtcaatatcgagattccttttgcatttagagtcttcccagtgggagcaatagaggcgactgggacacaagttcttgatcaaattcttaaactcatgctacctcgatttttgtcacaggtatgcaggaaaacagatttgtattattacgttttaattgcttattctgcatcaacgaggtccgttaagcgatcatttatttctctatggcactatggttttttagatagcaagatcgtcctgcttgagaggattagtctgacatctgaggtttcctgttgatatttgagaagatcttttatatttgagctgtttgatgaggcaatataacatgttttgggcgttatttatgttggtaaagcacatgttgaaccaggactcaggtttcagattagcctaggcttctatggtttcctctgtaaaactggcttgttgattctttatatttatgtgctcctccttctgcatatatgaacataaatacattccattgcctgcaaaatcatcccaacattaatcttatcatgctcttttattcattttgcagctctccaaagactatcatgcatgggcttcgggagacacttcaaggcaacctcttgggaccggtgagatctgatagtaaagcaaaagctaccgtacgtacctggttcaacgatcctgtgcctcctcgagttcaaataggggatgatagcaaattctcgatctttttcaatgtggtattcgggtaaaataatcacaaaggaatctgtagtcactggaatttcaacccttttcaatagaatacgtttgtttgtttgttccactgtaatctcacggtgtgtcatgttaatgatccaaccgaaagttccttaaacggatctcctttgtaccaaaaaactgtctggtagaactaaaattgaaccgataaatggatgagccggttcattgaatactacttttctgaagaaaagctttctcgctgcatgtcatttgtgaagataacgtgtttaatttcaaaatgaagccaaaaacaatttaatgttttaatcagaagtcatttgcaacttgtagacacaaacgttaaattttagtcggtgagtacttttgtttgtgattcatgtcaaacgtaaaacataaaagagaaccatgtcaaacgtaaaacataaaagagaaccatctaaatttatcttttgaaacctattatactttgacgaaaaaaaaagccctattatacaattaagcatgagtaaaaaagaagcaaatgttctaagcaacggagaaataatttttcttatcggtccttttacaaacgacagccatatatcatttgtgcgtatctcaaagcaaaagtctcttctctctttgaaaagacaaaatcaagcaactaagcaagtaatgctaacttcacagttacaagacaaaagaagacattcacataacggtgaaacaagaaagattgtgtttgatatgttttcctttaatttcggttaattggaaaatattgtcaagccatgcatagccaaagtaaatgtagtttaagtgaatatcctattcacattgcctgaaattttcaaaacaaaaagatatagacaaaagatcaatgcatatgtgatatgtcgactagctagttatacaaatatcaaaatttactaagttaaagatgcatgattgtatatggatgtcgtaaaatgttaaaaccaaaacgtgcgtttgttccctctcaaacgaaagtttgtgacttcgagaaatattttttttttcagtaaaagacaaaatagtgaagaagatgcaatgcatgagttgagtcatatacatactaaagcgtttctagtttttggagaatttgctaaaaccgtaagcaatgattttcctataaatatctaaaacacaataactttctttgaaataactaatcacagcctatattttgttttctaaacacaatcacaatgtcttatcatgataaacatatataaacgaagaagggaagaagatgagtggatattatagaaagaaaacgtacgtttgtgtaatttatattaagcgatcagtgaaagacgtatgtgactgatgagacctaacatagacccaaaatccatgcaaccttgtctttcgtcccaatgcatttgtacgctttctcatagacattttcttatttgattatatcattgattaaagtataattatagagaatgaaaaaaaaaaatcaactatgccaccatgtgatataatttatttatttttcttgattattgcatgtgagaatattggttggtacgaaaccctcacaaagatcgatccaaattggggaaatatttttagtgtttatataaacataattaacgcaatctctttattttgccactaggaaactgagcattattatacaaaaagtcacattttattttgccactcggactcggttcttatattatataataggttatcttagttttgaaaaaatatggccatgaaggttattaagaattgcctttgcccatttatgataccaatatataattgttttttcttttgtgtgttttagtaccaagatgtaattgtttgctaaagtctatgagaataccaaaccaaaataatttgaggatatcagaaataaacaaaaataataatattgataatgtggtgtgaagtttgagctttccttccctttaaaaacttgaaaggtcaaagatgttgtcatctcacctctctccatttaaaatttcaggatcccaaaccttaacattgctaaaacccaaaaaaaaaaatctaccacacctttctcaggtaggccaatgtttacacctccatttttgttcacaatcttcttcttctgtctgtgaatttcctttattttgattcctcatttacaaactggtacaaaggaaatgaatatctaattaactcttatttgtacatcttctgatccatctctgtcttttcagattttgtatttgttttcccaatagatttgaactttaaaacccaaacaagaagagagatgctttgattttgttacatacaagtgtttgttgcatgaaactagtaattatatattttaagttaatttcactttaaaacatttatgagttatctttattttcttaagtacattgtgcaaacttactaagaaaaacaaatccaacttttttgtttttgggatcattgttttattaaaatcattaaagaatttgtactacatgtcttactcaaatgtggatttggatatggtcttatgcatatctaattaatttataattacagtgacaatttagagattaaaaaacatgacgtgggttgagatgatcatgccacgtgttgtaatcgtagaccagatcctcgcttccttgagactcgccttccttttgcttatttttaattttagcaaaagcgaaaaagtagacaaaattaaaattaaaaatagattattcatttccaaaggaaaactaaaataaataaattaattaattacgagaaaaagacaattaaagagtgattaattaattctctaatctctctctctctctgtctaatggccattgcaccttctctctttgaaaaaaatccaatctttttctactttcattaataaatcaccgattattttgttttctcttcttcttctgcgatccttcattgaatttgatagcccaatttcgtcttataggagcttcatctttcacctttttgttcttaattgtgtttcgccattgacgaagaacacgaagaggtacgtcttttgttaattggaagtggaattttgggttttgattgttcaatttggctgatgattggtatgaataccaggtgagagagatgaattggaggacatttgggtgtgaaattttgaatcttttggatgttgggattttgtgttttctgggatcttctcagaaattctgtggaagatgtgatgtttggttttaggggtttgagaatgattgatggagttactagtatgttgttttgaattatcggaattgacgttaaaaaagggatttttaggttttggcgtgagaggatgactagtattcagcctttgctacaaaaatcggagtctagagatgatgttcgtgctgagtttgagagaggtttggaggaattcatgcgtgggcacttggacgagtgtatctcatttgggtcttgtagttctgttcacaaccctgaggatgaggataatgaggatgatcagcttgtgaggaggagacgaaggtctgaacttgaaggggataatttggctgaatcatctgctgcaagaagacgccaatctcaaattttgagccgttgggctgctaggcaggctcaggagatgattactacgattgagaggaggaatcgagagtctgagttgattgcgttggctggtttgcaaacggtctctatgcttgattcttcttttcttagggagtctcagtctcagtctccgtcttcaaggcgtcagggtgctgctagtgagaggcctaacactcaggcatctgggattttgcagatgtggagggaattggaagatgagcatgtgcttaacagggcacgtgaaagggtgagggaaagattgaggcagcaaagaagtgttgagtctaatactaatttatctagctctattgcttcggagagtcagctgagtgaaaataatgggagtctgagagactcaagtgagagtgagaatgatttcgggtcttggtcacatgatcggaatgagcatggggataataataatacttccagtagggaacaatctcctgatcttggtgatggcgagagggagagggtgaggcatattgctcgtggatggatggatagtaggatcaatgatcattcatctaatgtaaggcagagagacgataaccgtagaccggagtggctgggtgatactgaacgagaaagagtcaggattataagagagtggatgcaaatgacaagtcagcagagaggaggagctcgtgcaacaccgagagaagatcagaggtctacttcagaagctgataggaatcatgacgctgcaccacaagttgacagggtccgtgtagggttagctgttaaccatgaagaaggacaaccacctcatgttcgtcgagacttgcggagagttagaggtaggcaggcgttacttgatttgcttatgagggctgaaagggagagacaacgagaacttcagggcttgttggagcatcgtgcagtgtctgattttgctcaccgcaatcgaattcaggttagtttgtaaactaccaaattcatgtctacttctttgtaggaaatgaacggctcttctttctcatattctttttccgtacacttatgacattctgagataccattacaattcatgagctataaattttatttgccagcatgataaatatgttatattccgaatatacatgctaatcaaataagaaatcttggtatttgattttggattgtgataagaaaaagtgtttggaggagcgagagatgtatcctatttcatgctaggactggacaacaaacatcaaatattaacagtatcttagcaccttagacaaatgtagactgatttctaatgccttacgcttttctgcagtcgcttcttagaggaagattcttgcggaacgagcgacctacagttccagagagaactccatcaatggcttcaagggaactgcttcagctaagagaaagacaaactgtctctggcttaaggtaagatttccctccaattccattttaatggataaaacaattttttcatacagttttctgtcactttcttgttcaactcaataggaacagattcattgcatcataataatataactacactacaaacccgtaaaggactttagaaatatgaattttgatatccttgcatctcatgttctctcccctgctcactgaagataacataaaaatttcggcttgttctctttctgatctttttgttgtgttcgcattttgtcctttcatcttattctattaattgacaagtacttattggcatttagcttgcttgctgataatttgcccaactgtcgactctgcttctgtctcagggaagggttccataacgggagggaaaatattgtccatgaaaatactagcaacactgataatgataatagcaatacttccacaaatgctcttgcaattgcaatcactgctgggaattctcagcgtgtaaccgatgagagttcaacttcttccagacaagggaatgatagtcccattttgcctgataactcagaaagcaacctagcaaatgcggatagagactgggaagaggataccaatcaaagaaggatctggcaggaaaatgtcccagtagatgagaggccaaatttggagcaaacaactctaacgcaatttgatgggtatgataacacagatataaatcgtgatgaaacctctgtcagtgacatgcaccgagaagctagtggatttgcagatgatgaatatcgcacacaagaagctcatggtgtttggcatgagaatagctctagacaatccgatgggaactggcctgggacacggtcagaagccctaaggagtcgccgtgtagtacagttgagaagattaaataggttccatccacctgaggatgacaatgtttacagcatggaactcagggagctcctaagcaggtactaaaaaggttttagccacatttttgacaaaggtggatttgttttcgttctttattaccttgatttctgtgagattgatgatttctaccgtcttttctgtttgcaggagaagtgtttctaatctactacatagtggtttccgtgaaagtcttgatcaactgatacagtcatatgctgaaaggagaggacacactcacgtagactgggatctgcacgctaacctgcaaacagcaatcccagattctccagaacgtgacacagaccaccaagtatttgtgcggaacgataaccaacttaatggcatcaatggttcacaactgcttcccactccacccgcgcctccaccccagccaatatggcatcaagatttgcaccacactagctggtctcgtcactctatgcatcggtctgaaattgtaatccttccattgagggttttagcctcgagtccttagctaattaattatgctcaatgacatatcataagcttggttaaaaggtgtaatgtagatattgctcttcttggttgcattaggaatgggaggtaatgaacgacctaagaggagacgtggcaagactgcagcaaggaatgagccagatgcagaggatgcttgaagcctgcatggatatgcagttagagctgcagcgttcggttagacaagaggtctctgcagccctaaaccgatctgcaggtgaccaaggtcggtgcctattctatccaacaaacttggtttctcatttttgtgatcttatgtatatagtatcttaagaaacgaattatgcagcaggtatgagtgcggaaacatcagaggatggttcaagatggagccatgtaagcaaaggaacttgttgcgtttgttgtgacaaccacattgatgctctcttgtataggtaactaactaactctttgctcaaaaaaaaaattattgtctcttaaactcaaaactgaacaaatcctttaaaattacagatgcggacacatgtgtacttgctcaaaatgtgcaaatgagcttgtaagaaacggaggaaaatgtccgctttgtagagcaccgatcatcgaggtaatccgagcctactccattttataagcctcagagaagaaggtatagaagaaaggaccagcagaaagagatgtgttttggttttggggttaacattatgtagttgtagtatcttcttcaaattcatatttgatgtgtatagtctaaattaaattacttaaagggaagaaaagaaaagctcttattgattatgattcatgtttaaatcacattttacttagccacattttatttagagaaaaatataaaattcggataattttcaaataaagatcaaaaagtaaaaagcaccaaagcagttttttttttttttttttatggcaagattaaaagagaaaagaaaaacgttgcgaaattagatgactatatttaaatatgtagacaatggcttctctttggccatagtaccattcaatactttctatttcaatgccatttaaatgcttggtctaatttccatttattacctttacccctttaacctaatttaataagctatttaatttcaaattcgtttgtatccacaattctttcttggacaaaatatttcaaattgtttatatttcaagttaattttggatagacaatgaagcttcttctgttatttctttatctgctaaacgcaaacttataaataattcagtataatttggtgagctgtgtgtaaccttcgtttaaattataatacggaaaacaaatgttttgcagaattcacgttggtagtatattctaccataagaatccgactaattattgtaacccactagccaacctaatttttaataacatgttgtatggattctaatatttgatttcatagtaacggaacaacaatcatgttgatttttacggcgtgtataaaagtattacattttattgtaggtacgtttatgcacgatctaataaaataaacctgatcaaagataattaacaatgaccattacaattaatctatgtattttatcatcgtgcttgcccacctttatccacattgcgtttacaagatctccatgaaaagtaaatctacaatgtatactatattgtattatttaaccttgacctttttgtacgagctctcaaacttctaaaacttatgattagattaagaagattcaaatggccaaataatctatacaaatacaaatctgatatatatgagaaaggtcttgatataatgtgaatttttctagtatccaagcatataagcttgctaagtttagttatgccatactttcttcattagaagtaatgaaaatttaattaaatgtcataagtttcaaaaaagaaaaaaaaaactgagttaacatgtgccctatattgtggaaatagaataatttcttagttaattatcactagctagtccaatgtcaacacattgttaaatgtcattttaccaataacatgttaggaagtggctacatactgacaacaaaattccatagataaaccaaacagtgaaaattcaatgtccatcagtaactatatgataaattaaattgtgacagatccaatagtgataagacaaatgtataattttctcatagctagttttaggattaatccaaaagtggaaattatgtgacaagttagacattacaaaccattcgccataatatatttcttatgggtcttcattacttcactaaattcaactaccattcaattgctacagcatgttttcataatagtgctagtgaattttctgctacctagttttcagttagattatattcttatgtgtaattcccagttctcttttagttgagtatatctaaggaatttatgaaatccttaaaacatattggtagatcaactcaactttttgtccaaaaatggcagttaaaagagttaagagattaagcttcaaagcatatgtattggttagaataatgtttcaacagaaccagagtaatgcaaaatgaactattatgtaagaaatagtactaatatataatcaaatatttttcaacatgtaaacttattaattggtaaccgattttccgagtacgtgacgaatgggcacccctaatgaatattagattaattttcttcaagacgtcatccataacattaaattttcattaaattacattaatttacagatcccaaagccgtatttatcgctctagttgtcggcccaaaaatgtcagagatcaacatgaatttccgatcaactttgtttgattacaatattactttaattaattagcttgcaatataagcaacaatctattttctattcagtttatataatagtattaatttaaatagttggatcaaggcatcattagctctctcgtggcttcttacacaagcacacgtaagtcacgcaactatttacataatctcatcaaccaaatggtccaaatcacatcaacacctaaaccatccgttaattatcattcttttgaactttattactttgttgtaacctgactaactacttcttcttctttttttgaacctgattaacttattttcaaaactttgaatataattacctttctaacttttcataaccttaaagatggtgccatattgattatattttgttttaattttcttactagctaccatcataattatgcttatgttaattggatcggaagccataattatgcgcaacatggtaacacataatagaaatatatcgtggccgacaaaaataattgcttgcaaaggcaactcattttctctccttttgttcgtgatatctcagtgttttgaaattgttacttttatataattaatagttatcatcataacccatgacacaaaatttcataattcaaactattgatcaattcaagagattcatatatccttattaagaaagtacatcgatcagctaatgatgaaaatgtactttttggccactaaataaagtaaatgctataggatttcattgttcagtttcacaactttcatcagtcgatatatataggttttttcttttatccaaaagatgatatacatacttgtgcatgtgcctctcgctggaaatatatttacgatgtcaataaaactactggaatttggtcattcgttatcaaaacagctagcaaattttagtaaagaaaaaaagattccatcgatcgatcgcacatgtatatttatagagtgggtcgacgtgtaaagttgataaaaacattacataaaaataaataaaaatcgaaaaagctattcgaaattatggaacctttaatgaaacgtccaattattgatcatcttcgtgaacaagaacggaaacttcttcgccgcttggccaccgtgatagccgtcgtggtggatgacgccatcgtttggttgtaaacagaggagaagaaccgctcgatctcatctttgttgacgatgatctcatacttggacaatgacgtcataagctttctcttgcaagatctgatgccgagagacgacggtgtggaaggtggacggggtttctgcggtggaggaggaggagtggtggctgtggtgggaggaatcttgtggtcggaagaagtgggagtggtgcagccgccgccgtcatcatctctgttggtgttggctcggatcttgatggctggtgggaaattcaagatgggcagatcttgtattaaatcaagatccattcttttttgtttatataaatattaaatgtatatgttcttgaagagttgtttttttgtttgtgtgttttagcgtgtgcctgaacaaatcttcttagagaagtggacttgtgggtttcttatatatatgtgcttctgtctttacatacatgcctttttggttgtatatgtgtttatctttaatataattagaaagataagcgatgatagaaataaatccacactactgctacttctcttcatttacatttgatagataaaagtaagccacatgccaagttaatccattactattagtgaaagcttccttacaatcttttaaaaataatgaaaacatatattttgaggaaatagtgatgtaatggaatttcttacatgcatatttaaacaacgaaaaatttactgaaataagtaaggaattcatagtgcctatttttcatgtcagtaaaaagaaattgtatcttttatatattgggttatgttttattaacgaaccaataataaaaaaaacgtgtgttacatgaagcttaaaaagctagacagtaaagaaaattcaatagaggaagcaaagaatattttagacaaaaaaaaaaaaaaaaagaggaagcaaagaatataagtttttaagataaaattcagttgttttctactgtagagaaaacagtatatgcatctatatatataccgaaagatagaaaagtcatctttccaaaatgaaataaaagaaaagaaaatgtagaaaagagggtatatattcatatttttagattgagagttacatccacttaaaaaagaagaatcaaatcaaggaagagggaacctatatagaattaatttactttaacaaaaatattcaaagaacatattttttttaaaaaatatcaaacttctatcaatccgaatgtagacttaacatgcacgcatataatttagtttttagaaggatataaaaagaaatcaaaatattatttttggtatcctgtttacatgcaaatttgtttggttaaagtagtaacatgcatttgttcaaaataaaaaaaaagtagcaacatgcatatgtttagaaaaaataatcaaccagtaacatgcatatgtttagttgaagtacataatagatagtttatatttatataaaaaaatagtttatattaatgaaaaatgaaaatcatataaaaaatgaggcagatatataaagagattcaaattttacctcaaagtttttaatctagatctaaacgtagaggttggttagaatttatgtcgtgtaccgctaaggaaactagagacatgtcatgtgtatagactttagagtttttgtacatgcatgatgtatcaattacatgcatatttaacatatatacatattttgtcaaattatacaaaattatgttaaaatatgtttataactacgatctgggatataattgcagtcggtttaatcttatttattctcttttaaattaaccaagattccattgcagagaaagtagcataattttattaagtaagattccattggtatatcttttaatgatactattgactatgatattaacttttatccgcacgacatctacacgttcgttttaatcatgtttttttttaatttacttacaacagactcctcatgccaataatcatatttcaagaaaacaactatatagttaaatttgaatctagaagtcagcttatacatgatgtatgcagtgtatatccagactttagttacaaaggtattaaggtaatttagtgtacagagaatctatcatctaaagaaatgccacgtgtcgaatttagaggaggcatgtagtgtgatgtagggttgatctgtggatggatgcgactgccattatcagacagtgaaagcccaaaaaaaaaaggtacagaaaaagaaacaatctcactgatctttttctcagtctctcaccgtctttttttttttttttttttttttcatttttactttaatatttatattactattttttcatatataattacaatttgttttatttttcttttttaccatatatttttttttacattttctttacgcagaaatgcttggacagtatttttatgttatggccttatgggtttggtatttcgggaccacttttttcgatcaatctttttgaacaacttttttttttttcggtaaatctttttgaacaactttagttgttgacaacaaaataaacgtttgttgttactcaagcgttcgtgatttaaacttttcgtaagtttttgttgaagattttggaccatttggtattactactctagcagtctagccttatatctaagagtagattaaaaatattcttctaatctgtatatgatgatgtatacgatacttaagtaacacatagtcacatacacattagcgtaaccggtaggtttaaaattgagtgccggtttgacaagaatttcgaatatgacacgatatatgaaagcgaaactatttacacaaagatacttttggtttcagttttacgcgagtagatctatgaacaaaaaaaactagctagctactactcgataaaaacaagaatggatgtagaaaatcctcaatatcatattatatttacgtggttgacatgacatgaatacattatacaattcatacgtggttgagttagtatgcattagtttgtttaatattttatttgttgtaaagtacgatggagacaagggaagcaagtaaaacgtaacgtgcatgtctccctaataatgtattaatgtatccttataataacatcaagctattttcccaaaattgttccgaatactatttttttattaagtaaccgatcgatcatcgataccaagtggataacgatcatgatggtcctctcttggatgtttatgcttcatatccgattgtctcttatacaaatgtccaaacctatatacattatacattgatacacacgaccaaaagaagagaaaaaaactaactttgaaaaaagaaaataaaataaactccaatataaaatatcattacaattaacagtcttgcaaatagaatgtgacaaaatttacatcaaaatgtttatatttatccaatatgttaactaaaaagctgaattttaaataaaaacaactaacctcaaaaacattttgttcgatgatatatatttggttaacatgtggaggcgatataattatataatcaagaaaatttgaagcttataagatcttctcatacatttgtgttccaactttcttcacaaacatcaaaacttcctaccataaacaaagtaatatatataatatgttttatttttcttcttccatttataaatcttccgaagtagatttcatttggtgtcctttttcataggataccaaaagaataccgagaactcggagtgattgggagaattagagagctagactatagttctcatatagcttaaatggtaaaaactaatttggggaaaatttttaaaaggattgggaccattcaccaaaccaaaccccatcaacttttcttgattcttttcttttgtccccataccatttaattttgtgaagtcgttacgttactattccgattgatccaatttcacgattaataaatgtttagctcttttggtcagttttgatgttgacatcggagaaagggaagctttgcacggtttagctttcctaaagtttttgtaggatttaattattattggtccctctttgtttagtagattgcaaaaaagaggtttgttgaagggtctctctagcccaaaatcgcatgtgagtccatctgtcttcgaacacctttgtctacattattgggatatagatagattttatttttgttgtgggtttagatatagataaattaggtactaagctttagtaatgatttacatctttttttcttttcttgtcgagaggttccactagattctctatggaaatcaaacaggaggtggtggtgaatctgcatcaagacggtcgttggcattgttggtcttgggtcttgtcatcttcaacatttgtacggtgctttcacttttctaaagtccattttatttttaaaatagttatgattaaaatgatgtaacagcttgtagtttacaaagaattgtacttttctttggtttagtgagtttgtttttaagcaatttattattgtaatttctttactctgtatatgatctcgaataattgaagtattgttgagagaccaggttggccgagttatgatgaaaataagttgagtgaaattatgcagcatcaacatcaaaattgcctttttattctgaaaccaatgaaactatagtgtatatacaaaaaccatgaaagataaaaaatagaaacctaaatcagtggctaagagcttaaatgcttttgtttcttactaagttcaaatattgaagcaacgaagagagttccgaaggaaacctttacttaagtggtgaagaaaaaaatcctaattctaaactttctcctataatctccagagaaatggcaacagtgagaatctttgctttagatgatcttcgtgtgattctcatgtgttttgcttccccctgtcaaaaaagaattaactttcgtcgagtctgagcccgagttaatccgttcgctcaaggcaactagatttctgttttcatcctccaagtgatttctgcttgtaaccattttttatcctatcgtaaagtttctccttagttttacgcttcttgtccattttcaatcggtatctttcttcacgttccctctcgtaaacgcctttccagtgtacttctccggtcaatggccatagccatctttcccttggatggtctttatcatctgctgcttctgctaagtcttcatccatgcttttcagtaaagtgaagttaaagtactttgcccacattaaaccttttcgttgctgcaacggatgttgttcctcgagtgacccatctctcgggtttatgtacaccatctttctcccgctatgatatgcccagacattaaccaacagttccagaacccggcagtaacaatgctttctctaataattgttggaaaaagaatcataacaatcaaatatttgtgaatatcagagaacaaagtcaagaagtaagaatctgagatttttacctcgagcagtgatgaagccagtgagcaacttttggagtcgttaagattgttgtgcagtgcatctagagactctgagaacatcctgtgattgtggttgaaactggggcggtgagtttagggaaatgctggtttttttagtgaatatgtgggaatattatttaccttgagaacatgacaaactcgaggaaagacggagttggcatcacccaattgtggagagaagaccagtgatgaccatcttcaggcatgggaggaagcgcttcaatgtgttctggtaacccatacatatgccggaatgcatcttcaaaagtggttctgcatcaattacaaaacacgaggaaccaatgtgagcgcagctatctgaatatcaaaatacctaaagagaagtaaattcacatatcgagaaatcgccattatcagcataacttatggttattacatgtacggcatgtctcaagtaaagatatgggttagttcaatattatgcaactgtatactttcctcgccagtatcagcataaatggagcaacagttagagcggaggaatacctgcagtttccttggttaaggatatcgcacatagaccagaatgtaagagcatttttacttccatacgcatcaccatcgatgtctaatcttgtccagaagtaaataatctccccctttgtttcttgctttataatgttttccagagactcttcagctttagatgataacgagacctgtctccacaacaaaagtatcatcaaacagtgtcaaagttacacaacggatgtaaagatggatacgtgttggtttcaaaaagtaatcgactcaagcattcaaataagttcaaatagactgatatatatataaactgtaactttgtaaattagttatcaacaacactacttttaaagaactaccttcctaccagcagcacgccatgactgaaatccaatccaaggtctcatgtgaatgctatccactttatttgcgacagaaaacattcctccaatttcacaaaggatatctcgataataggtatcattcagtagaggtaatcggtctgctgcatctacgtcgtctgagcttagccttcgatctttgctggactatagtgaagatatgaccaaaaatcaaaaccagcaatatgaataagcacaagttttaaaaactgtcaactggaacatcacaaaccaatagagaaagcttaccaggctcaaaccacggtacagagagccatgatgcagaaagggccaagccccagcgccattgtaaatctcataaatacataaaggctcgcctgttcgttctagctctccttcatcccgttcattcacctcaaatttgagcttctccgatttgcgagcattccggtatatttcctcccaatcctcaacatctctttccattctgtcctctagctacatatcagatgaagaagagctaattcaatataacagaccgatgcagctcaacaagactcacagaaaaatgactagggagaacctagaaatatgtctgatggcagcaaaatttgatacctcctcagattctactttctcatactcttcagctccctcaatctcttcaagaacatcccagtctaatttggaaggaagctcatcggaaacaaacagggtattgttgtcaacagggtttgttgactcaataacacccatgaacttctcttcgacttggaaaacaattccagattttccaatgaaagcataagcggagtccaagatgaaactttttggctgctctaattcgctccggaagaaattccactcccatgctgccacttgaagttgagaaatggaacctggcaagaaagtatcagatgggaaatggagcatgttctccaaaagccgagcataaccagtaatgcattctgttgccatcaagttcttagttaagagtcttcctgaagaagcaattgtttgagcaaatttagagagccttccatctgatatcaagggtgagaaagccttcaacaatgcatcaggatcgtttcttcgaaaaaatattccatgaacttcatcagccatctgcagttaaaggtccacgattaagcaaacaacatatttggtaataatcacgaaattattaatttcagggtactcacatattttttcatgataggaaagtcaggtgttatgatagggatgccaaagctcatagctcgtacaattaatggaggaaagttttgttcctcttgggacgaagcataaacaagaatatctgccatccgtagaactctattcacatcctcgttcaaaccaaaatgccgaacagtgccttctgtcaacccgagcctcgatgcaacctcctgcattcatgtattattacacacaattatgtcttgagtatacaatctcaaccaatactaatcacacacagtagcattaaattgtctgaggatactctttccctgaccaaatttaatgtgtttttttagtagcacggcctaaatcatatagtatacacatggatataatccttatgataagaaaattactatcaaatgagcaagcaagatgaacttgaattaagagaaatttagaagaagttgttatgcacaacttaaagtttttagctcaagaccaatgagcttctgtggatagcattgattaaagaaactaattatcctagtcatctaggaagatatgattgaagcctaccaaaaatatttcttacctgtacagcatcactctggcctttggtagaattaccatatagaaaaacaaacttaaaggaaccgcttgtatcttttctcctcccatatcgtgttaaaagtggtcccaacatgtgcattgccacggcattatcccaagaaaactcatcataaaagaaggagctcccaagcaccaagatgatcacgtcatcctcaccaaattcgttaatttcccttagattttgttttgtatgggtttcactgtagctttccgcagcccaaacatcaactacagattctggaatcacaacgaagttcccatcatcaagaacgctatgcaacatctgaacaaataataagatcttagtcaaatacaaaacccacaatttggtatatttgtagtggtaatgtaatcttattgcggacaggaatctaccggcagggtaaactgtggaaagacaaccacatctgctctcgcaaaagcacttctccagtgggagataagagaattctggcccatcctttggtaaacaggtaaccgatttgcaagaatatcttcatgaactatccatataagtggtactgaacgaaatggctcctgcataaggctgcataaatataaaattttattatcatagaatcttggccacggaagtaattgtcaaaattttgagaagcccaagagcttgttactcttcacatcttaggcaacaacagccaatgtagtgtgcaatacaaaaggtcactctggtagcaggcaactaaacaaacttaatttacccaccttgaaatggcttcttttgcttcaagcgaatcagcaataacaccttcaaaactgcacaaaatgaatcactgtaaatttatccagaaataaaaaagtatttcaaaaagcaatccgagaatcatctgcctagaaatctaatttgagaaaatggccaggaaaacgttttcaaagaattgatcggacacatacattgtccaatcagcgtgccccaactgctctgaaaccaaaactttgacatggccagctagctgttcccacaatgagcgtgcttcaccattctctacggcaaaaacctgacaacttttaaggtcacaagcttttctaagagatgcgggaaataagacacatatacgcttgtgtccacactttactgcatatttatggtggattaacagattagagcatccattctgcttatactgtatatatgagtaaattctcaacatcaacgctagagctgcaagcataaaatgccataaagtttcaccttaaacacataaccaagtttttgaagattcttcataacagtgaccaacattagtgttcggggatctttcttcatattccctagtacctgtcattcataatataaaacagatgagtgaataggaagtgcatggagacggagacaaaaaggattatatgagatcgatcagagaaaataaaacagtgttgatgtacataacaacggtaattttccaaagctaatgtggacatgtagactgaaacgactgattgacaatgcaagtaactgctaagtaaccgtgaaaactccactggcaagttccagcatgatgtgccagaagactctttgacgccttttacaaagttaatttagcttattccacactacaggcataccctaaggtgcagcatttaactgaaacacatggcatttgcccataagcctgtctatgtctagtcagggcgtttagttgatctaactactatttgtttctccattggctcagacccaacacaaagttttagatctttgatcccatcaaatcctactgacttgttcaaccttgctggaggttatctactttagctatgataagaaaagaacataaaccagggtccacatcaaatctttttaaaaagagatctctttctcatggaatcttggccaagatgtcttccaaaagtaaaaaccttttataaagtccattgccaatgacccaggactactcggaaactcctcttccaaacttaatgaataatgttccgtttcctcaatcaaatcctccgaacccaagtgctaaagatagaaacatctaatatatatatcactagctgtactagaagaaaggcgtcaatattttctgtctcacagtggacaacactagcgctcaaaccaccatcagtcataacctaaatcggactagtttacaaactcaagtggatctaacaatcctagcacttaaaaaaggtctctttcatgcatatattgaaaaaggcaatgaaggaactcacgagagctagcctgggcggacgaacaccgatcctgaccgctgaacgcaagggatcaagcccttttccttcaatcaatgttctcgcaattcctccaggaacatacttcaacgtactccccaatccaatttgacttctaacttgccctcctttcacattcccttgccaagtaatcgaattctgaagcaacagagatgacatgacaaacgcacaaaccgtaaacgcgacgagaaagtagagcaaacaggtaccacgaggcttaagcaaagaaagcaagcccttgcgattcaacgatcggccaatgtgatgaggtcgggtacgcaatgaaggccgatccaaacctgagtgagatcgatctcgcctatcgctcgaattacgcttgagacggagtcgatctctaatagaatggaaagaagtatctccgtttccggcgacgttgttagcgttgtgattaccgtctcttccggcgccgccattgtcatcgatctcgagcgaaagagagtttctcaccatggagaaagaagaaaaactgctctgcttcactggtttgtttcaatacgaagaagaagaagaagcttctctctcagtttcaggtgccacaaaacttcaccatgagaaagagagaaagagattcagatttgagaatttgattttcgtaaaactttttagagttagcgaatctgttaagcggagacagtggtggagagattgaacaatttttatgtcaaaaacttttaataattctactaaatttacatttttcgaatttaatatatttttgttaggacggtgacaataatttcacgcgttttatcactcaagtccaacttgctttcttgagcagtaattgtcactattagtgataatggaatcactatccttttcgtatatctctatctaattatgtcatttgtctaatctctatctaataatcagtgttaaccggcgatgcggtcatgcaaagccatttcaatttttaactggactatatggttcgatataaccggagtattcgactctatagttgttgtttatcgtaaccatttttcatctacatttatttttgaattgaaacttgatgaaaaaattagtagaaaatagtgtgaaaccattgacttctagcgtgttgattgagtacgaatcaatcaaaattaaatgaaaacataaaactgttacttaccagaatatttacaaacgagcaattatttacttattttgtataaccgatttataatgcaaataaaactatctgtattctctgccaatgttattcattgcagcagactactttatttttgactcttcaatggggcatgtacatatatagttacatacaactttcttcaaactcagaatgtataagaacaaacaaatcatgaccaaagacaatttaaatcgattagacgtcatttgatgaaagaataaatggaagttaagtaacaacaacacatcatcatcctcatcatccgcacccttcgttctccattatgctattatactgtacctccgtcaatcgcctatgtttgagggtccatatttatagctagctctcatatacatgattttgtactcctttcttctttctttttgttttctactttgttagatattatcttcgttcgtgcaattattgagaaattaattgcagtactttttacatttacacccatatttgcatatacactggacataacatggtttttacaaatatatcttgggtagtaatttttgatacaattgaaaggcggatatttatagttggtttgtagtccatttgatagttttttcctgtttttaccattgagatcatataatatattgttttgtcgtgttccacaaattttctatgatatatactatgataatgtagagaacagctagtttaaaactggaaatttcatccaagtgttagtatagtcaatccgttttttaaaatgatgttttatctctcttggattggagttcagagttcagaccatgttgaagaatggtaatttatacaatgtaaaatttcagaccaaaagaatagtaacggtcttaagtactaaaatgttaggtcttctacaactagtgaaaaagataaagtgacagaaaaactcaaaacgatttaattgttaaaaacgatttacaataaaaaaatcaattctcagttcaaaatattgtagatcgtctaagctttcagaatatatactaggttgagaaaaaaatagattcaccgtcataattagggtcggtcggattttacaataaacccaaaaataaagtacggaaggtaaaaaagtaaaaaacacaattacccgaataggccatgctcattggccatttcccaccactaggttagtacaaactgaccaactgtcccaataaagaaagacgaaattacaatgtgaggcagattttttgcattcttctcgatcaatcagaaagtgacacctcatagattacgtctttttagttcttactaacgaaacacccaaacaaaaaaagataaattacaaaatatcattttccttatcttattgacttgtcaagattctcttcttcttcttcttcttcctcctcctccaaactcagttccctccgtccatggcagcaaccttacctctatctccgatcaatcatcagttgtgtcggttcgggaacaactctttgacgactcaccggttctgttctcctggcttcttgatttcttctccttgtttcattggtttgaccggaatgggctctgctactcagttacgtgctcgtcgttctctgatctcttcagcagttgcgacgaattcgctgttgcatgacgtcggagccaccgtggcagtgcttggtggagcatacgcgcttgtcttaagcttcgagagtctcaccaagcgaaacgtcattcaacaggtctcttaataatcgttttagttatccacacaatttctccgtttacaattccagttttattcgaacaccactatatgttgaaagaagtttctcaagttgtgtttgcagtagtactcattagaaacaatgataagcctaggaaattttgttgtgaattagttttttcattctgaatttttataagaattggtaacaccttagtaagcagtataccactttatcatgaccaatcggtaaagcggacaagaacaaagtggtccaaaaatatttaccgctttatatgttaccacttttcctaacctcccttttaactatccgtaatcgcctaccgctaaaaacatataccgttcctttgtgttaacaaagtaagaaaaggaagaaacaataactttgattgttttatggtgagcagagtttgagcagaaagcttgtgcatatactctcaggtctgcttttcgtacttgcgtggccaatcttcaggtattgctttctctctatgtttgtaaatctctctgtaccttttaaacatgtatagcattctgatttctttttactcatctttaagtttagcggatcgaccgaggctcgatactttgctgcttttgttccgttagtgaatggcttaaggcttgttattaacggactatccatttccccaaattcgatgctaatcaaatccgtcacaagagaagggagagcagagtaagttgtctagtttttttttccaactttgatatgatttttcaacaatctgattacacatttcttgttttccaaccatcacagagagttgcttaaaggtcctttgttctacgttctagctcttcttttctctgcggttttcttctggagagagtctcctatcggtatgatctcgttagcaatgatgtgtggtggcgatggtaaattttctgtcaagtactactgtataactattactacaatttacaaaatgcgcataaatgtactaactaagtgctgcatcaatatgtctatgtaggaatagctgatataatgggacgtaagtttgggtcaactaagataccttacaacccaagaaagagttgggcaggaagcatctccatgttcatcttcggcttcttcatctccatcgcgtaaaaatattaccaatcccactattaatcatcaaaatgtctccttcttgacgacgaacaagtcttaagaactgagatgagtttgctactaaacctaaccgttttcttttgtaattttgcagattactttactattactcaagccttgggtaccttcacatgaactgggaaacgaccttgcagagagtagcaatggtctcaatggtcgccacggtagtcgagtcgctacccatcaccgatcaattagacgacaatatttcggttcctctggctactattttagctgcttatttaagtttcggatattagattaatccctcataaaccgaatgtgtatatacgtatttttttaatgaatccgaccttacaaatgtttccacgattacggtactagttgcatagattttacctccgagtctctgacctctgccatttacataatgattcaaatattcatagctaatcttgtttcgggttagtatactatacttagtagtagtgttcgatacatagaaagcaaaatggaacaccaaaaagattataggacatttagtatgatgttttgaaaacatagtgttagctagaaactatatgggtgatgtgaatttcctagaaaatatataggtatagttaaactatagtgctatcaatgtaatgtattcaaatcaagaaaaagatacctaacaacaactattatgactttgagattcacgagaggttagcattgaagcattgttgacaatttacgatattttgtaaatgttttcactaaaaaaaacatttaagaaatactttttctctttttttttttttcttttttttttcatttaagaaatactacattacaaatgttaggaaacttcgtcgaaaactcaaaatattctctattgtgcatgacatctaaaatgggcaactctgtatttgtgtccaaatcaatgaacccagtctatgagaaagaaaatctgtcttttgaactattttgttgttacctaacaattgatttgaattcgtgatggaatccaggattcaagtttcttccgaaaattgatcaatattgggtgcatctgatttcaattattaagtcatgaagacagtaaaaagcaaagatattttacgaaaagatgaattcaataatttcaaaattcaaaaagtttgtgtttccatgttggaacataattactattaagggaatcccccttaatatagtatctgagtcattcacagatacacaattatatccgattgacatattgccatttcggtaaatacgattctaacatctagagagaaaactacatctgtaaagaaaccatttagggggtatgtaggagcctagcagatttaataaaacagtttttattttatttttttgggtaatctttactattgtagtgtgaattgttacttgaaaagttttgaagacttttattctgtaaacgctctaattgataagaatttttcatatttttgtattctaattgcaatttttggatttcttgctatatatactcgtgatcaaatttagaaatggaaatattaactatgaaagaaaagaaagacgatagtgtatatagacttacaccaacaatgttaactccttttcacatggcactataattttactgtgaatatgaaaagtttcttgacaaaaataaaacaaaatgatataaatagatcatcaacatctaccattctatttttagatcggatacaaaaacagatcacacgacctatatattctatgcccaactttaatttgaatcttttgaacaaaaaaaccttaatttgaagacttagaaaacgtacgtcccctaaattaaatgcgtatttgatagtatccaatgtacttattaatttgtagtacttacttttttttgtagttcgcatgtatccaaaaaattgcggtgaaggacatatagaattaaaccggacaaatactgacgtaatccgaagcggccggttctggtttacacgcgtggagcggtaggtttaaacgtgtcactcaaaaagcaattcaaaaggggtactttagtaaaatagacaaacatgccaagtaacgtttccgcttctctgcattaaacactcgtcacctttataattcctctgcaacgcagcgagaatgagatctctctctctaaccttaaatggaaacaatcgatataaattaagtagagaatacaaaatattttgtaattaaggaatttaattagtaaatttttgaattcgtaattaacaaaaaaaaaaaaattaggaaaagaataaattttgtacggcgataattacacggtttcgccgccgagaggaggaagaaaaattcgttttctgatgatggaagagacgacggataacaccggaacaatcagctcgcagaagaacgttgctgcttctggtcacaatcatcaccaccgttacaaatatatctcaaattacggcgtcgggaggcgttttctgttcttcgcttcctgttttggattttacgctttcgtggctgcgacgtacgcgtggttcgtgtttccgccgcatatcggtcgtacggatcatgtatcgtcgtcttccttaggttgcagagaggacaatgaaggttcatggtccattggtgttttctatggagattctcccttctctctcaaaccaatcgaaaccgtgagtttctcaatttttttattttaggtctgttttttttccttagatcacaggtaattgtttgatctcgggttcatgaatttttttcaatcaaaacagagaaatgtatggagaaacgagagtggagcatggcctgtgactaatccagtaataacatgtgcctccttcaccaattctggtcttccaagcaactttctagctgatccttttctttatgtacaggtatgttcaagtctgatctctcttttttgctctgtttctcttctgaaatctctgaatttgggtgatttgtggtcattaaacagggtgatactctttacctcttcttcgaaactaaaagccccattacaatgcaaggggatataggagctgctaaaagtattgataaaggagctacttgggaacctcttggtatagctttggatgaagcttggcacttgtcttttccattcgtcttcaattacaacggagaagtaagtttatcagttacctacaatgacatagttttagatcatgcatttctctaactcttttttattcaaaagatatacatgatgcccgagagtaatgagattggacagcttaatctctaccgtgctgttaactttccattaagttggaagctggagaaagttatcttgaaaaagcctcttgttgattcgaccatagtccatcatgaaggaatctattggctaatcggatcagatcatactggttttggggcgaagaaaaatggacaactagaaatttggtatagtagctctcctttagggacatggaagccacacaagaagaatcctatctacaatggtaaaagaagtattggagcaagaaacggaggcagagcgtttctatatgacgggagtctttatcgtgttggtcaagattgtggtgaaaattacggcaaaaggatacgtgtttctaagattgaggttctttccaaggaagagtacagagaagttgaagtccctttctctttggaagcgtcgcgtaaaggtaaaaattcttggaacggggttaggcagcatcattttgatgtgaaacagctaagttctggtgaattcattggtcttgttgatggtgaccgtgtaacttcaggcgatctgtttcatcgggttattcttggttatgcctcacttgcagctgctatttccgttgttatcttacttggctttttgcttggggttgtgaactgcattgttccatcaacctggtgtatgaactactatgcggggaaaagaaccgatgcgctcctgaatctcgaaactgcgggtttgttctcagaaaagttaagacggattggttctcgcttgaaccgagtaccgccttttctcagaggattcgtgaagcctaattcctccatggggaaatttacgctcggtgttatagtcattttaggacttttgctcacatgtgtaggcgtgagatacatctacggtggaagcggagccgttgagccttatccattcaaaggtcacttgtctcagtttacgttagcaactatgacttatgatgctcgtctctggaatctgaaaatgtacgtaaagcgttactctcgttgtccatccgttaaagagatagttgtcatatggaacaaaggaccgcctcctgacctgtccgagctagactccgcggtgccagtcagaatcagagtccagaaacagaattctctgaacaacagattcgagatcgatccgctgattaaaacccgagccgttcttgagcttgacgacgatataatgatgccttgtgatgacattgaaaaagggtttagagtttggcgggagcatccagagagactggtcggattctacccgcgttttgttgatcaaaccatgacttatagcgcagagaagtttgcaagaagtcataaaggatacaatatgattctcacgggtgcagcgtttatggacgttcgctttgcctttgatatgtatcaatcagataaagcgaaacttggtcgggtatttgtggacgagcagtttaattgcgaagacattttactgaatttcctgtacgcgaatgctagtggatcaggaaaggctgtggagtatgtgagaccgtctttggttacaattgacacttcgaaattttccggtgtagcgattagtggaaacacgaaccaacattacagaaagagaagtaagtgtctccggcgattctcggatttgtatggaagtttggttgatcgaagatgggaatttggtgggagaaaagacgggtgggatttgtagatcagtagagttacttgtagggcaagtaagtagttcttcaaaaaaaacaaaaattaagccacagctctttcttgatatattttttgttgtaggttcaaaatgtaactttagcttcttcttcttcttcttcttcttttttttttaatttctctttcgtattgttagatattttagaaaatggtgaatggacaacgatttctgattttcgttaatattttcttaggagcaaatatttcgtttacgtatgttcaatcataaatttaaaggtcaagtttgacatatttttcaaagtttggggctgtcattacagtattcattcaataacagtactgggctgaattgcagtttgggctaaaggacgacttgtattgggctgaacttgtttaatgaccgtttgtgtgttatacaatactagaacacagtcctactttgaaacaccaaaaaagagtagaaattcaacgcaaattgtgaagaacacacagaacaaaccacacaatatgtactagcacaaaccagaattaaacatttaacaatatgtactcaacaaaccagaatgctatatctactagactactagtagtatagaaccataattgcacattaacgaaatataaaaatatataatcatccataattatttattgtattttggaatgaatctaaatttaagcctaagcctagtaatgagtgagagcattggttattgaatcgaacgaatcattgcaaagagccaaagatccaaaatttgcaacaaaaacaaaaactctaccaagtgaagaagaaagagaagtgtcacatctctctctctatctctttgatccaaacaaattccctcatatatctctgctctctcttcccaatattcttcctttttcttcaatcgagattttatcgctttttgattcgagaatttcgaaatcggaacccaccaccaccaccctccatcgtcgccaacagatccaacggttctctgattatttttatttgaaaattgtcttctttgttctccctctcgctgggtttgattctgagattgattaatctaaatgggtcgcatcgagatttagaagaaaagggaaatgttggcaatggagaaagaatttgattcaaagcttgttcttcaagggaactcatccaacggtgctaatgtttctagaagcaaaagcttctcctttaaagctcctcaagaaaatttcaccagccatgatttcgaatttggcaagatctatggtgttggttcttactctaaggtttctattttcattactattttctattgtggctttgattcatgaacccagctcgattctctggttgatttttttgttgcaatgtggtgttgatattggaaaggattggtttttgacctgtgggtgattcatattaggttgttagggcaaagaagaaggaaactggaactgtgtatgctttaaagattatggacaaaaagtttatcaccaaggagaataaaactgcttatgtgaaattggaaaggattgttcttgatcaacttgaacatcctgggatcattaaactttacttcacgtttcaagacacatcctcactatgtaggtatttctaattctaatgaacattcctgtgcttgaacattctgtagttgattgatttttcttatttctgctcggtatgcttttggtagatatggcacttgaatcttgtgagggtggcgagcttttcgaccaaataaccagagtaagatgatcgctgaatcttgggagattgattcattcaatgttgtcggaatttgacataacatcatggttcctttttttgtgcagaaaggtcggctatcggaggatgaagctcggttctacactgcagaagttgtggatgctcttgagtatatacatagtatgggactgattcatcgagatattaaggtagtttctctttcgaatagcttctcttttatggtcttaacaatagctgtgctaagtgtttttcttgaaatggtagccggagaatctgttgctgacttcagatggacacattaagattgcggattttggaagtgtaaagccgatgcaggatagccagatcacagttctacctaatgcagcttctggtaacatgaccgtccataatcctttctggtatctctgagctttaaggtcttatcaataattattgtcagattctgctttaagcctgtctctgtaaaactggtgacgtatacagacgataaggcgtgcacttttgtcgggactgctgcatatgttcctccagaagttctcaactcctctcccgcaactttcgggtaagagttttctgtttctgtaatttgcgttttggttttgtggattgcgatgcctctcttactttgtacaatttctttggtactctgtggaacaccaggaatgatctttgggctctcggctgcactctctatcagatgctttcggggacttccccatttaaagatgcaagtgaatggctgattttccaaagaattatagccagagatataaagttcccaaatcatttttcagaagcagcaagagacctcatcgaccggttgctggtaagatgcatcaaaagccgttgtcaccaatcaaatgatatggcagtaactctttaaatgtgcgattctctcaggataccgagccaagcagaaggccaggtgctggctcagaaggttatgttgctcttaagagacatcctttctttaatggagttgactggaagaatctaaggtcccagactcctccaaaactagctccagatcctgcggtatgtctcctcatgtactttggaattatgaggccctttattatcattattgttttactcggttattaagtcaatttttttacatctgatgcagtctcagacagcatctcccgagagggatgacacacatggttctccatggaacctgacacatattggagattctttagccacacagaacgaggggcacagtgctcctcctacatcttctgaatcatcgggttccataactcgacttgcttcaatagactcttttgattcaagatggtgggggcatttaagcttcatttgttttctgggcagcaaccttgttcaaagctcctaaaactatacttcagttagacaatctgctaatttttttcttgtgaatatttgataaacaggcaacagtttttagagccaggagaatcggttctgatgatatcagcggtgaagaagcttcagaaaataacgagcaagaaggtgcagctaatactcaccaacaaacccaagctgatctatgtcgacccgtcaaaactagttgtgaaaggaaacattatatggtctgataactcgaatgacctcaacgttgtagtcactagcccttcacatttcaagatttgcacggtactcatcatttccctattcttctatccaccaaagatcaaagatgatgaaactgaaattgtgacctcttcttgcatttgtgcagccaaagaaggttttatcatttgaagacgcaaaacagagagcttcagtgtggaaaaaggcaatcgagactcttcagaaccgctgagacaaactccactgaagaatggttctgttaatttcctcgttggtgttttgtctttccttcaagattttaaactgaccaaactccattcttcatatgttttttctatttcacgcatccttgaaaagaccagttggacacaaaactgaaaaactgctttttgaatcctttgtataagtcaaacaaatgtattacaaggttaaagttacatgagatactgaattcaagcatgagtgctcctttcacaaaaccgtggtaagttggtaacaacagtgttgaaacatcaagtatgtgaaaagataagaagaaaagcagtagacttgttggattttgctaggcattgctctctttgacagcaagaggttcataccattgaggaccaaagccagcagcttttcttgcttcagcattaaaaggcggtttcaacggtcctctgaaatgctcccttacaaccgaatgaaacttgttgattatctcttcattgctatcatctgattctttgctgctgatggtgaattcaggatccttggaccgttcacatagatacttaaaccattttactccagctgcacagtgagtgatttcttcagggtacacaactttctctagtaaatctgctgtctcgttatcgcctccattcctaaaccgagatatcgttgtgggcagtacatcaagccctctagcctgcaaatatactattttagtgactaagaggcaatcaaaacagagtaagttacaagaagttgaaatggtttctcacctcgtgaacgcaatgctctatagccaaacgagccaaaagatcgtgagatgtggcagtagcagagtcccaaagaccgtcatgagcaggcaatgcaccgtaactagaaccaatttcctcaagccgagctgcaagcaaagtgaagtgacgaccttcgtcctgagcaacacgaacaaaatccgtaaagaagtctcttggcatcttctcttgcttgccaaaacgagcaattatatcctgcagattgattaaacattccccagaatcagcaaaaatgcaaaacctttaagatagataatcatcatcatcatcacagttcaaaaatcaatccttttacccaagataagtcaatagcccaactttcagtatgagcaagactatgaacaattgcttgcctgctctgtaagctaccagctcttcccagcttcggcatcaaacttggagacaccagtttcaccggaagtcgagccggtctgtccgggacggggaagtcgacggtgggatcgtagggttcggcgattgcaccttgaagccatttcacggctatcgaatcgccaagtcgtgctttttcgtgcgggtctgatgtgttcagaatcctgatcgccgattcaattagggtttcgcaatccatctctatatttccttctagtttttcccggcggcgagatgtgtaaaagaaaaaaaaaaacatttcaacgacgtcgagcgtagatagcacgcgcaacatagagcgcgtcgataagtctcgtcctcaaccaaaatgtcttcggttttttacattttaatctaccaataggaattatttgataaggtatatttttttttacaagcaaattgtaacatgcatgcattagtggagaaaaaaagccatgggcttgtcttcttctttttttttttttgtcaattagggcttgtcttcttctcaacgtctcttctttgtatatggccatcgaaaacgaaacaacaattatttttctttgttcttttagatatattcctataggttacacaacaacattgacaagcacaaggaggattcatgcttatgttctttttctattacttttagtctaggaagacaagtaatgttgttattggtttctgatataacttgaatcggaacgtaggaccaccagtaatttttaactcgttctgttctaatatctactttagtgtaaagattattaagagcaaacacaaaacggtgctctaattttattttatttttcccttaatcttgtagactcgtaggaccaccagtaatttttctgtttttaaaaaaggctccacaatctaacaataaaactgattgcattcaaaggcaatgtcagagagtttgacacatcaatatatttttgtgtaaattatagtcgacatgcatatcaattacgatctgcgaacacacatgaaatttattgttgagtcttactcataaatgggtatgccacaataatgtaattctgacaaaataaatgcaccaacttgaatacacactcttttgttactgttctaaaatatcaacctctacacaccaattggtcgtttactagtcaattctacaatcaaattgtaaaaaataaaataaaatacaaaacaacgccaattaaacatgctttaattatttatttcaaattttaaaaaataaaaatcaatcgtcgactatagccgtctaaacattccaaataatccaaagttcgaaatattgcctgataaagaaacatttcatataataattgattgacaaatatattaaaaagaatcgatcttgttattttctgcttacttgtgatcaatcaacacgaacgaagctcatggtatcgtcgttgatccaatcatacttctcaacgaatggattagggattctcgacaattccggatatcgatcaactgaatcttcccaaacattcttatcatcaagatcctttagaacctcccaaacacaattattagactcgaatccagctcccatactcatcattagtatcttctcacctttctttagtctgttcttagcttccatgtagccaagaacataccataaaccaccagaagatgtgttcccgaacctatgaagcgccattctcgctggctcgatgtcgaattccgtgagccctaagcttttcccaactccttcgataatcgctcttcctcccgggtgaatacagaaatgttgcaaccctgtttttaggtttagacctatccctgagctcgcgggctctcttttcgcggaggttcttcgtttaagcgcgcgaactattgcatagcggatcagttccttgacaggcaagactctagggaggagaacttggaggttcttggttagggctcgagctgcggctttttttaggtatttggttaagagaaagcctggatgaccatctctgtcctccatttgtatgcagcacgagtaggcctcgtcgtctgagccaacatgagcccggaccactgtcacgagcttcatcaaagcctggttcttgaacctagctgcgttggttaacagaacagagcttcctccggcacggaagagacagtttgagagcatcattgacctatctttaccgcagtaccagtgaggacccattgtctcggtgctaaccacgagtgcgagagcgttttcacgagtttcgaacatcctttgcacgatatctatcgatataacgctcgcgctacaccctagtcccgagagattgtaggatttgatgtcttctctcatcttgtatctgttgatgactcgtgaggttagggaaggagatggagcgaagagtgagacgttgacaacgagaatatcaatgtctgaaggagagattgagccttttgtcttgtggaaaagcttgtcgagagtgtcgaacatgatctcgtccatttcggagtgagcgtcaaggagagtaggagagtcttctctaccttcaagcacatttcttgggccgtacgtttcctctcctatcccggaactagccatagtacgaaggagaaacctgtactcttcaagacccaagttcttgtttcgttgaacgaccttagcacaagtctcggtgtcgagttttctctcttccatgcccttgtagcactcgtagtgaagcatgtagcagtttctctggtttcttcttttgaaaacaaacttgaagatgtagaaaacgaagagagtggagagtaggagaagagaagagagtgagaagagctccatggaagaaagaaacagagagtagagaaggaaagagagtgagtgagaattaagtgaattgtgttatcaaattgtgtcaaagttgcaggaaatgtacggattttatagagttaagtgatatggtcactggtcagttttttgttttcaaaatatatttttttctacacccgttgtaaattaattttgtgacttttgtcatagacctattaactcctttaccaactactttttttgctttttgggaaaattttgttgcgtataaaaatatatcaaaatatcactgtgacgtacctttctgtatgataatttcgtatgaatattgactatatatccttttggatgaatttcaaggtttatcctataaaaagaaatgaattaagttttaactctgtaggatcgttcatactttgatttaaatatataaatttggtactggcctagtactacgaacgatcaacatcttaaaattggtgtgctatgcttaggagcggttgggactgtttaatttttgtttttttttggggtgtgtttagactttagtgcaagaactacgtacacatcggtggcttatgtttaattaggagttcaaagctattctccatgatatcgcttatttaagtgaatctttttcttcttcaattttgtccctagattggacgatgttgttgccgattccatggccaaagtcggcacttgttgcagcaaactcttcttccttcaattgagtgtagttcacctttcttataatccaagtttagtctgttcaaaaaagaaggtgaaaggaatacagcaatatttatggtaaattgccaaatgcgtttggaaaacaataaacacatcaatgaaaccaaatatatcgcataattaatcctttcaccaaccaaacccaataattaataagttttgatgactcgatacctctcatgacaacgttgcttcgagtttgaaattcgatactctagatagttttagagagatcgtaacatcgaaacctccatgcttaaatgtctctttgtggttgatggataaaagcaactaagcaagtaggtagtaggagtggagcatccatctgtcagttagtcccatacgacatgtatcttcatcatcattcacatctccaatgttttgattaattattaacattatcttatttttgggtcgattttttttatatatttttttctccatattttcaacatttacgtagttaagttgttttcaactttcatactctatactatacattatacactataccctactccatatccaatctattaaaaattaggtatatccaccaatttatttcgattggttgtgatgatatagtaacaaatgagtaatgtctcatgacccttttctagtttattttttttcttcaattccagcctgtcacatatttactatggtgtgtaactcgtccttgtattgcatcataagtcataacattgtgatgtatatttgtgacaaaaaagattatgaaaccattgtactaaaatttgacaaactaatcaatgctaggctagtggttcaagtatttattatgaaactagggtttgaaatttttcattgcgattattatttttatttttttagatttgcgatttcaactatggttggccattgtgaacattttaaatggcaaacgatatcctttaaaaaaaaaaaaaacttttcaagattaatctgaatttagtccggaaaaccttagttacccaaaaacaaaataaatttgatccatataaaaaaaagtgattcatttccctttaatgtatctatttatattcctttccacactatttgcagtgaaaattaaattcagttataaagcagtggtcagttacaactgcaagggataatagttttgattggttgtgaattgtgatgattcaaacttttgtttcacctcacagttttgtcttcaaattcagtctgtgacgaagttatttattcatctgttcatttactacactatgacaaaattttgtgaaagtctagtgaattaagtcttttttttaactccacagtataattattttctagtattaataacatatataaacaaaaacatttaaaagaaattataaattctgttgtggttctcagactccaaattgaccaaaacttcaatcgaatcactatcccaaattgtgtgtgtctctctctctctcgctgacacttgtatgagtaatgtgatcgaagaagtagagaaagacatatcaaaagaaaaacaaacacttgactcgggttccttcaacttcgataattaatgaaaatcaagctaagccaatggtaaccaaaattttaaaatttgatctgatcttaagcagctgccaatccaattgaaccgttttacaccaatcagaatcagtccagttttaaactcaaacattacttgttttttttttttttttttttatcgtcatggactcagcaaaatcaaaggcggataaaagcgacataataatgttgtgtgtgttgtgtaataaatttcacatatactactatataaaaataaatggattgacttttcgacacgattaaacacgaaggacatgagagtcaacagcagacgtacaagaatatacgatcgacggctcaaaattgatagtaagaatttagataaaaaggggtccaaagccaactagaaaattaaagagagcaagtatacaacgtattgaaacaacactcttggcatcttttaatttatgtgatgttgtccccaacttgacacaatctcttactcttcataattcatatatttaatacttcaatcaattaacactcctcacgtccaagttttttctttttttgagtttcttggaactgatgataataatagctgttgtcgtctcaataatcctattatcagttttcgttacaacaaattcgttaagaaatttgtacataactttcaatctttagtcatttcatcaaccaacaaaaataaaataacaaatctaacgttctcaatgaagccagcaacctgcagcagactctagtctatacatgatcgcattgcctatacaagaagttagttcccgaagcgcacccactttccaaaacgctcttggtttggcggttttgtaccgcctttttatggggttttattgatgattctgttcctcattggtgtttgctatgccttactctgtcaaaaaaaatacacacaggttcttcatttttggtcaatctggtgaaaacttggtctctcattcagctgtgaaatagctgtcgtagacgcatagattatcaaacgcttcaaagtttgttttcaacccgagaaattggttcccgattcgagcacaacccgcatcaggccatctacacgttccttctcttgtacgcaacggacacactgcttcacacacattttgttcagtaaccgatgagatagattctgagacatctgtggtgttgtcctcagattgtttttggggaattgagtgtgaacatttctgaggcccgtcttctacttcaactgtgcaatctccgtttcttgtgaatttaactttgcagccgagtgactgcacagctcgtgatatgactgcacgctcttttgtagccctctttgctgattctctagctgcacggcttatatctctctcgttcagtaactcttcgttcaatgactccattgcagaagataactcatctacctttctctctgcttcttctttttcctgttcaaattttttcgacccgacacaagaaacaatcagaggccaagcatgttaattgactagaatgtccagtcaaatataaacttttaagaaaaaaatattttgcaaggataggtcaccttcttcatttctgaatacttaacagtcatggctctacattggtcttcggtttctgtgacgttcggctccacagggcaggcccaccggagatggaactggggccagagagttggggctagagctgctgcaggaggtaataatgggccatcatatcttgaaggatcataaaatgggttacagtggacatgagaagttccactggaggaacgcaaatcagccaagtaggcccaaatgcatccacaggtttcagaaatcccacattgctgcctctctttttcactgcaatttatcaagaaagtgttaatatatatactaaagtgactcatggtcacttcctgcacgacctaggaactttcaattatacagagttgctccaactcacccagaaacaattatcttacatatgatgaatttctgactatacaaactaaactacagaaaagaaaagttttaactgagaggttacctattgcacaaaaagttcccaaaacgacacgaaagcaagcagtctatgaaatctaccagaaaagtctgaaacaaaatattgatggttagagattacttttaaaacaaaatttcaccatgacagctcttaacagtatatacataccggagaaaactcgaaagcagaaggatacatccgcattagctgtgaaatgcaatcaagccactgcaaacaccataaacgtgaacatgatataatcttaggctccactcagctatcgtaagtagattttccaaatcaaaaggaataacataattgcaggtaatagctggtcacctgcaaaaatataggagaatagttgttcagcccatatgaagagctagaggattgagcagctgctgatcctggagattgccgcactggagatgaaggaaaacttcgagcagaagaagactgaattggtaattcaaaattaccagattcagacacgtttggcattcccacccgatccgaaaatgggtgaccaaatgataaccaatccttttcgacaagagcctgatgtgaagtcagaacagtaggaaagactacataagacaatggtgcatcaaacaaaaatcttataagggctgcttatgcagttgaatcagctggcaagaacaccacccacaatatcaagttacaatcctaaacttgaagttgataaggaattaagtaaattcagtcacaacaagatcgagaagccccaagaaacccaaactatatatagcacgaggaatacctgaaacccagaaaatgttctgtagtaaggatcaagcaataagcatgcaagagaaaccagctgagttgttctgtcccatccatcactgcacagtgacatcacaagtcaggatataacaaaaaatctactgagaatagttaactacctgatgtaaataaaagtgcctgcttgaaacaaatgcatctttgtcttatcacatatatagctaacctgcagtgcacaagaactgatgctgactccatagcaacacgtgcagcaatccatgctacaccagctaagatgctctgaatgtgactcaaccaaccactatctccaagcacggatactgaagcagacatactactgagattacctccaccccacgtccagccaccatgcctctacagatttcacacaaaaagaattatccactttaagcaagggacgaaaaaaactaagtatggtaaatcatgatgtaagatatctgtaaattaatttagacgttctccatgacattgaaaaagaaactaaggttgcaaatattaacttgatagataatgtaaaatcatatccacatgcttaagcttaattcaattgaaggatatctgatttagttactgaaaccatttagatgttgtgtgctagaaaacttggaaagtgtcgttgatatgttaagaaactttaactgcttttgaaattctctgccaactacaattactgaattccctggaattcaatacttaccaagaatgatgacgtcccatcggatgatgttgtaccatgcatatctaaataatccctaaggcgggaaaagctctctctcattgcatgtatgttgtctatccccaaaaaaacaatctgaagaaaaaacattgtcagtcaaaacaagcagttccagaagacaaaatattgagctccaaaccactttaggccatgtacagacttcagattgcaaataatttgaagatgattctgagcctcctccctttgctccatttgctaatgcatttttcctaggtcttgcatctacgatataaagcttcctatgacataaaaacaaaggagagtacgtgaatatttttaataaccaggtatcaacattcaaccacattgcagatatgaaacagcagagtatttttttattctaaccaaacagacttttcttaacatttcagaaaataatcccacgagcaatggggtcaacaagagtggttatttcaaagtatatacatgtaatttatgatttttaacacaaaagcatgcgagaaatgaaaacacaaagaggagtcatggtactatgagatgacaaaaagagcatcagtaaatcaaatgtaaattttaaccaaacgacggaaaatcagaagctcaccttcgtgctcccttatgaccagctaattgagtgcagaatgaagcaacaagtttctcatcagagttactgtagaaaatgggtgaaatatatcaaaacttcagaatccatcattttaagcactttgagaatccaaataagcaactaaattatcatgcacaagtctggtcataaaattaaaacttctatatacctcctcatgttcatcatcagaccaactaaaggttgtgatgagcgagcaatcacagctccacttcctgcaattgagataaaaaaaaggaacatgtaaatgtggaactatgccaacaaagttcaaacagaagtaccacaaccactgcatatctacctggatgacaccacgagatcacaggtaagcgacatcttgcccggaaagtagaagtctggagcagctcttcatcactgacaacaaacatttgtaatgttattgtatgtctatacttctcaaaaagttgaaaccaaaaaagaaacagtggttgccaagtagctaaagagaatctttgtgtgcagttttcaattctcaatctttgatagataccatattatgttttcattcctgtaaaaggaatcaacgtcctacctaatggattttggaaccatcaaagcaaacggataactctggcacaagtcataatttgagtttaagttagttatacgccaaagatcattggatagagtgaatgaaccgtcttcaatcatattcattgacgctcgttgtgaactttttccgagaaggcgaaaatattcattaagcaatctttcctttgggtttgtgttaccgaattgggaaggtccgcatgtaaaagcataaagatcccatactctctctggtttgttacacctcaatagcgtatcaactacagtatgtctctgcaaaagtatgccaacagaatcatataggtttcaaggagaaatgtagaaattagcataagatgaaaaaaaatcaaaagtttcacctgcttggtaccaggtcgaaaaccatagacaactattctcatatcttttcctgcaaaatgcacatgattcatatgaaatggtttaaaactaacatacagaggaactatataaagcggtaaagaaaatcccttcaatcaacatgggtgatgtctactgccaagataattactttcaggtaagaaacaaaggtagtaaaagagaaggaactaaatatcaaagtgaattttgatatacaccgcaagaaactgaaaacccaaatgaatcaaaatcggttttagcataaggtaatacggaaacataccagtgacctgtaaaagtcgtgtcggtgcattctcattgttgtgatatttgtttgattgaactttcggcgcctacataccaaaattacatgcagaaaacagcattaaaacccacagccgaacttcaccaaaactaatcacagtgttagatacaatgactgaccagtttgttaaacttctcgatagctacaaatggaattgtaccaagtggaacaagctttctggttccttcactcttcacaaagaaaaacaaggaatgcagaaaatcaacagcattatttacatgtgatgcaccacgaaaagattacaatgggtttacacaaagaagaaacagaggaaagacaagtcataccaaaaacagaatacggaaatttgataacaagagggtccctgcctcatcggtgttaatgagaataactccacaagcctgaaatcaaagccataaagaacaaacacaacttcaattaaagaccaaaacacaagcagccctccacaatacaattatgatggacaagttccaacaaacagaaattgatttcttgctaaattccaagaaacctgagtgatgcattccaataaactctcaaatacaaagcacaaagcttagaaaacagtgagaattagaagaaattttgaattcgaaacatccaattttgaccaaatctaatgacatacctcgaagatgatcctctcagattccagcaagcaatccaaattcgaatacgagcctgaccatgaagctgactgaaccaaaccaatcaaaagagaacaagtaaacattaggcctcaatcgattttccccaaattgagcttctcaataaagagatggacaacaacgacaacaacaacaacacaaaacgatatactcgtgttgcttgcttaattaggttaaggaaaacgcgagagagaagcaagaattgatagaaaagttacatcgagtttagtccattcaagcacgtcccagcttccggtaccttccatcttctccgacgaacatcgcagcgatcgtgatcgcccggagagaggtctcagcgccgtcatgtaaaaaaggagagagagagaggggagagagagaggtgggagagacggtgattcggcttggggttcaccggccgctcaacggtggcaaaggacggatttagcacgctgcctttttgccacaaagacaatgagacatccaaatacgacgctgtttccgtacggccaaagtttacgtttctcaccttcttttttttttcctctaaaataatattatttctcacctatataataagattaggaaaaggaaatttgtctctttttcataaaataaaaaggaaatttgttgattaagagtttcttaaaaaggaaatatattatttctcacctttattgttttttaattcaaccttaatatataatgatgagagtttgttgatatagtccatttattaatgaaagagtttaatgtaacttttggtaattaaatagagatttcttattttaactcaattaacaaaatatttacaatatttttgatctaaaactatgaaatatcaacagaaaattaattacatttaatatattttaaaatatcctaaaatggatattagtaaatattaactagtgtaattgtatgatgacccattctataaaatattactagttgtatattatcatcatataataatactatcatcataccaatatttgtttcttaatggtagatatttccttttaaaattttttatcatcatactaatatttgtttttaaatgctagatatttctctaaaaaatactagtataaagttctttaatgctataacgattcagcatgtgcttgggacaaataaaacgattcagcatgctgaattctgtgacatgggacttggagttggaatcaagaatacaaaacactaatcttcttctcttggccagctagatcaagtgcgattcattcataaaacttatatcataaaatttaaacatgtagactgaagaaacaataatcaactaagaaatctattgactttaatttcaaactttgacaaacccacatacgaatacagttgaccaaaagggaggagaagaccaaggacgagtaataataatacaggacaaaacttggacaaatcggaatttaaggaatcttctgtatcaccaacgagtattacagaatctaaaacaaccttggcacatacgtatatatgcagtatgtaactcaccacaataaaaatcatagaacaatatacaacgcatcatcatcctactacaagtcagaattttgcaatccacgaagcagaatagtaaacggggaagaagataaagaggtgctcagatcataatacctctcatgtaattaatcgagcacctttccgtactctggtttggtccaagctgcataggatacagggcgcgcccacggtatggtttacccagtgggtgagatccagtgccggtttaggtcaacgaggtagtaaaaatccagacttgtgtgtgtcgtcttggagagcttcactagttatctgtgtccaagcatttctcaagggttttactactggtacactcctgaagagccttggcattgagttctctgccaaatctccagacataattgaggcctacgagaagctcggtaatgatggcttctgtcttctgctggtttgcaaagaaaagggtttgtgcaagaactatgtgcgtccttgaaaccaagctttggtgctcgtaactccgctcagattgccattttatcatgttgtgagctaatggacccaaccattccaagatacccgccattgcgtctgtccattctcttgctaggcctggatcataaactgtggaagaactcaagtttttcgagtaaggttttagcctttctctaagcgatgttctcacgctcgccggtaacatgttgtaaaggtcgtctcttgcatcatctcctatcaagtgaggagacgcaacaaatctctctatcacgatgatgacattagcatagtgtaatgctaagcaagcggtaccaagggtattaggagcagcatctgacagcttgggtcgggaaggaagtgtcaagttttcaacgtgaacagagttagaattatcttcaagaatgtgatgctcagcactactattcctagctccattccgggccctagtgctgagaggcgtaatcccatcgtgagacaccatacagcctttaaatgggccaacctgtgttaatcggttggctttcaattgctttttcactgaggaaattgaaggcctttccggggtctgccccatcttcttgttgtttttgcccattccgataagtggtcctgatttggaggtgatcttcccaagctgaccagagtaaaacttgaaacgtttgtgtttttctgcaacaagaggacctgacttaggtgattcggcgctgagagaacccgaaaggaaatcactcatcttcgtggaccttgtagcagctgaacccgatgctggaccggtaaatcttccaagggggccagaagcaaatctaggaagaccactagactcagatttatgagatacaggagttaaaatagtagaaacggagtggctgcggccaataaaatcagaatctgcagagctaacatcacttgcttccactctgtaactaatgccaaaaacatgtttagtcctgctaaggattgtgaaaactgatctaaccaagagaatgacggtatagtcataagtacggttccaaagagacacatcccgcagattcttcacttcgtgtcttttccatgtaacttttttctgatactccaaaagattgtcagtagcagattcattgctcttcattctcttgaaagtctgttcaagatcagcaagaatctcagtctcctggtagagactagcattagatgatatgaaacgttccattttcttagctttcttatccattttcttccacccaaactgccaaccataagggtcagctccagtcttcatcatatcactaaaacaattctcaaagcacttcaacttgggatcgttgcatttcctcgcaagcctagccacagctttcgctacattctcaacgttctccatcatttcatcacgtattaacctcacaataaaatcatcatcttctgaaactaacttctttataccagtggaatgtgtaatctcgtccctaagccttgcaacattcttatcacttaatgactgccacaaatgaacaagcttcgacaacaaactcgcaacctcaaacgctaatactcctagaaccgccttatctttatgaccatcatgtttctttggaaacctccacagattacgaaaccaagtctctgaaaccatcttctctcaacctgcaataaaccaatactatcaacaccaaaaagcttccaaatttcacaataaaaaaccagacccacgattgaaatctcaagaaaacagcaagaagtaactcgtacacaagcaaaaaggaattgaaattggggaaatctagctacagagctcaagttagagagaaacgcccaaattcaaccaaccctctaaatcggttctcgaagcttaaagctaccaacatcgaatttagtaaaagacccatgatttgaaattggaattgtcggcaaaatcgagaagatatagagccgacacgggaacagtgaaaaccacaaagcgcgtaagaatgaaacagtgggagaaggaagagagaatcttaccgatcattcgagggaaaagatgggaatcagagaaaaatctggaaaaaaagaaattaagagaaagagagagaagaaagtgaggaggaagatgcagtgaagactgctatagccacatcccacatggtgtgatgagagagagagagagagaggttaaagcagcaaattgtggagagataaagagagagagagactgagcgagtcaagttcgtcgtcgtgtttaaaagaaagaatcctatatttgcctttttctttactactttattttcagactatttgcttattttgcctcaaacttttttgattgtcacttttcgatcctaaagtgtttgacaatttacctgcctttttctccaagaaaaatcagaacagaccacagcaaatttatgtattttctattaaaaaagaaagaaagaattcatattacttatagaattaaaagctaagcagttgaaaacgtgaaagcagaatttctaaaaaaaatagtaaactgctacaaacttatttatgtgtatataacatatctataaagaaactcaaatatatgataaatcattttaacaaaatttctatgaaattataataaaaaaagtcacttttgacacttaaaaggttgacaataaccgtctctccaaaaaaaaatcaaaacatttataatttctaaaactatggtgtaattttgctgaaatcaaaaagaaaagaaggatttctatatcataagtttcattattgtatcaaactttcaaatttcatgtaatttgaaaggaaaaaaattaagatataatgttgtttttgtttcttatgttacattttcatggaatatatattcataacaaaaaatgtattttaatatgatgagagattaccatccaaaaggtcgaacttatataaaacaagttaataactaaacaatacatgtgatcacaatcaatgacagttttgatcttaaaatagaaatgattgagcaaacctcaaaaatgtcttcttaggatcacaaaatctttcctttagcttattaaagccgggagttcaactctctctcccttgtagactttttgttttcaaatctttttctttcaaaaaatcaataattagttaatgggcataatatttggttttaattaagtccatagattttttaggaccatctctaatcacgacaaatatcctaaattgtaacacatttaaaacttaaaagtattgcattcacaatccttaaaatatatatatatatatatatatatatatatatatatatatatgaaagttatatagaaacgataactccttactcaacaattagcccaaaaaaacatccataatgcatttaaactaggaattttaacaaactcaaataggttggtagttaaaaaaaaacaaatagtagatgtacatacgtacctttaaaaatatatactcatatcgaaagttttaaattttgcgaaattaaatacatttatctatcaattaaaatacatttaataatgcataattctgtaatatctatctttaatttccatatagaaccaaaacaaaataaacatatcaaatagttttaacttaacaaaaacgttagggaaaagttgacctaactagcttgattgacgttgaacttgtcaatgcgaaagcgatatttccaatatatactacatgtagtattatttatatggaagtttctaaaaaggtgttgagtggattgttacttgttggaggatgctattttttccttcttgccataatattttacgagtatgggataactacatactcatgattatgaaacgctcactttatttgaaaaacctcctaatacaccaaatatgtcactagattccaaaacgtagaccaattgtatctaatctcaaattctcaatcaaagtattaatttaccgatggtaagaaaagttaaccgatataattatcaaaagaaagaataagtcaacagattcttaatctctttattttggtatatgaacatttgtacaaaaatctcaaaagatatgtaactgtttaaaatataaattcactgagattaattcttcagactcgtgttagctataataatgtcaagagttcttcttgtttcaaggaaaaaccttaaagatatgtatattttctgtaattatgatgatataatttgctattcattgtcacaaacattactttaaaaaatcgtattttcattactacaatgttgactaagaacaaaaatacattgattattgatatatcgtcaactgaattttcttccgagggatataattctcaaacatagcaagaatctcataataatgtttcgtgactacctttagacgaaatttttttaagattcgtaacgtgacttatggtctcttgctgtgggggtcaatgcgaataaatctaaatgtatgggagtcaaataaaataccaagaaaaataaaggagcagcacccaataaactatatgggaccagaaatcctttcattggtttaaaataggattatcccgaaagatgaaggactaaattgaaactgattgggggtaggaagagatccgtcacaatcattaatggcttccacgcggaaacttgtcgtttatacaatttcattaactttcgggtcgggtttatattccaaatgggtcaaataatattagtttaatacactaacggagtaattaattggtgactacaattttatcagtttggtgcaattagaaacgaacatagtcgtaaaatacgagttcggtgttatacctttatttacgttaaaaaaatacgagaattttgtgtcaaatttcaaattaatttcatgaatatatggaaattattagatactctagcgaaaatagtgattatgagcgttttacaaaaatacgattttagcattgaacttcctttatgtaattcggtcaaatgttggcatgaagaagcaagtttgcaacattaaatttcatttaaaaatcgtgttgacatactttaaaatctaaatataggaagaagaccaaaacattaaatttagtaagattctaatgaacatttataagttataacttataaccaacaaaagttgggtttagcgttgttgctttatctgaaaacttgcaaactaaaccattttaataggactaatgacaattaacaacaaaatacacttaagcaacaacgtcctcgtgaatataatttgggcctcaggcccatattgctaacgccaactgatatttcactttattccttcttcatctcaccacactctctctctatctctatctctaacggcatagctgactcagtgttctccggcattgactcgcctgagaatcagaaagcttagatcggtgagcttttagctccattttctgtttatttacatattatttcctttttttctctctcccttttttatctggaatttgttctgctaaattttccagctgttacattttccgatcacgagaagaatcactgggtttttatgttaatcaatacatgttcctgttttctgatcataaatctcagctattaacacctgattttgattctgcgtaataaaaacctctgatttgcttttatcttcactttccccataaacattgcttactttattcgctcttcttttaccgtttccagctaaaaaattcttcgctattcaatgtgtttctcgttttgttgatgagaaaaatatctgacaaaaaatcatttattgcattttatggtgcagattcttagttaatgtcgccttctctaaccaagtcagattaaaaaggagtgttcgtccatgttgctttgttttggtgtttggagagagttttcggagagttaggtgagtgttatttggggtgaggtagtgataaggtttgaagggggagtgattcatcaagtgtgttatgaattcgagggctgatccgggggatagatattttcgagttcctttggagaatcaaactcaacaagagttcatgggttcttggattccatttacacccaaaaaacctagatcaagtctgatggtagatgagagagtgataaaccaggatctaaatgggtttccaggtggtgaatttgtagacaggggattctgcaacactggtgtggatcataatggggtttttgatcatggtgctcatcagggcgttaccaacttaagtatgatgatcaatagcttagcgggatcacatgcacaagcttggagtaatagtgagagagatcttttgggcaggagtgaggtgacttctcctttagcaccagttatcagaaacaccaccggtaatgtagagccggtcaatggaaattttacttcagatgtgggtatggtaaatggtcctttcacccagagtggcacttctcaagctggctataatgagtttgaattggatgacttgttgaatcctgatcagatgcccttctccttcacaagcttgctgagtggtggggatagcttattcaaggttcgtcaatgtgagtgatcaaatctattttcagtttttttttttccctttcttccgttcttgcagtacttagagtagaacatgaattagaatatcttaagaaagtcatggttttgaacagatggacctccagcgtgtaacaagcctctttacaatttgaattcaccaattagaagagaagcagttgggtcagtctgtgaaagttcgtttcaatatgtaccgtcaacgcccagtctgttcagaacaggtgaaaagactggattccttgaacagatagttacaactactggacatgaaatcccagagccgaaatctgacaaaagtatgcagagcattatggactcgtctgctgttaatgcgacggaagctactgaacaaaatgatggcagcagacaagatgttctggagttcgaccttaacaaaactcctcagcagaaaccctccaaaaggaaaaggaagttcatgcccaaggtggtcgtggaaggcaaacctaaaagaaagccacgcaaacctgcagaacttcccaaagtggtcgtggaaggcaaacctaaaaggaagccacgcaaagctgcaactcaggaaaaagtgaaatctaaagaaaccgggagtgccaaaaagaaaaatttgaaagaatcagcaactaaaaagccagccaatgttggagatatgagcaacaaaagccctgaagtcacactcaaaagttgcagaaaagctttgaattttgacttggagaatcctggagatgcgaggcaaggtgactctgagtctgaaattgtccagaacagtagtggcgcaaactcgttttctgagatcagagatgccattggtggaactaatggtagtttcctggattcagtgtcacaaatagacaagaccaatggattgggggctatgaaccagccacttgaagtgtcaatgggaaaccagccagataaactatctacaggagcgaaactggccagagaccaacaacctgatttattgactagaaaccagcaatgccagttcccagtggcaacccagaacacccagttcccaatggaaaaccaacaagcttggcttcagatgaaaaaccaacttattggctttccatttggtaaccagcaacctcgcatgaccataagaaaccagcagccttgcttggccatgggtaatcaacaacctatgtatctgataggaactccacggcctgcattagtaagtggaaaccagcaactaggaggtccccaaggaaacaagcggcctatatttttgaatcaccagacttgtttacctgctggaaatcagctatatggatcacctacagacatgcatcaacttgttatgtcaaccggagggcaacaacatggactactgataaaaaaccagcaacctggatcattaataagaggccagcagccttgcgtacctttgattgaccagcaacctgcaactccaaaaggttttactcacttgaatcagatggtagctaccagcatgtcatcgcctgggcttcgacctcattctcagtcacaagttcctacaacatatctacatgtggaatctgtttccaggattttgaatgggactacaggtacatgccagagaagcagggctcctgcatacgattctttacagcaagatatccatcaaggaaataagtacatactttctcatgagatatccaatggtaatgggtgcaagaaagcgttacctcaaaactcttctctgccaactccaattatggctaaacttgaggaagccaggggctcgaagagacagtatcatcgtgcaatgggacagacggaaaagcatgatctaaacttagctcaacagattgctcaatcacaagatgtggagagacataacagcagcacgtgtgtggaatatttagatgctgcaaagaaaacgaaaatccagaaagtagtccaagaaaatttgcatggcatgccacctgaggttatagaaatcgaggatgatccaactgatggggcaagaaaaggtaaaaatactgccagcatcagtaaaggtgcatctaaaggaaactcgtctccagttaaaaagacagcagaaaaggagaaatgtattgtcccaaaaacgcctgcaaaaaagggtcgagcaggtagaaaaaaatcagtacctccgcctgctcatgcctcagagatccagctttggcaacctactcctccaaagacacctttatcaagaagcaagcctaaaggaaaagggagaaagtccatacaagattcaggaaaagcaagaggtaactaatgtattctacaatctctgtgatataattttgagattttagtaactgatgtgtccaaaccagctccttatcactgttggtgcgttgtataggtccatcaggagaacttctgtgtcaggattctattgcggaaataatttacaggatgcaaaatctgtatctaggagacaaagaaagagaacaagagcaaaatgcaatggtcttgtacaaaggagatggtgcacttgttccctatgagagcaagaagcgaaaaccaagacccaaagttgacattgacgatgaaacaactcgcatatggaacttactgatggggaaaggagatgaaaaagaaggggatgaagagaaggataaaaagaaagagaagtggtgggaagaagaaagaagagtcttccgaggaagggctgattccttcatcgctcgcatgcacctggtacaaggtgaagatccacttctcttctcaactccatttttattcacacaaattagtagaatactcaaaaatgatgttttgtttgcaaaattttaaaattcactagttaaccatgtcaaataatattcataatgcatcttgtgaagaacaggtgtgcatttatggtgacagctgaatggtttatgtgcctattatttcttttactgctatagatgaccaattgaacttaaacgtttacaggagatagacgtttttcgccatggaagggatcggtggttgattcggtcattggagttttccttacacagaatgtctcggatcacctttcaaggtatatgagttgccttaataaattgagttccaaaacatagaaattaacccatggtggttttacaatgcagctctgcgttcatgtctctagctgctcgattccctccaaaattaagcagcagccgagaagatgaaaggaatgttagaagcgtagttgttgaagatccagaaggatgcattctgaacttaaatgaaattccttcgtggcaggaaaaggttcaacatccatctgacatggaagtttctggggttgatagtggatcaaaagagcagctaagggactgttcaaactctggaattgaaagatttaatttcttagagaagagtattcaaaatttagaagaggaagtattatcatcacaagattcttttgatccggcgatatttcagtcgtgtgggagagttggatcctgttcatgttccaaatcagacgcagagtttcctacaaccaggtgtgaaacaaaaactgtcagtggaacatcacaatcagtgcaaactgggagcccaaacttgtctgatgaaatttgtcttcaagggaatgagagaccgcatctatatgaaggatctggtgatgttcagaaacaagaaactacaaatgtcgctcagaagaaacctgatcttgaaaaaacaatgaattggaaagactctgtctgttttggtcagccaagaaatgatactaattggcaaacaactccttccagcagctatgagcagtgtgcgactcgacagccacatgtactagacatagaggattttggaatgcaaggtgaaggccttggttattcttggatgtccatctcaccaagagttgacagagtaaagaacaaaaatgtaccacgcaggtttttcagacaaggtggaagtgttccaagagaattcacaggtcagatcataccatcaacgcctcatgaattaccaggaatgggattgtccggttcctcaagcgccgtccaagaacaccaggacgatacccaacataatcaacaagatgagatgaataaagcatcccatttacaaaaaacatttttggatctgctcaactcctctgaagaatgccttacaagacagtccagtaccaaacagaacatcacggatggctgtctaccgagagatagaactgctgaagacgtggttgatccgctcagtaacaattcaagcttacagaacatattggtcgaatcaaattccagcaataaagagcagacggcagttgaatacaaggagacaaatgccactattttacgagagatgaaagggacgcttgctgatgggaaaaagcctacaagccagtgggatagtctcagaaaagatgtggaggggaatgaagggagacaggaacgaaacaaaaacaatatggattccatagactatgaagcaataagacgtgctagtatcagcgagatttctgaggctatcaaggaaagagggatgaataacatgttggccgtacgaattaaggtaaatctactaatttcagttgagaccctcatcaaatctgtcagaaggcttgaacatcagtaaattatgtaaccatatttacaacattgcaggatttcctagaacggatagttaaagatcatggtggtatcgaccttgaatggttgagagaatctcctcctgataaagccaagtgggtaaatcacatttttagtgactgcaacactagcacgatcgatttactcaacaattacgtcaaactgagtattaacaagttgctcatgaacatttcacagggactatctcttgagcataagaggtctgggtttgaaaagtgttgaatgcgtgcgactcttaacactccacaatcttgctttccctgtgagtcagactattccattatctactaaaaacttagaataactccggctaactaagctggaacttgtattgatgatatgaaggttgacacgaatgttggaaggatagcagttaggatgggatgggtgcctctacaacccctacctgaatcacttcagttacacctcctggagctgtaagtttctttttgtttgtcatctaaacaacgaaatttttatgcaagtcataaccatgctgtgttttcacagatacccagtgctcgagtccatccaaaaatttctttggccaagactttgcaaactcgatcaacgaacactgtatgctcataaactctaacaaatcatctgtctgaaaaaccaatatttctttggtagaattctattgtcattactcattactaacagcgaaattaattaacgttctttttcttactcaggtatgaattacactaccaactgattacgtttggaaaggtattattgctctaagctttgaatttatcatatggtaatttcaagcattgtaggcacctgatcaattatgtgtctaaatcatgtgaattcatgtcaggtattttgcacaaagagtagaccaaattgtaatgcatgtccaatgagaggagagtgcagacactttgccagtgcttatgctaggtaagcaagctttcatgtacttatatgcaataattaaagataaaatttaggattatgggtaagtaacaaaaaattaggctcagtttcatggtagctagctggaaatagtattacaagaacaacataaagatcaaagacagaatcatggatccatatgcactatcattttagctcttgtaatccatacatgaacactatatgccaaagtagggatttcaaatatgagattcgatgactgatgccattgtaacagtgcaagacttgctttaccggcaccagaggagaggagcttaacaagtgcaactattccggtccctcccgagtcctatcctcctgtagccatcccgatgatagaactacctcttccgttggagaaatccctagcaagtggagcaccatcgaatagagaaaactgtgaaccaataattgaagagccggcctcgcccgggcaagagtgcactgaaataaccgagagtgatattgaagatgcttactacaatgaggaccctgacgagatcccaacaataaaactcaacattgaacagtttggaatgactctacgggaacacatggaaagaaacatggagctccaagaaggtgacatgtccaaggctttggttgctttgcatccaacaactacttctattccaactcccaaactaaagaacattagccgtctcaggacagagcaccaagtgtaagctaatatctcctcctatattttatcttccatataaattttggggaaaaaatcgctctccatctggttttagaacatgcgggtcagccagggttatggcatttttatatatttcaccgatcggcccgagctggctctggttgactcgtatgccaccctgcattgaacaaaccagtaggagacaagcaagcaaaacgttttaagataaggtctatggtaaaatgacaaggtaactgataaatgtgtcgtctatttgcaggtacgagctcccagattcacatcgtctccttgatggtgtaagtcaatttttaactctctctatactcgagttgtttcacttgagcaacactgtttaaaagtcctcatttgataaaataacagatggataaaagagaaccagatgatccaagtccttatctcttagctatatggacaccaggtgagaataaaactgcaatgtttcattcatgtgtctacagtatcaaagaaagtacagctagagctaaaaagcatttgaaatagagtcggttaaatatgaaagtttgaatctgtaaatgaaagccggaacgtagcattggtggatgttatatgtaaattagtttttgagattggtctaatgtagttgtttgactgccaggtgaaacagcgaattcggcacaaccgcctgaacagaagtgtggagggaaagcgtctggcaaaatgtgctttgacgagacttgttctgagtgtaacagtctgagggaagcaaactcacagacagttcgaggaactcttctggtgagattatcttgatcttttgtgttgctcatgaaaaggagaagtgagaatacaagtttgctaatatcattttttcgtcattcacagataccttgtcggactgccatgagaggaagttttccgctcaacgggacatatttccaagtcaacgaggttagatgaaataaaactcaaacagacagacgaaacattatttctgtttagtgttggttctttatcctccttgccattttttatcttgcagttatttgcagaccacgagtccagtctcaaacccatcgatgttcctagagattggatatgggatctcccaagaaggactgtttacttcggaacatcagtaacatcaatattcagaggtaaaaacattcgtaatagagttagttaatcaaatgtccaaaacacaagaaagcttcaccgtccaatacacaagaaagcttcaccttctctttgccaaaaaagatcttagaatgttttgctgaatttgtgcaggtctttcaacggagcagatacagttctgcttttggaaaggtaaacgttaactttcgacccagagaaatccggaaaatctattgctttgttctgatcaatacgttaaacatatacacacacactttacacttaggaccaatactgttctgatctgtgatagaaactggtaaacatctaacaattatgattgcaggattcgtatgtgtccgtggattcgaacagaagacaagagcaccgcgtccattaatggcaaggttgcattttcctgcgagcaaattgaagaacaacaaaacctaaagatgactggaagaaagcaaacgcattgcttctctgctctcctctatttaaagccaggaaaagtcccatttagacataataacaggaatccaaataggctattttctctttctttcttatttcattcatagagcagaagcgacacaaaaaagttttttgggttatttattttctctctaacaaatttgtagcgttttgggtctttttctggctgtcactagcgtggcaaatccaatgtctgcgcacacttaggcgcattgtcaataaaatttctccggccaccggagtgtttagcatcttttaaccggcggctaatgcgaatatttccggtaacacatattccttattctatgttgggttttgtgataacggcagtgggccttactagacaatgatcatcaataaaactaacacaaagttgaatgctacaaagtagaaagtgaagaaaaaataatatagacattgccgaatgccaaccaaaaagaaaagcaaaatcatcaaatcgaacaaagtatttttataattactctcgactcttgagcataataatctctttgattaagcatgaaacattgtttttaataaaatactaaacatgttatatgttaagaaaaattgaattatttttgtaacatggatataacttgaaaaaacatgtgtgtgaagaacagaaaagattatataataatatggtagattaaaaacattagattatacgaggagcaaagtagttagcaccagcaaaaactcacatactcatgtttagcatgtgcccaacacaacacttacaccttttgggcctcacgaatggccaagtaggtgagagagaatcactgttatttacctttttgccctcatgtatattctctcgttaaaagtatctgaaccaatgattatccgccacgtagatactctctgggtgcaccaagttgcaagagtagcatctaaaccaatcactttgaatatatccaagatgccatcccggttcaagtttttatcaagagtaaaagttccattttcatttctcataatcagattcgtattcacgcgcctattatctcgaacttatccaacacgcgcgtttaatcaaccgttggattctcaatggacggtggattaaattagctgaaaagtaaagcggtgcgttttacgcgcttcttctggctagccgccgcacgtgtcatgcacgtgatagcgcacgttagctttgaccattgtcttttgttctctattagttttttaacacacgcccccttattcgatttctcacccacccaaagccactcactctctcttctctctctctgaagcgatgtcatcgacgtttcgagctccggcgggagccgctactgtgtttacggcggatcagaagatcagacttgggaggctcgacgctctgagatcctctcattctgttttcttaggaagatatggacgcggcggcgtcccggttcctccttccgcttcttcgtcgagttcttcgcctattcaagccgtctccactgtaagattcgatacctgctcttgatttattatagttacaaggagttttctgcttatggtcgtgaaaaattcatgagatgctttttgaatcgccttcacgaatattcttaaaaaatttatgttatctgagattctgattattatcttagtggaaatgattactggattatgataattgatgcagctgtatcgtgaaaatcattatttattcggtaattcatagcttttcatattggtgattaatattttatgaaattgagtttaggattaaataagatatagcagtgtgagagagagagagattcagtgatgcgttctcatgtttgattttgtttttttgtttctttttttagcctgcgaagcctgagactgcgaccaagcggagcaaagtcgaaattatcaaggagaagagtaatttcataaggtatcctttgaacgaggagcttttaacagaggctccaaatgtcaacgagtcagccgtgcagcttatcaagttccacggtagctaccaacagtacaacagagaagaacgtggtggaagatcttactccttcatgcttcgaactaagaatccatctgggaaggtccctaaccagctctatttgactatggatgacttagctgatgagtttggaattggtactcttcgtttgaccacaaggcagacgtttcagcttcatggtgttctgaagcagaatcttaagactgtgatgagctcgattattaaaaatatgggtagcacgcttggtgcatgtggtgatctgaacagaaatgttcttgctcctgctgcaccttatgtgaagaaagactatctctttgcacaagaaactgctgacaacattgcggctcttctttctcctcaatcagggttctattatgatatgtgggttgatggagagcagttcatgactgctgaacctccagaggtagtgaaggctcgaaatgataactcccatggaactaactttgtcgactctcctgagcccatctatggcacccagttcttgcctagaaagttcaaggtcgctgtaactgttcctacagataattccgtcgacctcctcaccaatgacattggcgttgttgttgtttcagatgaaaatggggaaccacagggtttcaatatttatgtaagttgacactcatttagcctaatgtgctattatatatatttagtgtcaggcttgtttgcccgccttttctttcagtattctttttctggatactttcttggttttaaactaatgatgataatgactcatcttgtaggttggtgggggtatgggaagaacacacagaatggagtctacttttgcccgcctggcagaaccaataggttatgttccaaaggaagatattttgtatgctgtgaaggccattgtagtcacacagcgagaacacgggagacgagatgatcgtaaatatagcagaatgaaatatttgatcagctcctggggaattgagaagttcagagatgttgttgagcaatattatggtaaaaagtttgagccttcccgtgaacttccagagtgggagttcaagagttacttgggatggcatgaacaggtattgttactaaaacccttttgaaaattgcgtcactttcagaactttatagcatggcttaatcaataaaatcttatcgtcgttgtgtactgatagggagatggtgcatggttttgtgggcttcacgtagacagtggtcgtgttggaggtataatgaagaagacgctgagagaagtaatagagaaatacaaaattgatgtccgcatcacaccaaaccaaaacattgtcttgtgtgatataaagactgaatggaagcgtcccatcaccacagtacttgctcaggccggcttactggtaagcagttttatttgacccataaggtatgaaaatctaatagctattgtgtcttaagctgagcaaaccattgcttatttgtgcagcaacctgagtttgtcgacccattaaaccaaactgcaatggcttgcccagcttttcctttgtgccctctggcaataactgaggcagagcgcgggatccccagcattctaaagagagttagggcaatgtttgaaaaggtaagatctctctgtgcacttatctaatcttgtgccattacaggcatttgatattgatgtgcaaaacttcttccttgtatcaggttggtctggactacgacgagtctgttgtgataagagtaaccggttgtccaaacggctgtgcaagaccgtacatggctgagctcggtctagtcggggatggtcccaacagctatcaggtacggttggagcacaagctcttgttactagtgatgagacagtatagtagtaagcaagcaggctaatattctgagttgttgtcggttgtgcaggtttggctaggaggaacaccgaacctgacccagatagcgagaagtttcatggataaggttaaggttcacgacttagagaaagtctgcgagccattgttctatcactggaaactagagaggcaaactaaagaatcatttggagaatacacaacccgcatggtaagtatcacatataacttctctttaactctctcactgtggcttgaacatttatattgaagaagaagaaaaaacaaatgactgtgttttttaactttaacaatggtaaaattgcagggattcgagaaactgaaggagctgatagatacatacaaaggagtttctcaatgagcacaacagagatcatctttcgttttataattcatgtaatgtaatgtctctgtctgaactgttactcttcggtaactctgatggagaacttgttctcgttttggtttgattttgtaccctcttttttttttttgtttttttggattgctttgtctttgattggataatgaagcattactgtatcaaggctaattagcccatcaataagcctttttaaagctctggatatggaaaagtcagaacctctctctcttatctctctaaattttagagagagagagattttgttcgatgttttgcatgctttaccagcttatgaatccggatgtgatccggttttgtcgatctatctcgctgtcctatctcgccgtccggtgtatccggtgttgtttacggctatcccgttgccgttctgtttgtttcaccgaattgatttgggaaacaatttgatatcagttttttcttcttttctaactggaaattttcatggccttctctcgatccgttccaccaccatccacaatcaggtaagtgttttggtgtttcgattgggcgactgttttagtctcatccacatgaatcaatatccagatttgggcgaattctgggttgcttgactccttccaaccgttatagttgaaacggtccggcgtttttgacggcttcaatcacctcatttgaggtccgtcttgccattccaggaagtcaagatatcaatttccgaagtctattcttattagcaagtgatgacaagagatcagaagcttcacctcgtggttgattgtttgctgacaacttctttcatgcttttgttctcggaaaagatccagtgatgagaagagaaagaatttgaagattaaattgaatcttttatctttttcggtttaatagttgtttgtttttataatccggagatgtttccggttgttcactcgccggaaattgtgccggcttctgtctgcatattttgctgaaggggttgtgggtaccggtttactaggttatccggttcacccggtttgtaagattggtttaatgaataaaaatcccttatgagaaaaaaaaaaaagctctggatatcatttgattactcctctttctaagatggcttcttatgctttttctttctgttgttgctcagttgctctgtttaaatatggactgtttttttaacccacaagtaaaacattttgagaaatttacacaccactgtaattttttaatgtccacaattatttaaaaaaacatattcacacataaaaaacagaatggacgggaggggtataactggaaattttttcacatcgattaaattggttgaaaacctaatcgccttaaaccctaattgtatcatcctcttccttgcgttctctctttctctctctcgccgacgacgaaaacatgggtgccaaggcgaagaaagctttgaagaagaacatgaagaaggttgctgcttcggcttcttcttctcagctacctcttccccagaacccgaaaccttcagctgattttttggtatttccttcgatactttctcttactaccaccattgtttcgatttcgtatcagactctttagggttttacattgaatctctctgtatgggtttttgttgatagccactagaaggaggtccagctcgaaaagctccagttaccaccccacctcttcagaataaagctactgtgctatacatcggtagaatccctcatggcttctatgagactgagattgaaggtataaatttacaccctttattattgtgtttgctcaatttaatgccctttgttgtcacaaacttgctaatatgaataaacctttttattatctatctatggtttatgtgtttgataatctggttttcctttctgggttatagctttcttctcgcagtttggaacagttaagagagttagagtcgccagaaacaaaaaggttatacattgattgatactttattttgtttgctcttgtttgatacgatgtgctctttcttaactctttgaatttgtattcgtcttaacagactgggaaatcaaagcattttgggttcatacagtttgaggaccctgaggtatactttagattctgtataaaattggtgaaaccgttgtgtgctatatatatactctagattcaattcttgacatttttatttggttctctgcaggtggcggaaattgcagcgggtgcaatgaatgattatttgttgatggagcacatgcttaaagtccatgtcattgaaccagagaatgttaaacccaatctgtgagtgattttaatcgactttttttcgtagtgatcagggatcttctttgcaaatagttagttggcatatctaattgtgtaggttagctattttacttggctgcttatgtactttgtgctatattgttgaatgaaagagctctatataacaatatactatctcgtgtggtttagcgcaagctttgaagtacaatgttctatggtttacagagtgagacttaatgacatttgagtcataggatgatactagataggatgtgataaaataagtgaggataaaagagagtttattgaaagatcgttttcttggctgagatggttttatttatgagtcataaaattagggtaaagaaaatgtgattcttgtcccctaccttggtttctaatgactccatactctaaaagatgtgcgagactctctagtgtttccagaagagaacatgcatgacctattttgagaattgttcttttcaagtagttgtggatcttaatgtatctatgtcctgaatgttataggtggagagggtttaaatgtaacttcaaaccagtggattcggttcagattgagcgaagacaacttaataaggttattctctccacttttcttgttatcaatatgccatttctcttgaacaagtggctctaactttgatttatgtcactgttgtatacaggaaaggacattggaagagcataggaaaatgttgcagaagatagttaaaaaggatcagaaaaggaggaagagaatcgaagccgctggaatagaatacgaatgccctgagcttgtaagtttccgattacacaattctatacactacatcttcaacattgaactaataactgcatgttttgtgtcactgcttcaggttggaaacacacagccagtcccgaagaggatcaagtttagtgaagaagactaaaagctgaagctgaacaacacttttccgataaccttttttgaatagaaatctgttctgttgtactcttgatattggatcaataactaaactttaaagtttgcaatgaaaacttctgtttcaatgattcagattttctgtatagcatcaagatactttcccgagacagcgggtgttagattctctctgttgaaaccgctctttctaggtgcaacggttgcgatgagaacaaaattctcaccatttcctacatcgatctcatacaactcggcaaagacatgtctaaactggtcttgaagctcttggtaaaatgtcttgttcggaggaatgacattgataatgaaaaccccagaaggaacaagaacagttcttgcagctagcaacacatctttagccacaaactcaaccggaggagcagtcatgccgtgaattggatcagtagagtccagatcaaccatcaagacatcaaatctggcatcatcatcacagcttttagaaagtctctttaagaactcaataccatcttcaacgtgaacacgagctaagctttcctctaacccgaagtattgccttgcaatcctcaagacttcaggatctatctctacgcctgtaacttcgaaccctaactgtagccttaagaaacttagcaatccaccacctccaaccccaatgcacaatgcctttggtttagatttgagatgatcatatacatcagaaccaatcaagctaagacttgccaccattggtgccaagtaaggatgcacaagttccgtaagatcaagcttgaactctgttcccattaatggcagagaaggattcgaacaacttctgggaatgattttaatggcagattgaactaaatttggcattctcttaaacctcaatctcctcctaaattctctaactccatcatcgatctcaatctctacatcttcaattaacatttcaccaacgaaaggcccgacgcatttttcaatctctacactggagacaacattatcatcgtaaatcagaaaaggcacatcgtcgatttcttctcgtgttagggttttaggtaacaaagctaccacaagaggtttcaatcttatctcgagtttctcagattcgtcgtcttcgccgttcggtcggtgataaaccgcaggtaaatcagagtcagtatcgtgatcatcaccgatcaagatcaatcgagagatttctggcatgttaaggagaagctgtaattgaccggactcagtggagaagatccaatcggattctcggtgcttggggacgagaatggcggcgactcggggaggagaagactcagtggaatgaacaggcgagtcgaggacggcgacgcggaggagatgaatcggagaattagggttagggatagtgaaagagatgaaacgagaaggagaggttttctcgaagattctcacatcaagcgccatttccttgattttgatttcaccatcatccatcttcgtctttttatgatgctgcttacagttaaccgtaataaaaccaaaccagaaataaaccgataaaaccggaataaaccaaaccagaacaaaccgatcatgtgactttcacgtgtttcaactccgaaattttcaatttttcatttactcatcttcttcttcttcgtcctgggcttttcatctccaggcctctctcatttccttctctgagtctacaaacatgtagaagcaggtgttttaattacgtcatagcagtaggagaagaggctttaagtcctcttctttctctagctaccgaaccactttttaaaattcgcccaaatcacaattctgtttgcacttagaatggcggatcattcgtgggataaaactgtggaagaagcagtgaatgtgcttgaatccaggcaaattcttcgatctttgaggcccatttgcatgtctaggcaaaacgaagaagaaatagtgaaaagcagagccaatggaggagacgggtacgaggtgttcgacggtttgtgtcaatgggatcggacttcagttgaggtgtctgtctcgattcctacatttcagaaatggcttcacgatgaacccagcaacggtacgtttcatttctttcctgatatttttttttgccgagagtttcggagtttccaaagtttggtgtttttttcttcctttgaactcaaatgcgatttcgttttcatactttagacagtgaattatggctttatgcaaagtgtaattgatggttataatttgggtttagtgaagaagctgaattgattaggcaaaagactgggtttttatgttgtatcagtttcacgttgacaggagaagagatttttagtggagatgcattagctgagtgtagaaaagggagattcaagaagctgcttttgttctctgggaatgattatttgggtttgagctcacatcctacaatatcaaacgctgctgcaaacgtatgttttcaaaacaatttcatgtcaacgaacttaagtatagatttcttccactgtcttatgttttttcttcaaggcaggcagtcaaagaatatggtatgggacctaagggttctgctttaatatgtggctataccacttatcatcgtttgcttgagtctagtttggcgcaactgaagaaaaaagaggtgaaaaaacgtccttgaatgattttagatggagtcacatgctattggtaagaaatctcaaactgagacaaatgatgtgtctattatctttacaggattgtcttgtttgtcctactgggtttgctgccaatatggctgcaatggttgcaattggaagtgttgcttctcttttggccgctagcgggaaacctctgaagaatgaaaaagttgccatcttttctgatgcgctgaatcatgcatcaattattgatggtgtccgtcttgctgaacgacaaggaaatgttgaagtttttgtttatcgacactgtgacatgtatcaccttaattcgttattgtaagtacttcacttccccaacttctcccttgatatttgggttttccattaatgtcatctataactgtttgtatagatcaaattgcaaaatgaagaggaaggtcgtggtgactgataggtcagtatcttgtgcaatatactgctcttgtcgttaagcatattgttcttgtacttatttaatgttgtagtactttcttatctgatcataattttgtccttttttatttttcctattcatagtgctagctacaatggctaaaccatgtctctatgcttattaacgcctttggtggtttcagactgtcgacatatgaaagaagttcttatggttgaatctcatttttggttttgacagcttatttagtatggacggtgactttgcaccaatggaagagctctctcagcttcggaagaagtatggcttccttctagttattgatgatgtaagttgatcgaaaatgttcaagtaaaattttagtatgttggtgtcaactactacttttgctgaagaaaaataatattgatcggtcaggctcatggaacatttgtctgtggagaaaacggtggtggcgtggctgaggaatttaactgtgaagctgatgtagatttatgtgtgggcactttgagtaaggcagcagggtgtcatggcggtttcatagcttgcaggtactcattcctatgtgatctgaaattcgtgaacccagaatttgttttagtggtggttaagatccctatagtatacggtccatgaaagcttatgataaagtgaatcaataatcagtctgtatcgtctcaatatctctataaatgaaacagagatttcaatgtactagtagactggtaacagcttaagtttgttgacggaaacagcaaaaaatggaagcaactgatacagtcgagaggtcgttcattcatattttcaacagcaatccctgtcccaatggctgcagctgcttatgcagcagttgtagtggcgaggaaggagatatggagaagaaaggcaatatgggagagggtaaaagagttcaaggaattatctggagttgacatctcaagccccattatctcacttgttgtagggaatcaagagaaagccctcaaagcgagccggttcacacacatctctctctgtcttctatttccttactcacacacacacatacacttgtaaaactgattggtttttctcattgttgcaggtatctattaaaatcaggcttccatgtaatggcaatacgaccgcccacagtgccacccaattcttgcaggtaaacaaaaaaaaaactttaaaatcattttcttgtgaaatgaaaccatttcatcgtataaatttcagtaaaactcatcatgtatgttgttgtggaatacctacttcaggctaagggtgacactgagtgcagcacataccacagaagatgtgaagaaactcatcactgcgctttcttcttgtttggactttgacaacacagccactcacattccttcctttctatttcccaaattataaaacttctttctgttgtcgcaattattccaaagctctaattctaaaattgtttctgatattgtcagtgaaagaatcacttgaagtacagagttcattcattgtattgttgtaatccccactttgcaatgtactataacatctagattttccttgggccaacaaagcaaaagcccaattgataaaaagtatcacaagcccaaacggaaacttagcgcgggaaaaagagaaatctcatgtgtgtcccagggtttgtatcttttgcaactactctaaaatatacaccgtatttgtttgaaatggtaatcaatcccatgatcccatctaaaagaaatatcaacctaataccatatgagtggagaaagtattattagaataagatttttatgcaaaaccatatatttagaaatttcgcatacgttatgctatgttttctattaacataaacaaataaagaatgaatttcaaattttaaacaagaacatatttttagaaattagagatacacatattcatacgttacactctaagctttctaataactagcatgcttatatgttgatccaaataatatcataaaacagtttcaaaattgcttcttcttcttgttcatcattgcttcaaattcttagcttcaagaccaaaaatgttagacatctccaattatgtcttcttcttcttcacccttgtcacaattctcctatcatgtttggtttacatactcacgcgccacagtcacaatccaaagtgcgcgaacctccctccaggcccaaaaggttggccggtagttgggaatctgttacagttcgcgcgctccggtaaacagtttttcgaatatgtcgatgagatgagaaacatctacggcccaattttcacacttaagatgggaattcgaacgatgatcatcatctccgacgctaatctcgcacaccaagccttgatcgaacgtggagcccaattcgcaacccgacccgccgaaactccgacccggaaaatcttcagttctagcgatatcaccgttcattccgctatgtacggtcccgtgtggcgatcactgagacggaacatggttcaaaacatgctctgctctaaccggttaaaggaatttggttcaattagaaaatccgccattgataagctcgtggagaagatcaaatctgaagctaaggaaaacgacgggctcgtctgggttctaagaaacgctagattcgctgctttttgtatcttgttagatatgtgtttcggagttaaaatggaagaagaatcgattgagaagatggatcagatgatgacggagattttaaccgccgttgatccacgaattcacgactatcttccgattctaactccgttttacttcaaggagaggaaaaattctctggaacttcgccggaaacttgtccaattcgtcgttggattcatcgagaaacgacgattagcgattcgaaatctcggctccgataaaacggcgtcgtctttcgcgtatcttgatactttattcgatctcagagttgatggtcgtgaaacgtcaccgtcagatgaagatctcgtgacgctgtgttcagagtttctcaacgccggtacggatacgacggggacggcgatagagtggggaatcgcggagctgatatcgaatccgaagattcaatctcggctgtacgatgagattaaatcaacggtgggagatgatcgaacggttgaggagaaagatttgaataaaatggtctttttacaagcttttgttaaggagcttctccggagacatccaccgacgtatttcacgttaactcacggcgttacggagccgactaatctcgcgggttacgatattcccgtcggggctaatgttgagttttatcttcccggtataagtgaagacccgaagatatggtctaaaccggagaaatttgatccggaccggtttataacaggtggagaagacgccgatttaaccggagtcgccggagttaaaatgatgccgttcggaattggccgtcggatttgtccggggcttggaatggcggtcgtacacgtggagctaatgctgtcgaggatggttcaagagtttgagtggagctcgtacccgccggagagccaagtggatttcaccggcaaattggtgttcgcggtggtgatgaagaatccgttgagagcgagggttaaagctagggtttaagtttcgttgattccacgtctttgattcttttaacttgaccaaacccggttcaagagagaaaattcgcattttgtctaatttgctttggtttaattaaatgttttcctactcttcaattactaaatagagccatgcatattcgatttacgtttgttttagttggtttgcattattgcatgtcttcaaattaagctagtataaactaataatttagatggtttgactaaaccaaataactgtttattactgaaccaaattttcgattaaatcactctttcagaaaaggaaatttctttgacaaaggaaaaggaaacatatacttattggattaattagtgattagtagattatcacgaaaaggaaatagaatcgatggtttaactgaaccagccatggttagtttcaggtgcttttcgagttaagttttcaaaaaaggaaatcgattgtacttagtttggttcgtctcaggcggtttaagagtcattactttcaaaaaaggaaaataattatacttagttcgtttaatcactgattagctaattgtcagaaaaaggaaatatagtcgattgattagaaacgagtaacaacacagagtctatatatacacgattagaaacagagagtagccatatcatattctttcgcaacaggctaacacaaaaatctctctgtctttttctccttctctttctttgtctgtgaaatcgtgaacacagaatggggggcgtgaagagaaagatttctatagagctgatagagaagaaagattcaagagctgttgctttctcaaaacgcagtaggggtctatatagcaaagcctctgatctttgtcttctctccgatgcacaaattgcgatcatagccactccggtctcttccaaatcaaacgtttctttctacacctttggccattcctctgttgataacgttgtagccgctttcctcacgaatcagcgtcctcgggaaggtctagggttagactattggtgggaagatgagaggctttcaaaatcagaggacctggaggaactgagagacgcaatggactcgatgtcgaagatgttgaaagatctgaaggatttgcagaatcaacgagattgtgaggaggacgtgaagaagaagggtgttttacacggaactcatcaaaagcaaacctttaatcctgaatcatgttctgtgaatttcgatgggtttaacaagaacactgaagaatttgatcttgatgaaatatttgattatgtgtcaacagctgaagctctatcgatgaacttggacatggacgatgtctctgtggtgaccacgaatcaaaaccccgtctctgcttctgaaactgttgaagatagagaattggttgttcacaaaaatatggatgaggacaatatccacgtgtctgatatggacgacaaggatacgatgctaatgatttctgacaagaacaatgttttacctgaaaacttggatgaattcgatcaagagctagatcttgatcagctacttgattttgagacaaactatgaaagccttttgaagagttgtgagatggaggattatgcctcgatggtgactacaaagcaaaatctgtgctcaaatcctgaagctgttgaagatggaggattaatgattcaaaaagatttaccggaggataatctctgcttttctgattatttcagtgacttacattgctgatatttgaaactccctccaagataacagatgtttcaaggattgcttcggtttattttcgttagagatactttactcaaggaaggttccggtttgacttcaatcaattttccatgcttcattggatttctgggatgttgatctaactcaaaccggttcagttttggtttgccttaactaatgaagaaaccatccttttttcttttaagttttgtagtcttttctatcaacttgtcttgttttatatgtgtgatgttttcttcttatattaaaagtttaaaaccaatgagtcttactactctttttttcttgtatcaacttgtgtcttgtttaactgtgggatgttttctaatctaaccaacaaataatattaaaaccaatattgagtcttacaacagaaaacatctgtctgacaatctttgattaggaatgtctctgctttcttattaagtaccaaaaccagtcatcatctaggccagtattttgtgattacttcataacttgaaaacagataaagctttaccaaaatagagcagaatggctccataacaaattgcagaagaaccggtgctaattgattccattcaaaacgtgatgcagagaagtgtttatatggcggggaaagtttgggaaaaaacaccttgtaattggttcaaatgcaatgtagggggagcttgggtgttaagaaatgagttgggtggttttacttcacagtcgccgggcgatatttagtataagaagtgtagaggatgcaaagctaagagttttgctttggtctattgaaagcatgtcaagtcacaaagtcatgagagtttttttttgcttgccaagaaaaaggattggtagaagcagttaataggccgcaggcttggcccctcttttaaagctcaatcttttgctttaaagagttttttgtttagttccaggtgtggaagatgatggttttggaaacttttggtgcaaacaggggagcaaatcttattgctaaaagtgtgacaggagatctgagactgcagtcgtatgtggcaatgggtcctccaagctgcctggtaagagtttttgaggaagaaaggacttgcatctctgtttgttaatgcagtttcgtttcatgggctaaagttctttttgtgaactgatatttgcagtccgttgttgagtttgtttagtgtagggagtttgttttgtctcctgtagtttagaccctcacttttttgtagctatatggctttatcagtgtataaaagccagatgatgagaaaaagaaaaaaaaattgcagaagaacccttaatttatgacatatataataccactcatgaagaacagttgaaatttctgacaagtaaattgaattccaaccaagtcaaacacgtttattcgagtttcttttttgttttttctcaaagtataataagatgttgaattctgattagctgaaagatgacacgattttattcattgtttttgggtctaccaaaattggaaagtgagtaaataaatggctttctgcgacatttggctttcccatgttactaatttattaaaggaacagttgaacgcaataaataaaaacaaagacatgcactgatcacacaattcctagactcccaaattatcattctaacaggtaaatttcacggtgatatgttaaatatgtagcctgtaggtccaaatacaacaactactttttttgttttttttctattttcattatacatccttattgttatctaattagtaattatcagcattaaagatctgggacactcctgtttaaagctttcatcgactatttgcctattagttgtaacaatcagcctatggttataggtgaatctagactcatataatcaattctgacttaaaccttgtttgaaagtaaagagtgtttctaaacggttacctatagttgtaaacattcatgtctataataaaaacacaccaatatcaatttacacatagccaaataagagtctcaaatgagtcaaaatattaaaactgatttatgaaaacacaaattttataaaaataaatggtgaacaaatgttaagattagtgaaagttcctattttgaaaaacaaatgtctttgaacccaattaatatgccttgtaaaccagtccatagtatcaaactccaaaaaaaaaaagttacttttaatttcaaatatttacataaaattttgcatgcactactctgttcttatataatcttcgtcttcttcttctctgcttgagtcaacaagaaataaacagagctaaaatgtttcctctaatctccttttctccaacttctcttgatttcaccttcttcgccattatcatctcaggtttcgttttcatcatcactcgatggaattccaattcaaagaaacgtttaaaccttcctccaggtccgccaggttggccggtggtcggaaacttattccagttcgcgcgctcaggtaaaccgtttttcgaatacgcagaggatctcaagaaaacgtatggcccgatttttacactgagaatggggactcgaacaatgatcatcctctccgacgcaactctagtccacgaagctt

SEQ ID NO: 1404 - DNA, 83485 bp, Arabidopsis thaliana
gagtaatagtgagagagatcttttgggcaggagtgaggtgacttctcctttagcaccagttatcagaaacaccaccggtaatgtagagccggtcaatggaaattttacttcagatgtgggtatggtaaatggtcctttcacccagagtggcacttctcaagctggctataatgagtttgaattggatgacttgttgaatcctgatcagatgcccttctccttcacaagcttgctgagtggtggggatagcttattcaaggttcgtcaatgtgagtgatcaaatctattttcagtttttttttttccctttcttccgttcttgcagtacttagagtagaacatgaattagaatatcttaagaaagtcatggttttgaacagatggacctccagcgtgtaacaagcctctttacaatttgaattcaccaattagaagagaagcagttgggtcagtctgtgaaagttcgtttcaatatgtaccgtcaacgcccagtctgttcagaacaggtgaaaagactggattccttgaacagatagttacaactactggacatgaaatcccagagccgaaatctgacaaaagtatgcagagcattatggactcgtctgctgttaatgcgacggaagctactgaacaaaatgatggcagcagacaagatgttctggagttcgaccttaacaaaactcctcagcagaaaccctccaaaaggaaaaggaagttcatgcccaaggtggtcgtggaaggcaaacctaaaagaaagccacgcaaacctgcagaacttcccaaagtggtcgtggaaggcaaacctaaaaggaagccacgcaaagctgcaactcaggaaaaagtgaaatctaaagaaaccgggagtgccaaaaagaaaaatttgaaagaatcagcaactaaaaagccagccaatgttggagatatgagcaacaaaagccctgaagtcacactcaaaagttgcagaaaagctttgaattttgacttggagaatcctggagatgcgaggcaaggtgactctgagtctgaaattgtccagaacagtagtggcgcaaactcgttttctgagatcagagatgccattggtggaactaatggtagtttcctggattcagtgtcacaaatagacaagaccaatggattgggggctatgaaccagccacttgaagtgtcaatgggaaaccagccagataaactatctacaggagcgaaactggccagagaccaacaacctgatttattgactagaaaccagcaatgccagttcccagtggcaacccagaacacccagttcccaatggaaaaccaacaagcttggcttcagatgaaaaaccaacttattggctttccatttggtaaccagcaacctcgcatgaccataagaaaccagcagccttgcttggccatgggtaatcaacaacctatgtatctgataggaactccacggcctgcattagtaagtggaaaccagcaactaggaggtccccaaggaaacaagcggcctatatttttgaatcaccagacttgtttacctgctggaaatcagctatatggatcacctacagacatgcatcaacttgttatgtcaaccggagggcaacaacatggactactgataaaaaaccagcaacctggatcattaataagaggccagcagccttgcgtacctttgattgaccagcaacctgcaactccaaaaggttttactcacttgaatcagatggtagctaccagcatgtcatcgcctgggcttcgacctcattctcagtcacaagttcctacaacatatctacatgtggaatctgtttccaggattttgaatgggactacaggtacatgccagagaagcagggctcctgcatacgattctttacagcaagatatccatcaaggaaataagtacatactttctcatgagatatccaatggtaatgggtgcaagaaagcgttacctcaaaactcttctctgccaactccaattatggctaaacttgaggaagccaggggctcgaagagacagtatcatcgtgcaatgggacagacggaaaagcatgatctaaacttagctcaacagattgctcaatcacaagatgtggagagacataacagcagcacgtgtgtggaatatttagatgctgcaaagaaaacgaaaatccagaaagtagtccaagaaaatttgcatggcatgccacctgaggttatagaaatcgaggatgatccaactgatggggcaagaaaaggtaaaaatactgccagcatcagtaaaggtgcatctaaaggaaactcgtctccagttaaaaagacagcagaaaaggagaaatgtattgtcccaaaaacgcctgcaaaaaagggtcgagcaggtagaaaaaaatcagtacctccgcctgctcatgcctcagagatccagctttggcaacctactcctccaaagacacctttatcaagaagcaagcctaaaggaaaagggagaaagtccatacaagattcaggaaaagcaagaggtaactaatgtattctacaatctctgtgatataattttgagattttagtaactgatgtgtccaaaccagctccttatcactgttggtgcgttgtataggtccatcaggagaacttctgtgtcaggattctattgcggaaataatttacaggatgcaaaatctgtatctaggagacaaagaaagagaacaagagcaaaatgcaatggtcttgtacaaaggagatggtgcacttgttccctatgagagcaagaagcgaaaaccaagacccaaagttgacattgacgatgaaacaactcgcatatggaacttactgatggggaaaggagatgaaaaagaaggggatgaagagaaggataaaaagaaagagaagtggtgggaagaagaaagaagagtcttccgaggaagggctgattccttcatcgctcgcatgcacctggtacaaggtgaagatccacttctcttctcaactccatttttattcacacaaattagtagaatactcaaaaatgatgttttgtttgcaaaattttaaaattcactagttaaccatgtcaaataatattcataatgcatcttgtgaagaacaggtgtgcatttatggtgacagctgaatggtttatgtgcctattatttcttttactgctatagatgaccaattgaacttaaacgtttacaggagatagacgtttttcgccatggaagggatcggtggttgattcggtcattggagttttccttacacagaatgtctcggatcacctttcaaggtatatgagttgccttaataaattgagttccaaaacatagaaattaacccatggtggttttacaatgcagctctgcgttcatgtctctagctgctcgattccctccaaaattaagcagcagccgagaagatgaaaggaatgttagaagcgtagttgttgaagatccagaaggatgcattctgaacttaaatgaaattccttcgtggcaggaaaaggttcaacatccatctgacatggaagtttctggggttgatagtggatcaaaagagcagctaagggactgttcaaactctggaattgaaagatttaatttcttagagaagagtattcaaaatttagaagaggaagtattatcatcacaagattcttttgatccggcgatatttcagtcgtgtgggagagttggatcctgttcatgttccaaatcagacgcagagtttcctacaaccaggtgtgaaacaaaaactgtcagtggaacatcacaatcagtgcaaactgggagcccaaacttgtctgatgaaatttgtcttcaagggaatgagagaccgcatctatatgaaggatctggtgatgttcagaaacaagaaactacaaatgtcgctcagaagaaacctgatcttgaaaaaacaatgaattggaaagactctgtctgttttggtcagccaagaaatgatactaattggcaaacaactccttccagcagctatgagcagtgtgcgactcgacagccacatgtactagacatagaggattttggaatgcaaggtgaaggccttggttattcttggatgtccatctcaccaagagttgacagagtaaagaacaaaaatgtaccacgcaggtttttcagacaaggtggaagtgttccaagagaattcacaggtcagatcataccatcaacgcctcatgaattaccaggaatgggattgtccggttcctcaagcgccgtccaagaacaccaggacgatacccaacataatcaacaagatgagatgaataaagcatcccatttacaaaaaacatttttggatctgctcaactcctctgaagaatgccttacaagacagtccagtaccaaacagaacatcacggatggctgtctaccgagagatagaactgctgaagacgtggttgatccgctcagtaacaattcaagcttacagaacatattggtcgaatcaaattccagcaataaagagcagacggcagttgaatacaaggagacaaatgccactattttacgagagatgaaagggacgcttgctgatgggaaaaagcctacaagccagtgggatagtctcagaaaagatgtggaggggaatgaagggagacaggaacgaaacaaaaacaatatggattccatagactatgaagcaataagacgtgctagtatcagcgagatttctgaggctatcaaggaaagagggatgaataacatgttggccgtacgaattaaggtaaatctactaatttcagttgagaccctcatcaaatctgtcagaaggcttgaacatcagtaaattatgtaaccatatttacaacattgcaggatttcctagaacggatagttaaagatcatggtggtatcgaccttgaatggttgagagaatctcctcctgataaagccaagtgggtaaatcacatttttagtgactgcaacactagcacgatcgatttactcaacaattacgtcaaactgagtattaacaagttgctcatgaacatttcacagggactatctcttgagcataagaggtctgggtttgaaaagtgttgaatgcgtgcgactcttaacactccacaatcttgctttccctgtgagtcagactattccattatctactaaaaacttagaataactccggctaactaagctggaacttgtattgatgatatgaaggttgacacgaatgttggaaggatagcagttaggatgggatgggtgcctctacaacccctacctgaatcacttcagttacacctcctggagctgtaagtttctttttgtttgtcatctaaacaacgaaatttttatgcaagtcataaccatgctgtgttttcacagatacccagtgctcgagtccatccaaaaatttctttggccaagactttgcaaactcgatcaacgaacactgtatgctcataaactctaacaaatcatctgtctgaaaaaccaatatttctttggtagaattctattgtcattactcattactaacagcgaaattaattaacgttctttttcttactcaggtatgaattacactaccaactgattacgtttggaaaggtattattgctctaagctttgaatttatcatatggtaatttcaagcattgtaggcacctgatcaattatgtgtctaaatcatgtgaattcatgtcaggtattttgcacaaagagtagaccaaattgtaatgcatgtccaatgagaggagagtgcagacactttgccagtgcttatgctaggtaagcaagctttcatgtacttatatgcaataattaaagataaaatttaggattatgggtaagtaacaaaaaattaggctcagtttcatggtagctagctggaaatagtattacaagaacaacataaagatcaaagacagaatcatggatccatatgcactatcattttagctcttgtaatccatacatgaacactatatgccaaagtagggatttcaaatatgagattcgatgactgatgccattgtaacagtgcaagacttgctttaccggcaccagaggagaggagcttaacaagtgcaactattccggtccctcccgagtcctatcctcctgtagccatcccgatgatagaactacctcttccgttggagaaatccctagcaagtggagcaccatcgaatagagaaaactgtgaaccaataattgaagagccggcctcgcccgggcaagagtgcactgaaataaccgagagtgatattgaagatgcttactacaatgaggaccctgacgagatcccaacaataaaactcaacattgaacagtttggaatgactctacgggaacacatggaaagaaacatggagctccaagaaggtgacatgtccaaggctttggttgctttgcatccaacaactacttctattccaactcccaaactaaagaacattagccgtctcaggacagagcaccaagtgtaagctaatatctcctcctatattttatcttccatataaattttggggaaaaaatcgctctccatctggttttagaacatgcgggtcagccagggttatggcatttttatatatttcaccgatcggcccgagctggctctggttgactcgtatgccaccctgcattgaacaaaccagtaggagacaagcaagcaaaacgttttaagataaggtctatggtaaaatgacaaggtaactgataaatgtgtcgtctatttgcaggtacgagctcccagattcacatcgtctccttgatggtgtaagtcaatttttaactctctctatactcgagttgtttcacttgagcaacactgtttaaaagtcctcatttgataaaataacagatggataaaagagaaccagatgatccaagtccttatctcttagctatatggacaccaggtgagaataaaactgcaatgtttcattcatgtgtctacagtatcaaagaaagtacagctagagctaaaaagcatttgaaatagagtcggttaaatatgaaagtttgaatctgtaaatgaaagccggaacgtagcattggtggatgttatatgtaaattagtttttgagattggtctaatgtagttgtttgactgccaggtgaaacagcgaattcggcacaaccgcctgaacagaagtgtggagggaaagcgtctggcaaaatgtgctttgacgagacttgttctgagtgtaacagtctgagggaagcaaactcacagacagttcgaggaactcttctggtgagattatcttgatcttttgtgttgctcatgaaaaggagaagtgagaatacaagtttgctaatatcattttttcgtcattcacagataccttgtcggactgccatgagaggaagttttccgctcaacgggacatatttccaagtcaacgaggttagatgaaataaaactcaaacagacagacgaaacattatttctgtttagtgttggttctttatcctccttgccattttttatcttgcagttatttgcagaccacgagtccagtctcaaacccatcgatgttcctagagattggatatgggatctcccaagaaggactgtttacttcggaacatcagtaacatcaatattcagaggtaaaaacattcgtaatagagttagttaatcaaatgtccaaaacacaagaaagcttcaccgtccaatacacaagaaagcttcaccttctctttgccaaaaaagatcttagaatgttttgctgaatttgtgcaggtctttcaacggagcagatacagttctgcttttggaaaggtaaacgttaactttcgacccagagaaatccggaaaatctattgctttgttctgatcaatacgttaaacatatacacacacactttacacttaggaccaatactgttctgatctgtgatagaaactggtaaacatctaacaattatgattgcaggattcgtatgtgtccgtggattcgaacagaagacaagagcaccgcgtccattaatggcaaggttgcattttcctgcgagcaaattgaagaacaacaaaacctaaagatgactggaagaaagcaaacgcattgcttctctgctctcctctatttaaagccaggaaaagtcccatttagacataataacaggaatccaaataggctattttctctttctttcttatttcattcatagagcagaagcgacacaaaaaagttttttgggttatttattttctctctaacaaatttgtagcgttttgggtctttttctggctgtcactagcgtggcaaatccaatgtctgcgcacacttaggcgcattgtcaataaaatttctccggccaccggagtgtttagcatcttttaaccggcggctaatgcgaatatttccggtaacacatattccttattctatgttgggttttgtgataacggcagtgggccttactagacaatgatcatcaataaaactaacacaaagttgaatgctacaaagtagaaagtgaagaaaaaataatatagacattgccgaatgccaaccaaaaagaaaagcaaaatcatcaaatcgaacaaagtatttttataattactctcgactcttgagcataataatctctttgattaagcatgaaacattgtttttaataaaatactaaacatgttatatgttaagaaaaattgaattatttttgtaacatggatataacttgaaaaaacatgtgtgtgaagaacagaaaagattatataataatatggtagattaaaaacattagattatacgaggagcaaagtagttagcaccagcaaaaactcacatactcatgtttagcatgtgcccaacacaacacttacaccttttgggcctcacgaatggccaagtaggtgagagagaatcactgttatttacctttttgccctcatgtatattctctcgttaaaagtatctgaaccaatgattatccgccacgtagatactctctgggtgcaccaagttgcaagagtagcatctaaaccaatcactttgaatatatccaagatgccatcccggttcaagtttttatcaagagtaaaagttccattttcatttctcataatcagattcgtattcacgcgcctattatctcgaacttatccaacacgcgcgtttaatcaaccgttggattctcaatggacggtggattaaattagctgaaaagtaaagcggtgcgttttacgcgcttcttctggctagccgccgcacgtgtcatgcacgtgatagcgcacgttagctttgaccattgtcttttgttctctattagttttttaacacacgcccccttattcgatttctcacccacccaaagccactcactctctcttctctctctctgaagcgatgtcatcgacgtttcgagctccggcgggagccgctactgtgtttacggcggatcagaagatcagacttgggaggctcgacgctctgagatcctctcattctgttttcttaggaagatatggacgcggcggcgtcccggttcctccttccgcttcttcgtcgagttcttcgcctattcaagccgtctccactgtaagattcgatacctgctcttgatttattatagttacaaggagttttctgcttatggtcgtgaaaaattcatgagatgctttttgaatcgccttcacgaatattcttaaaaaatttatgttatctgagattctgattattatcttagtggaaatgattactggattatgataattgatgcagctgtatcgtgaaaatcattatttattcggtaattcatagcttttcatattggtgattaatattttatgaaattgagtttaggattaaataagatatagcagtgtgagagagagagagattcagtgatgcgttctcatgtttgattttgtttttttgtttctttttttagcctgcgaagcctgagactgcgaccaagcggagcaaagtcgaaattatcaaggagaagagtaatttcataaggtatcctttgaacgaggagcttttaacagaggctccaaatgtcaacgagtcagccgtgcagcttatcaagttccacggtagctaccaacagtacaacagagaagaacgtggtggaagatcttactccttcatgcttcgaactaagaatccatctgggaaggtccctaaccagctctatttgactatggatgacttagctgatgagtttggaattggtactcttcgtttgaccacaaggcagacgtttcagcttcatggtgttctgaagcagaatcttaagactgtgatgagctcgattattaaaaatatgggtagcacgcttggtgcatgtggtgatctgaacagaaatgttcttgctcctgctgcaccttatgtgaagaaagactatctctttgcacaagaaactgctgacaacattgcggctcttctttctcctcaatcagggttctattatgatatgtgggttgatggagagcagttcatgactgctgaacctccagaggtagtgaaggctcgaaatgataactcccatggaactaactttgtcgactctcctgagcccatctatggcacccagttcttgcctagaaagttcaaggtcgctgtaactgttcctacagataattccgtcgacctcctcaccaatgacattggcgttgttgttgtttcagatgaaaatggggaaccacagggtttcaatatttatgtaagttgacactcatttagcctaatgtgctattatatatatttagtgtcaggcttgtttgcccgccttttctttcagtattctttttctggatactttcttggttttaaactaatgatgataatgactcatcttgtaggttggtgggggtatgggaagaacacacagaatggagtctacttttgcccgcctggcagaaccaataggttatgttccaaaggaagatattttgtatgctgtgaaggccattgtagtcacacagcgagaacacgggagacgagatgatcgtaaatatagcagaatgaaatatttgatcagctcctggggaattgagaagttcagagatgttgttgagcaatattatggtaaaaagtttgagccttcccgtgaacttccagagtgggagttcaagagttacttgggatggcatgaacaggtattgttactaaaacccttttgaaaattgcgtcactttcagaactttatagcatggcttaatcaataaaatcttatcgtcgttgtgtactgatagggagatggtgcatggttttgtgggcttcacgtagacagtggtcgtgttggaggtataatgaagaagacgctgagagaagtaatagagaaatacaaaattgatgtccgcatcacaccaaaccaaaacattgtcttgtgtgatataaagactgaatggaagcgtcccatcaccacagtacttgctcaggccggcttactggtaagcagttttatttgacccataaggtatgaaaatctaatagctattgtgtcttaagctgagcaaaccattgcttatttgtgcagcaacctgagtttgtcgacccattaaaccaaactgcaatggcttgcccagcttttcctttgtgccctctggcaataactgaggcagagcgcgggatccccagcattctaaagagagttagggcaatgtttgaaaaggtaagatctctctgtgcacttatctaatcttgtgccattacaggcatttgatattgatgtgcaaaacttcttccttgtatcaggttggtctggactacgacgagtctgttgtgataagagtaaccggttgtccaaacggctgtgcaagaccgtacatggctgagctcggtctagtcggggatggtcccaacagctatcaggtacggttggagcacaagctcttgttactagtgatgagacagtatagtagtaagcaagcaggctaatattctgagttgttgtcggttgtgcaggtttggctaggaggaacaccgaacctgacccagatagcgagaagtttcatggataaggttaaggttcacgacttagagaaagtctgcgagccattgttctatcactggaaactagagaggcaaactaaagaatcatttggagaatacacaacccgcatggtaagtatcacatataacttctctttaactctctcactgtggcttgaacatttatattgaagaagaagaaaaaacaaatgactgtgttttttaactttaacaatggtaaaattgcagggattcgagaaactgaaggagctgatagatacatacaaaggagtttctcaatgagcacaacagagatcatctttcgttttataattcatgtaatgtaatgtctctgtctgaactgttactcttcggtaactctgatggagaacttgttctcgttttggtttgattttgtaccctcttttttttttttgtttttttggattgctttgtctttgattggataatgaagcattactgtatcaaggctaattagcccatcaataagcctttttaaagctctggatatggaaaagtcagaacctctctctcttatctctctaaattttagagagagagagattttgttcgatgttttgcatgctttaccagcttatgaatccggatgtgatccggttttgtcgatctatctcgctgtcctatctcgccgtccggtgtatccggtgttgtttacggctatcccgttgccgttctgtttgtttcaccgaattgatttgggaaacaatttgatatcagttttttcttcttttctaactggaaattttcatggccttctctcgatccgttccaccaccatccacaatcaggtaagtgttttggtgtttcgattgggcgactgttttagtctcatccacatgaatcaatatccagatttgggcgaattctgggttgcttgactccttccaaccgttatagttgaaacggtccggcgtttttgacggcttcaatcacctcatttgaggtccgtcttgccattccaggaagtcaagatatcaatttccgaagtctattcttattagcaagtgatgacaagagatcagaagcttcacctcgtggttgattgtttgctgacaacttctttcatgcttttgttctcggaaaagatccagtgatgagaagagaaagaatttgaagattaaattgaatcttttatctttttcggtttaatagttgtttgtttttataatccggagatgtttccggttgttcactcgccggaaattgtgccggcttctgtctgcatattttgctgaaggggttgtgggtaccggtttactaggttatccggttcacccggtttgtaagattggtttaatgaataaaaatcccttatgagaaaaaaaaaaaagctctggatatcatttgattactcctctttctaagatggcttcttatgctttttctttctgttgttgctcagttgctctgtttaaatatggactgtttttttaacccacaagtaaaacattttgagaaatttacacaccactgtaattttttaatgtccacaattatttaaaaaaacatattcacacataaaaaacagaatggacgggaggggtataactggaaattttttcacatcgattaaattggttgaaaacctaatcgccttaaaccctaattgtatcatcctcttccttgcgttctctctttctctctctcgccgacgacgaaaacatgggtgccaaggcgaagaaagctttgaagaagaacatgaagaaggttgctgcttcggcttcttcttctcagctacctcttccccagaacccgaaaccttcagctgattttttggtatttccttcgatactttctcttactaccaccattgtttcgatttcgtatcagactctttagggttttacattgaatctctctgtatgggtttttgttgatagccactagaaggaggtccagctcgaaaagctccagttaccaccccacctcttcagaataaagctactgtgctatacatcggtagaatccctcatggcttctatgagactgagattgaaggtataaatttacaccctttattattgtgtttgctcaatttaatgccctttgttgtcacaaacttgctaatatgaataaacctttttattatctatctatggtttatgtgtttgataatctggttttcctttctgggttatagctttcttctcgcagtttggaacagttaagagagttagagtcgccagaaacaaaaaggttatacattgattgatactttattttgtttgctcttgtttgatacgatgtgctctttcttaactctttgaatttgtattcgtcttaacagactgggaaatcaaagcattttgggttcatacagtttgaggaccctgaggtatactttagattctgtataaaattggtgaaaccgttgtgtgctatatatatactctagattcaattcttgacatttttatttggttctctgcaggtggcggaaattgcagcgggtgcaatgaatgattatttgttgatggagcacatgcttaaagtccatgtcattgaaccagagaatgttaaacccaatctgtgagtgattttaatcgactttttttcgtagtgatcagggatcttctttgcaaatagttagttggcatatctaattgtgtaggttagctattttacttggctgcttatgtactttgtgctatattgttgaatgaaagagctctatataacaatatactatctcgtgtggtttagcgcaagctttgaagtacaatgttctatggtttacagagtgagacttaatgacatttgagtcataggatgatactagataggatgtgataaaataagtgaggataaaagagagtttattgaaagatcgttttcttggctgagatggttttatttatgagtcataaaattagggtaaagaaaatgtgattcttgtcccctaccttggtttctaatgactccatactctaaaagatgtgcgagactctctagtgtttccagaagagaacatgcatgacctattttgagaattgttcttttcaagtagttgtggatcttaatgtatctatgtcctgaatgttataggtggagagggtttaaatgtaacttcaaaccagtggattcggttcagattgagcgaagacaacttaataaggttattctctccacttttcttgttatcaatatgccatttctcttgaacaagtggctctaactttgatttatgtcactgttgtatacaggaaaggacattggaagagcataggaaaatgttgcagaagatagttaaaaaggatcagaaaaggaggaagagaatcgaagccgctggaatagaatacgaatgccctgagcttgtaagtttccgattacacaattctatacactacatcttcaacattgaactaataactgcatgttttgtgtcactgcttcaggttggaaacacacagccagtcccgaagaggatcaagtttagtgaagaagactaaaagctgaagctgaacaacacttttccgataaccttttttgaatagaaatctgttctgttgtactcttgatattggatcaataactaaactttaaagtttgcaatgaaaacttctgtttcaatgattcagattttctgtatagcatcaagatactttcccgagacagcgggtgttagattctctctgttgaaaccgctctttctaggtgcaacggttgcgatgagaacaaaattctcaccatttcctacatcgatctcatacaactcggcaaagacatgtctaaactggtcttgaagctcttggtaaaatgtcttgttcggaggaatgacattgataatgaaaaccccagaaggaacaagaacagttcttgcagctagcaacacatctttagccacaaactcaaccggaggagcagtcatgccgtgaattggatcagtagagtccagatcaaccatcaagacatcaaatctggcatcatcatcacagcttttagaaagtctctttaagaactcaataccatcttcaacgtgaacacgagctaagctttcctctaacccgaagtattgccttgcaatcctcaagacttcaggatctatctctacgcctgtaacttcgaaccctaactgtagccttaagaaacttagcaatccaccacctccaaccccaatgcacaatgcctttggtttagatttgagatgatcatatacatcagaaccaatcaagctaagacttgccaccattggtgccaagtaaggatgcacaagttccgtaagatcaagcttgaactctgttcccattaatggcagagaaggattcgaacaacttctgggaatgattttaatggcagattgaactaaatttggcattctcttaaacctcaatctcctcctaaattctctaactccatcatcgatctcaatctctacatcttcaattaacatttcaccaacgaaaggcccgacgcatttttcaatctctacactggagacaacattatcatcgtaaatcagaaaaggcacatcgtcgatttcttctcgtgttagggttttaggtaacaaagctaccacaagaggtttcaatcttatctcgagtttctcagattcgtcgtcttcgccgttcggtcggtgataaaccgcaggtaaatcagagtcagtatcgtgatcatcaccgatcaagatcaatcgagagatttctggcatgttaaggagaagctgtaattgaccggactcagtggagaagatccaatcggattctcggtgcttggggacgagaatggcggcgactcggggaggagaagactcagtggaatgaacaggcgagtcgaggacggcgacgcggaggagatgaatcggagaattagggttagggatagtgaaagagatgaaacgagaaggagaggttttctcgaagattctcacatcaagcgccatttccttgattttgatttcaccatcatccatcttcgtctttttatgatgctgcttacagttaaccgtaataaaaccaaaccagaaataaaccgataaaaccggaataaaccaaaccagaacaaaccgatcatgtgactttcacgtgtttcaactccgaaattttcaatttttcatttactcatcttcttcttcttcgtcctgggcttttcatctccaggcctctctcatttccttctctgagtctacaaacatgtagaagcaggtgttttaattacgtcatagcagtaggagaagaggctttaagtcctcttctttctctagctaccgaaccactttttaaaattcgcccaaatcacaattctgtttgcacttagaatggcggatcattcgtgggataaaactgtggaagaagcagtgaatgtgcttgaatccaggcaaattcttcgatctttgaggcccatttgcatgtctaggcaaaacgaagaagaaatagtgaaaagcagagccaatggaggagacgggtacgaggtgttcgacggtttgtgtcaatgggatcggacttcagttgaggtgtctgtctcgattcctacatttcagaaatggcttcacgatgaacccagcaacggtacgtttcatttctttcctgatatttttttttgccgagagtttcggagtttccaaagtttggtgtttttttcttcctttgaactcaaatgcgatttcgttttcatactttagacagtgaattatggctttatgcaaagtgtaattgatggttataatttgggtttagtgaagaagctgaattgattaggcaaaagactgggtttttatgttgtatcagtttcacgttgacaggagaagagatttttagtggagatgcattagctgagtgtagaaaagggagattcaagaagctgcttttgttctctgggaatgattatttgggtttgagctcacatcctacaatatcaaacgctgctgcaaacgtatgttttcaaaacaatttcatgtcaacgaacttaagtatagatttcttccactgtcttatgttttttcttcaaggcaggcagtcaaagaatatggtatgggacctaagggttctgctttaatatgtggctataccacttatcatcgtttgcttgagtctagtttggcgcaactgaagaaaaaagaggtgaaaaaacgtccttgaatgattttagatggagtcacatgctattggtaagaaatctcaaactgagacaaatgatgtgtctattatctttacaggattgtcttgtttgtcctactgggtttgctgccaatatggctgcaatggttgcaattggaagtgttgcttctcttttggccgctagcgggaaacctctgaagaatgaaaaagttgccatcttttctgatgcgctgaatcatgcatcaattattgatggtgtccgtcttgctgaacgacaaggaaatgttgaagtttttgtttatcgacactgtgacatgtatcaccttaattcgttattgtaagtacttcacttccccaacttctcccttgatatttgggttttccattaatgtcatctataactgtttgtatagatcaaattgcaaaatgaagaggaaggtcgtggtgactgataggtcagtatcttgtgcaatatactgctcttgtcgttaagcatattgttcttgtacttatttaatgttgtagtactttcttatctgatcataattttgtccttttttatttttcctattcatagtgctagctacaatggctaaaccatgtctctatgcttattaacgcctttggtggtttcagactgtcgacatatgaaagaagttcttatggttgaatctcatttttggttttgacagcttatttagtatggacggtgactttgcaccaatggaagagctctctcagcttcggaagaagtatggcttccttctagttattgatgatgtaagttgatcgaaaatgttcaagtaaaattttagtatgttggtgtcaactactacttttgctgaagaaaaataatattgatcggtcaggctcatggaacatttgtctgtggagaaaacggtggtggcgtggctgaggaatttaactgtgaagctgatgtagatttatgtgtgggcactttgagtaaggcagcagggtgtcatggcggtttcatagcttgcaggtactcattcctatgtgatctgaaattcgtgaacccagaatttgttttagtggtggttaagatccctatagtatacggtccatgaaagcttatgataaagtgaatcaataatcagtctgtatcgtctcaatatctctataaatgaaacagagatttcaatgtactagtagactggtaacagcttaagtttgttgacggaaacagcaaaaaatggaagcaactgatacagtcgagaggtcgttcattcatattttcaacagcaatccctgtcccaatggctgcagctgcttatgcagcagttgtagtggcgaggaaggagatatggagaagaaaggcaatatgggagagggtaaaagagttcaaggaattatctggagttgacatctcaagccccattatctcacttgttgtagggaatcaagagaaagccctcaaagcgagccggttcacacacatctctctctgtcttctatttccttactcacacacacacatacacttgtaaaactgattggtttttctcattgttgcaggtatctattaaaatcaggcttccatgtaatggcaatacgaccgcccacagtgccacccaattcttgcaggtaaacaaaaaaaaaactttaaaatcattttcttgtgaaatgaaaccatttcatcgtataaatttcagtaaaactcatcatgtatgttgttgtggaatacctacttcaggctaagggtgacactgagtgcagcacataccacagaagatgtgaagaaactcatcactgcgctttcttcttgtttggactttgacaacacagccactcacattccttcctttctatttcccaaattataaaacttctttctgttgtcgcaattattccaaagctctaattctaaaattgtttctgatattgtcagtgaaagaatcacttgaagtacagagttcattcattgtattgttgtaatccccactttgcaatgtactataacatctagattttccttgggccaacaaagcaaaagcccaattgataaaaagtatcacaagcccaaacggaaacttagcgcgggaaaaagagaaatctcatgtgtgtcccagggtttgtatcttttgcaactactctaaaatatacaccgtatttgtttgaaatggtaatcaatcccatgatcccatctaaaagaaatatcaacctaataccatatgagtggagaaagtattattagaataagatttttatgcaaaaccatatatttagaaatttcgcatacgttatgctatgttttctattaacataaacaaataaagaatgaatttcaaattttaaacaagaacatatttttagaaattagagatacacatattcatacgttacactctaagctttctaataactagcatgcttatatgttgatccaaataatatcataaaacagtttcaaaattgcttcttcttcttgttcatcattgcttcaaattcttagcttcaagaccaaaaatgttagacatctccaattatgtcttcttcttcttcacccttgtcacaattctcctatcatgtttggtttacatactcacgcgccacagtcacaatccaaagtgcgcgaacctccctccaggcccaaaaggttggccggtagttgggaatctgttacagttcgcgcgctccggtaaacagtttttcgaatatgtcgatgagatgagaaacatctacggcccaattttcacacttaagatgggaattcgaacgatgatcatcatctccgacgctaatctcgcacaccaagccttgatcgaacgtggagcccaattcgcaacccgacccgccgaaactccgacccggaaaatcttcagttctagcgatatcaccgttcattccgctatgtacggtcccgtgtggcgatcactgagacggaacatggttcaaaacatgctctgctctaaccggttaaaggaatttggttcaattagaaaatccgccattgataagctcgtggagaagatcaaatctgaagctaaggaaaacgacgggctcgtctgggttctaagaaacgctagattcgctgctttttgtatcttgttagatatgtgtttcggagttaaaatggaagaagaatcgattgagaagatggatcagatgatgacggagattttaaccgccgttgatccacgaattcacgactatcttccgattctaactccgttttacttcaaggagaggaaaaattctctggaacttcgccggaaacttgtccaattcgtcgttggattcatcgagaaacgacgattagcgattcgaaatctcggctccgataaaacggcgtcgtctttcgcgtatcttgatactttattcgatctcagagttgatggtcgtgaaacgtcaccgtcagatgaagatctcgtgacgctgtgttcagagtttctcaacgccggtacggatacgacggggacggcgatagagtggggaatcgcggagctgatatcgaatccgaagattcaatctcggctgtacgatgagattaaatcaacggtgggagatgatcgaacggttgaggagaaagatttgaataaaatggtctttttacaagcttttgttaaggagcttctccggagacatccaccgacgtatttcacgttaactcacggcgttacggagccgactaatctcgcgggttacgatattcccgtcggggctaatgttgagttttatcttcccggtataagtgaagacccgaagatatggtctaaaccggagaaatttgatccggaccggtttataacaggtggagaagacgccgatttaaccggagtcgccggagttaaaatgatgccgttcggaattggccgtcggatttgtccggggcttggaatggcggtcgtacacgtggagctaatgctgtcgaggatggttcaagagtttgagtggagctcgtacccgccggagagccaagtggatttcaccggcaaattggtgttcgcggtggtgatgaagaatccgttgagagcgagggttaaagctagggtttaagtttcgttgattccacgtctttgattcttttaacttgaccaaacccggttcaagagagaaaattcgcattttgtctaatttgctttggtttaattaaatgttttcctactcttcaattactaaatagagccatgcatattcgatttacgtttgttttagttggtttgcattattgcatgtcttcaaattaagctagtataaactaataatttagatggtttgactaaaccaaataactgtttattactgaaccaaattttcgattaaatcactctttcagaaaaggaaatttctttgacaaaggaaaaggaaacatatacttattggattaattagtgattagtagattatcacgaaaaggaaatagaatcgatggtttaactgaaccagccatggttagtttcaggtgcttttcgagttaagttttcaaaaaaggaaatcgattgtacttagtttggttcgtctcaggcggtttaagagtcattactttcaaaaaaggaaaataattatacttagttcgtttaatcactgattagctaattgtcagaaaaaggaaatatagtcgattgattagaaacgagtaacaacacagagtctatatatacacgattagaaacagagagtagccatatcatattctttcgcaacaggctaacacaaaaatctctctgtctttttctccttctctttctttgtctgtgaaatcgtgaacacagaatggggggcgtgaagagaaagatttctatagagctgatagagaagaaagattcaagagctgttgctttctcaaaacgcagtaggggtctatatagcaaagcctctgatctttgtcttctctccgatgcacaaattgcgatcatagccactccggtctcttccaaatcaaacgtttctttctacacctttggccattcctctgttgataacgttgtagccgctttcctcacgaatcagcgtcctcgggaaggtctagggttagactattggtgggaagatgagaggctttcaaaatcagaggacctggaggaactgagagacgcaatggactcgatgtcgaagatgttgaaagatctgaaggatttgcagaatcaacgagattgtgaggaggacgtgaagaagaagggtgttttacacggaactcatcaaaagcaaacctttaatcctgaatcatgttctgtgaatttcgatgggtttaacaagaacactgaagaatttgatcttgatgaaatatttgattatgtgtcaacagctgaagctctatcgatgaacttggacatggacgatgtctctgtggtgaccacgaatcaaaaccccgtctctgcttctgaaactgttgaagatagagaattggttgttcacaaaaatatggatgaggacaatatccacgtgtctgatatggacgacaaggatacgatgctaatgatttctgacaagaacaatgttttacctgaaaacttggatgaattcgatcaagagctagatcttgatcagctacttgattttgagacaaactatgaaagccttttgaagagttgtgagatggaggattatgcctcgatggtgactacaaagcaaaatctgtgctcaaatcctgaagctgttgaagatggaggattaatgattcaaaaagatttaccggaggataatctctgcttttctgattatttcagtgacttacattgctgatatttgaaactccctccaagataacagatgtttcaaggattgcttcggtttattttcgttagagatactttactcaaggaaggttccggtttgacttcaatcaattttccatgcttcattggatttctgggatgttgatctaactcaaaccggttcagttttggtttgccttaactaatgaagaaaccatccttttttcttttaagttttgtagtcttttctatcaacttgtcttgttttatatgtgtgatgttttcttcttatattaaaagtttaaaaccaatgagtcttactactctttttttcttgtatcaacttgtgtcttgtttaactgtgggatgttttctaatctaaccaacaaataatattaaaaccaatattgagtcttacaacagaaaacatctgtctgacaatctttgattaggaatgtctctgctttcttattaagtaccaaaaccagtcatcatctaggccagtattttgtgattacttcataacttgaaaacagataaagctttaccaaaatagagcagaatggctccataacaaattgcagaagaaccggtgctaattgattccattcaaaacgtgatgcagagaagtgtttatatggcggggaaagtttgggaaaaaacaccttgtaattggttcaaatgcaatgtagggggagcttgggtgttaagaaatgagttgggtggttttacttcacagtcgccgggcgatatttagtataagaagtgtagaggatgcaaagctaagagttttgctttggtctattgaaagcatgtcaagtcacaaagtcatgagagtttttttttgcttgccaagaaaaaggattggtagaagcagttaataggccgcaggcttggcccctcttttaaagctcaatcttttgctttaaagagttttttgtttagttccaggtgtggaagatgatggttttggaaacttttggtgcaaacaggggagcaaatcttattgctaaaagtgtgacaggagatctgagactgcagtcgtatgtggcaatgggtcctccaagctgcctggtaagagtttttgaggaagaaaggacttgcatctctgtttgttaatgcagtttcgtttcatgggctaaagttctttttgtgaactgatatttgcagtccgttgttgagtttgtttagtgtagggagtttgttttgtctcctgtagtttagaccctcacttttttgtagctatatggctttatcagtgtataaaagccagatgatgagaaaaagaaaaaaaaattgcagaagaacccttaatttatgacatatataataccactcatgaagaacagttgaaatttctgacaagtaaattgaattccaaccaagtcaaacacgtttattcgagtttcttttttgttttttctcaaagtataataagatgttgaattctgattagctgaaagatgacacgattttattcattgtttttgggtctaccaaaattggaaagtgagtaaataaatggctttctgcgacatttggctttcccatgttactaatttattaaaggaacagttgaacgcaataaataaaaacaaagacatgcactgatcacacaattcctagactcccaaattatcattctaacaggtaaatttcacggtgatatgttaaatatgtagcctgtaggtccaaatacaacaactactttttttgttttttttctattttcattatacatccttattgttatctaattagtaattatcagcattaaagatctgggacactcctgtttaaagctttcatcgactatttgcctattagttgtaacaatcagcctatggttataggtgaatctagactcatataatcaattctgacttaaaccttgtttgaaagtaaagagtgtttctaaacggttacctatagttgtaaacattcatgtctataataaaaacacaccaatatcaatttacacatagccaaataagagtctcaaatgagtcaaaatattaaaactgatttatgaaaacacaaattttataaaaataaatggtgaacaaatgttaagattagtgaaagttcctattttgaaaaacaaatgtctttgaacccaattaatatgccttgtaaaccagtccatagtatcaaactccaaaaaaaaaaagttacttttaatttcaaatatttacataaaattttgcatgcactactctgttcttatataatcttcgtcttcttcttctctgcttgagtcaacaagaaataaacagagctaaaatgtttcctctaatctccttttctccaacttctcttgatttcaccttcttcgccattatcatctcaggtttcgttttcatcatcactcgatggaattccaattcaaagaaacgtttaaaccttcctccaggtccgccaggttggccggtggtcggaaacttattccagttcgcgcgctcaggtaaaccgtttttcgaatacgcagaggatctcaagaaaacgtatggcccgatttttacactgagaatggggactcgaacaatgatcatcctctccgacgcaactctagtccacgaagctttgatccaacgcggagctctcttcgcttcacgacccgccgagaatccgacccgaacaatcttcagctgcaacaaattcaccgtcaacgccgctaaatacggtccagtgtggcgatctctgagaagaaacatggttcagaacatgcttagctcaacacgtctcaaggaattcgggaaactgagacaatccgccatggataaactcatcgagaggatcaaatcggaagctagagacaacgacgggctaatctgggttcttaaaaacgcaagattcgctgcgttttgtattctcttggaaatgtgtttcggaatcgagatggatgaagagacaatcgagaagatggatgagattttgaagacggtgttaatgactgttgatccacgaatcgacgattatcttccgattcttgctccgttcttctctaaagagaggaaacgagctctcgaagttcgccgtgaacaagtcgattacgtcgtcggagttatcgagagacgacggagagcgattcagaatccaggatctgataaaacggcgtcgtctttttcatacttagatacactctttgatttaaaaatcgaaggtcgtaaaacgacgccgtctaacgaagagctcgtgacgctctgctctgagtttcttaacggtggtacggatacgacggggacggcgatcgagtgggggatagcgcagctgattgcgaatcctgagattcaatctcggctctacgatgagattaaatcaacggtgggagatgatcgtagggtcgatgagaaagatgtggacaaaatggtctttttacaagcttttgttaaggagcttctccggaaacatccgccgacttatttttctctgacgcatgccgttatggagacgacgacgcttgctggttacgatattcccgccggcgttaacgtcgaggtttatcttccgggtattagtgaggatccgagaatttggaataacccgaaaaagtttgatccggaccggtttatgttgggtaaggaagatgctgacataaccgggattagtggagtaaaaatgattccgtttggtgtgggccgtaggatctgtccaggacttgcaatggcaaccatacacgtccatttgatgcttgcgcggatggttcaggagttcgagtggtgtgctcatccaccaggaagtgagattgatttcgccggaaaattggagtttacggtggtgatgaagaatccgttgagagctatggtcaaaccaaggatttagtcttttattgtttttttgttaagaatattgagattattgtaaggtgtgtttgcttataaacattaaagtacccaaatctacacaatacacatgaccaaaactaccacagtccatagcacatttccatatatctcctttaactttctttttttcacatttcttcaaaattatattggtcggaagaaaaacgaaaaaagtaaggatggagcatcatcttacggtagtatgaacaaaaaacaaaacaaaaacctaacaaaaaacaaaaatctaaatcaatttacaatatcagcgtagaaactatacatataaaacccaaagctacagagactatacctctttcaaatcctccttgaaaaatggccaaaaagatcccaacttcagtaacattttctatctttaccatttcagttctagacaacggttgtgtccacctccctcgattcggcttccttaatggcttctgcaatcctgagagccctcattgctttgtaaacagcaagatctgcgttttctgcaagaatttgtgctcgtcttcttttggctatggcagtttccatggttttatcagccaaaactttggcttcttccattctgagaatatcgtcttcttcctctggttctgccgcctttacagccactgttcacattaacacaacaaacgaatcagatcattttcactatactgaactttctggagctaaatcaaacttctatcgagcttagtcaccgatattcaactcctaatgatactggagtttaaaactttatctaacctcaaatcgaatacagtacaccttaaccaaaaagaaatgattttcagtctaattctgtggtaacctattctacttaattgtagttcggcaagactgttccatattattctaactctcaagagtacactctaagcactaactttcagcaattgcaaacaaatgtaacacaagcctcaacatttcactgcaataaccaggcgtctctgagtcattaggttatggaaacttacccatccaagggcttgtctgtttggcttttccatggagttgactcccctgtcttttgaaggaccttcttttacgaaacacaggtttggaaagtagctgcgttttcttcacttgatgaccctgtttatatacatgcaaacatcagttttgatgataaaaacaaaactgaaaataaagaatatgatactaggacactgcatcatgacattacctggaaaattctgaggagtggtgcttttcgctgcttcctttttttcaaccagtaatcatgtaccgcctcaaccacctcttgcctacccagatatgaaatactacctatagtggctgctttttcatccaagagatcatcggcagggctatggaaatgatacttttcaaacccatcaatcatcaactcaaaagcttcccgctgaagttgtagatattggtcatcctcttcattgagcattttctggttctgcctttcgagccactcttcatcttcagaatccatgtcataaagagcaatacttcgagccatggcccttgaaacctcatcttcgttcacagatatatatgaaactggtggcctagaaaaggaggggaaattatcgatatactctgcatatccacacacttctctgaccccaggaataggaatgactttcacactctgttccaatagattccgttcatagcattctttatatatatctttaaaaccaagccaatcttgtctgtcacaaaactcaagcttccaattatcacctcccatccatactgtggcatgtgtaatccggttgctagagaaaggtctcatagtcctttgtgccatgtggctgtatctgattgccccatctttcttaataacaaggaaccactccttcgaagacgaagcctccaacatgacactaaatccttcttctctggtgcatctgtctgaatgtatcatcaatatattcgcagaacaacatatagaatcaagttcctcttttgtcttcgtcattggaatgatacttatcccatttgaaaccggagatgagttacttagcaccgaacttctaagctttttcgatgatactgctgctgtcctgtttttcctacttcccgatatatcaaaaacaggtgttccattgttcaacttgtgtgcattatgagaaagatttcttgctcttctccttctcaaagagcttctcctcttttggaaactgtgagaacctaaattgcctctatactgagcatttcctcccgttaacttcgaggctctcactgatggatgtaacccaactacaactccattcctcggagtacaaggttcaggtaaagctaattcagactcggaatctgattcttcaatcggattgtttagcaaatacagagatttctctacgaaaaagaaggagcgtggtagaactcttacaaatagagtgaaatgcatatccatgaaccatcgaggaatgacagcaaaatctgctgaaaagagaggtagacaactcatggccccaaaaaacttgcagacaccccttgagctaaggggagacctctgaaaaaacatcacaataaaaagaaaccaaaagattaccttagtaacattaaagatcacaattacgtacataaacaaaatgtagtccaaacctaacgatagtaagcgcaaaggtaattaggtaattaccacaaggaatcgcacgccatggtctgcaaacacttggttgataggttgagacaagaagaaagacgcaagtgaagacagcctgagttcttccctccttatatatctcattgccaaaccgaaaacagttaaaaaccagcaatcctcacatgaccaatctactgtaagagtaagcactgaagaaacccgttgtgagagttttcttcgcctgcgataaaacttcaggcttcgtagtggctcttctgatctatcacttgatgatggttcacaaagtctcttccttttcctactatatacaatcccaaacatcttatccacagtcttttcatcccctacaccttcatttctcactttcctccgttttgtgaccggaaagtcatctactttgtcttctttctcactagaaacttgtttcgggctacaaggctggctgttacttttaccggaggagactttattgcctttggatttgttctgattcttcaaaacgctatcacaatctcgatccaccacgtcatgagctcgccgtacctttggctcgccaacgttaggccagatccggcgacccgaacggaggacacgggctccgtctgcggctttaaccaccccgaaaaccctagtggttcgtctcattcccaccgacggcatctatgccgtgctcatacgactccgtttcttactctaactggagatgccacaactggcttgactgaactcagaaattggctttgttttaaacctcttcttcgatctatacccactaatctctgtaaaaaaacacgaatttcttacagaaccaaccccgattctgaccagattttataaaagaaatcactttcttttcaaggaaaatttaagaaattgaaacggctattggaaggggaagagctagatactttcgatttaaccgattcgattcgagatcaaattagtactacccagaaaggaaaaagaagaaagaaaatgaaaatcgccgagatctctggagatcgaagaaaatttgagaaattcgattgggaggatcgagatctgttcatgggtataaatctttgtttttttttttctagaaacgagtagacatggtgaagaagaagaagatgaaggatcggcggtgaagatggtttcacgaacttttcgttttgacaagaagagagggaacagaggtggctagggtttatgatcgaaaaccaaaaaaaaaaaaaaagatctttctttagtggtgattggtcgtgaccgttggatggtattctcgacggtttagattgattctggttcgatgggtccaaggctatctttttttcttttttctcgactgcgaattttttgggttacacgaatatttagaaaaatttaaacgaattttaaaaacggaatgggccgaaattttcaaaaggtgacaacatgaaatgacaagattgccctcgggtttaaagcgaaaggtgtctgaatctcaagtgtttaattacagttgttggaggaatctctagttgttagagcatctccaattgagagagctcctctattggctctctccatttctttatgattaaatttcacaaaaagtgattagagagcttttgtttttgtttttttaggttttcatcttccaatggtaggctttctcttacatgggttctcttgaaaaaaatatgcaaatcataagatttaaagaaaattcatagccatgaagaaaaatgttttcctgagattcagtgaaagaaacaaataaaaaagaaacataatggtgaagtttaatgaagctgcagagctctttttaccgcatggtgtagaggagtcccaacatgacgacctaaagagaaacacaaatgactccattagctcaataacactctaaaactaaagcatctaagatcacataacaaattcaaaatccaaaaccacaatcatggaacctctaacagaatcaacaatgtctcaaactacaaacacattccactaacttaaacttgacaagatgttagaggaaccagttcaaagacaattatcctaacaccgaagcaaaatttttaaccatctgaaatctgaaatcatcatcaaagtatactaaagaagcatacctgcaagaaaccatcccatgtatcatatcaaaacattggtttcaggaccaattttagacataagaagctacaggagaagacggattgggatttgggtttatggtttgaaacttatggctaatttcccatgacagatccggaatgacataatctgcgagcagccaactttgaggacgaattcctatcacaccacaaggaaccagaagatgatctttatgtcgttggaaagatctcgctttcaagtttccagaacacctttagaagcaaattccgaggtcgctagccaaacaaaacgaagaaggaacaatcaaccctgactcataaaactgattagaaacctgaaactttcttcccctgagctacttcatcattctttgattcttcataatactggcgaatcattaagaaccgtactcaataggctcatgtttgattcatctctctttctcatgataagaatccttgttggccgcactaagaacaaaaacctcttctttcattttgaacaagaacatgaccatgaacaagctcttcttctcttcttacaaagctctttatagaattcatatcagtggtgaatcaaacaatgtgggcagtctttttcaatcatcattggctctttatctaaaccaagttcacaaaatttaataagaacacataagaaaagttatgataaaattacaactttacttaattcagtgaataagatttgatgggatgattatcttcttcaaatttcaacgcaattcaatcttaatcaaaagacagagagatgttaaagttgaagacattgatattcactaaataattcttcctaaagacattgatattcatcaaaacttataaaccttaatcattaccagctaaatctgcaaactcaaaaaacacacttactcataatcaaatttaccccaaaaatagtttttcttagtcaatgaagctttaattcaaacctgggaaatattttggagctgatcgattttacttcggatgggactaccaaattaacaattgtttttttcttcgttcaccgatggtgctgcaacgtctcctattgatgaattccacgttaacggagtgtcgactcaccggaaatcacaaatcgccggtgacatcgtatttgtgtcgagagagagagagttgaaagcgaaggaagaagaaaaaacccaactttttttgtttcgttaaaaatagaaaaccaatcgcagcaaaacacttgtcgcctctctcaaattaaaaaaaaactctctcgagagagcgcctctcttctttaattttcagtttatatttatttttttgatacaaaatatagagaacctgtgaaaaaacacaagagaacctcccattggaggtgctcttaactagcagcaatccatacgtattactagtttactacgagtgtttaacaaccaacatacttcagaaagacgacgatacaaaaatacctcttgttattacgctatatgcaaattttaattatgcttagacataaaaaaaaaaaaaaggagaaatagctgagtatttttatggtaaaataaagtgtaaaattttatcacaatgatagataagggcaagaaactttaagacaacagaaggatatagcttcgagacaactctgaggaagtgagaaccacaagagatgataagattacacaagaccaaacattcattgacttttcgttacatatgattttgttttgtaggaatctcttgttaaaacagagtaataatagtaaggttctattgcttccagaatcttctttttaggtcttgggcgtttctgatgtttcagcctgaaacattagccacaaattttgggaagaaagctttataatcaagggagtaaaagaatcttgaaacattagccctaaattggttaaaaacagcatgatgtatttctcaagtttgctagaaagtagtataaaagaaacagactcatataaacaaaacagcaaaacttatttttcacgttaaattaaatgaacatggcaaggttcaaatttccttatttaaatagcttgaggtaagtcttcactttgataagagttatcaaataagttccaacaattcaaggctgcatgccctacttttcctcatatttgacactcaagacgcttagaggagttatttgactgagacacttgctgatgaaaaacagagcgattagaaattcatttaattcttcagtatttaacaacgaatatgagatcaagagtttaccgtggggtacaagcacgggatacgttgcgtgtaacttctctttccgcatttgaacccagtgggaggcctcgaagaatgggatactctgttcatctacattcagaaaaataaagacagggaagggcgataaattaagttcatctctcaaaaatttaagatcaggctgctgacataagaagaaatctatttgtttcttgttttccctgcagcgatagcgactaaatacgtactcttaaattttgtttttcaacatttaccttctaattttttgaacttcaagaggacgtgaatttgtctacacaatcaagtgaagccatgacttagaacattatagtagattgacataattgataaaaaaagtttaagcattttatgttttttttttaaacaattatcggcattttctatatatatacatttgttaagattttcattcattattttttataatgggctttaacctttttaaattaacaaaatatcttgttaatgaatttagtttagtaaaattttagatttaagaaaaataaaaccttaaattctaagactttgattacaaaataagaaatggaagactttctaatgtaaggtgcatgaactttgattataaaataacaaactttgttttgattaatcaaataaagagttggctttgctattcattaagacaattatggttgaaaagttcaattacgtgaatttgatgaatggttttgcagacaataatctaaatagaactatatttaaaatatatttttttttgtttttttttttcctttttttttgtttacaaaatgcttataaaattgaaaaaaatgttctacaaagttttagtataactttatatattattattctatgtgattatgcaaaaaatgaagtttctcaatttaataaattcttaactcttttctttcgttactttttaattatcacggtgtaagatttttttttttaattttgatatttacttattttttttcttttttcctttttaatttagacaatttctttcctagttactacttatagagtgcgtgagtaagcgttttgtagaagaacaatattttctatgttcttgttaaaaatataattttgtttaatcataattaaattcgcattcagtggaatacacatgatctcatacacaacagcttaattcttcatactaatattgaaaagggcaaccgggttcaaattgatgtgacaaacagtgtttacaaattgattattatattgggggaaacattaaatgaaaatataacaatcaacgttgtccgtcgacatattttacaaaaaaaacataaaacgcttgaacacgacctaacccaaatgcaggattctttatgactcttgcatcatcatcatctcttatctaatgtttctgcaagtctaacgccacaactctgtatctttcaagtttcaacccgctgcacctctcttctcccttgctggcaaagttctcaacttccatcatagactcatagttgcttctttcactaatcttcttgcccctttgtccttctcttctatccttcttcttctttttttgcatcaacaagctccttttattagtagtatatgtaatatatattgtacatagatgtttcatatgtgatgatatttggtggaccggtccaagagtttgtttgtactttcagaaaagcatcattatttttgtctttttgatgtgaagccgaaaaggaagaactgaattatttattatttttaatgtattaaagagtttccgagttaggcccaaaagatcaatgtctcaagttaagcccaacatgtcatatttctgtcgaagattcctttgccgtaagtggagaagatcatttccttgaggagaggatactgaagcagaacgaacaacagcgccggtaaacaagcgcaaaggatcgtcggagcaacaatccatttccctttattcatcattgttataagcaccaatgagaatgcaataagcatcgccgcgatggaaacgaatagtatcgaaagtcccgtgatcatctttgtcggcagcgcgaccaaaaaatcgtcaaaggagtatctcgcggtgagtatcccgaggaatatgggtacggcggtgcaagcggcgaagcaagaaatcaaatcggagacgatgaatatgatgaacctctgttcatataagtgaaaggggttaccttctgaattgtcgtcggagccaccagatacggtaaagaccgccgcgaaaatgaccgtgatgatgagagccgcgaaagtgaccatgacgatgagagccgcgactaagctgcatgacatggctgtgtctttcatccatttctcggcttcttgtcgcagtccttggtgctcctttgcaaatatctcgatcggtgtttgctcttctgtgtttactctctccttctcgatctctggtgcaattctctccacttcctgcatcattaaggccagatttatttttagacctctgtttcctctgttttggctatgcatgagagaaatagagcaaaccttgaaccattgtaactcgcgttgcatccgcaaaggtgcgcaaatgacactagcgagcttggaaggaggagaaggaaatccggcgagatgaagcacaccattgccgtcgctgtccttgtctgcgagcaacaagtacttcctgtcgtccagaccgtagaggagattaaacaccttctcttgtctgaactcgacggccaagagaaacagagtactgctcgagcttgttctcgtggaccatagaagctcggagttgtttctgatcatttccaccaagaaatccacattcccatatctcactgcaaagagtaaagcttcatccactgtctcggaacgttccttcaagcccaaggtcaatgtttcttctgatattcccagtagaagcttcttggcttgtagatgcatgaccttaagtcggtacacttcatctattcctgaaaccatcactcaattcagatttaaatttcatatgaatcctattgaatagcctaatacttaccggtccatttggagagacctttgagcagtttcctcatcagagtatctgggaacaaatcgaaactttttctcactttcttcagaggaatatatatagactttttataaactttatgtatacggaagaacttactcttatgatctttgtttgcatgtgaaggttttgggagagttggcagctttacttgtatccctagcaagtgagagaaggaaaaaattatttgattcaaaagggaatgacaaaatgattgatctttgtaatgaagaggtcttagatttgtacagacaagagtagatgaaacgtgtcaatggtccaagatagcagtcaccaggaaaaagatctggctttgaagccaagacaatgatgggaatcgactcgatttgcaagtgttttgtgacggctaagcgtctgctcatgttgaacagatccaatgcgatgtctaattgtataaagaaaaacagataaagatcaaaaccgccaaagatatgggttgcttgaattccaagaaatcccttaccgagcattctatagaagatggcattcagaaagagcaaagtaccatgatatccgtcttcagcaagtaagacctgaaccggagttctggtgtaaagatagcgagccatttccatctgcgtgttctcaaccgcaaccacaaccggaatctgtccattgattccaggaatctctagcagcttagggttcttggcgactaaggcttcagcaatctccatatttccactaaccgctacgacagtaagagccgtgtggtacgaaacgttttggctcatcttgggaagcatttgttcaggtgtcatacgccacagaagctctttaacaatctcgggtttcccacaagcacaagcctttaacaatggcgtctcgtaaaggtttatccattcgtccactgcgtccggatgatcgttcaagaagtccttcacgacttctacacgaccttggcttattccttgacttaattgtatatactcataatatacgttcgtattctttcctacatcaacaacaagatcacgctatgcgaataaatcagtatcccgtgctatatccacctagtgattatcttcgaaactgagactttgatctatcctttgtaacttgcttattatttgagaatggtataagaattcttaccgcgaagctggatattgacgggatcacttggaacttcttcttcaggattcttttttgtaggagagacactgtcgcctaggtcagcatgaggaacctttgtattagcgaatttgaaaggactcctccgaagtgttgccatcaaagttgcgtgtaagtaattagaactaattgccatattatattttataagaccaactctaccaaatatatagaaataaacaagacaactagaggtaataatagtatctctatacaaaaatgcaaagtatatgtcgttgtccgatctttttctatctaattattctttgattgatcttatacaagaatatatgcttttcttggttactcattattaatttggaaagcttttatgttagacaggaaagttattctataatccatatgaagataataaattcaaaaaaaactaaaaaaataagaaattcgaatatatatattttattttttttggtaagccgaatattttaaaattgttaaggttcggaagcattaattttggtcgctttaagtggccaattggccatttacctgcacagtttctaggactttcctaagaaatagcgaactagcctaatagtaaaactgtatctatacttatatttatgaagtataaatttgaaatattttttcattatccaaataattacaatatacgtcattgcttatatccatatgcacacaacatgacaatgaattatatcgtctttcggaaaatctatcataatcgtcgacgacaaaccctaatactcatacgtgtcgatcgtttttgtcgagaacccactctttgatcgatataatactatattagaaagaatcgagtattcttaaaccaaataagaaagaaagaaaaagtgacaatatattggtattataccatgatcatcccagaaggtgtttttaaatataaagataatgtgttaaatatgaaagattagtgaccgtggcactaagaaaacactttagatccccaaaataggttgtctttacatttattaatgagtcgtatgacaaattaggatggtagggttttaattgtcaaactgacccaaaaaagtgacatatttaaaacacgtacacttttatgttaaaacaaagatttcatgtttcggtcgaagattcgtttgccgtaagtggagaagatcagctccttaaggagaggatactgaatcataacaaataacagcgccgggaaacaagcgaagaagatcgtcggagcaacgatccaagggtcgttaaagatcgtgaataaggccgacgagaatgccacaagcatcgccgctatcgagacaaacaatgtcgaaagtccagcgatcatattcgcaggcagcgagaacaagaaatcgtcgaaagcgtatctcgcggtgagtatcccgaggaatatgaggacggaagtgcaggcggcgaagcaggagatcagatcggagacgatgaatatgacgaatattcgttcatgtcggtgaaagggtctaccgcctgagttgtcgtccgtgccgccggggacggtgaagattgccgcgaaggtgaccgtgacgatgagagccgctactaagctgcaagacatcgcagtatctttcatccacttctcggcttctagtcgcattgcttcgtgctcctttctgaatatctcgatcggtgtcagattttctgtgtttactctctcattttcgatcgccggcacgattctctccatctcctacattatcaagactatatattttttagaaatccgttttagttatgcatttaaggtgcctactccattaaatctatagcagagagaaacaaagcgaaccttaaaccattgtaactcgcgttgcatctgcaacgttgcgctaacgaccgtagcgagcttgtaattaggaggaggatagccagcaagatgaagcacactatttccgtcactgtccttgtcggcgagaaacaagtacttcctgtcgcccagaccgtagaggagactaaacaccttctcttgtctgacctggacggcagtgttaaacagagtactagttcccgtggaccatagaagctcggagttgttcttgatcatctccaccaagaaatccacattcccatatcttactgcgaagagtaaagcctcatctactgactcagaacgttccttcaagcccaaggccaatgtttcttctgatattccctttagaagtttcttggcttgtagatgcatgaccttaagtcggtacacttcatctatccctgaaacatcactcatcaattcagttatagatgtcatgtgagtgtgacgcctatccaataactgtattcgcagacgaaaacctaatatacttaccgatacatttggagagacatttgagcactttccccatcagggtatctggaaaaaaacccatagataaaataactgaaacctttctcacgttcttcagagaaatatattatagagactttatgatgttatgagtactgaaggctttgaaaagaagttacgtagatttcaagttactttagattcacaaaagaacttactctgatgacctttgtttgaacgagaaggctttggaaaacttggctgctttatttgtatacctagcaagtgagagaaaaacatattggatcaaaagagaataacaatatggttgatcgttgcaaagaagaggtcttagattagtacggacaagagtagatgaagcgtttcaatggtccaagatagcagccaccggggaaaagatctggctttgaagccaagacaatgataggaaccgactcaattctcaagtgttttgtgacggctaagcgtctgcttttgttgaacagatccaaggccatgtctaattgtatgatgaaaaacaaatcaagaaatgatcatcaaaacaccctaaaacatggtttgcttgaagatcaagaaaccgacagcttacccagctttttataatatatggcattgagaaaaagcaagataccgtgaaacccgtctttttcaagtaacacctgaaccggagttctgttgtaaagatagcgagccatctccatctgcgtgttctcaaccgcaaccacaaccggaatctctccattgtttccaggaatctctagcagtttagggttcttggcgactaaggcttcagcaatctccatgtttccactaacagcaacgacggtaagaggcgtgttgtaaaaattgttttggctcatcttgggaagcatttgttccggtgtcatacgacgcagaagcaatttaacaatctcggggtttccatatgcgcaagcctttaacaatggcgtctcgtaagggtttatatatttatccactgcgtccgggcggcggttcaagaagtccttcacggcttctacacgaccttggcttattccttgatttaactgtatatactcatagtattcgttcgtaaccctccctacatcgacaacaaggaatacacatatgataaatatatctgcatattcagattattatgctatgcgaatagctaggtatcccgcactatattcacatttaaataaataaaaatcatctaaagatacaatgtgaataaactagtactcctaagtttgaaactgagacattgataatgccttcttgtaaattgcttataggcgattgattttgccaacagtaatatgagaaatcttaagtaccgtgaagctgagatgccgtccgaatctgaagattgaattgatcacatggagcttcttcttctggaacttcttttataggtgaggaactctcttcggaactgacttgtaggacaccatgaaaaaactttgttttagcgaatttgaaagggatcctctcagatgtttcctccaaagcttcgcctaattgattagaactcattgctgtaataaagtttcttggaccaaccctaacagaatattaaaaaacaagaaaaccaacggtatttgaggatatatatatttatatagagtcataacggtatcatacaatctttggtgtttttctatcttattctttgattgattttacatatgagaatatatcctttgcttggttactgattaatttaattggaaagattttcttttggacagaaataaaggttcttctatatgaaaaatatataaatccgacaaaaaaataaagaagctcgtacagtattttattgtcaaggtttcaagacatgtcttttggctgctttaactagtcagttttttgcacagttcatacttcatagggtgatatagtttgtcaaaccctaacaattatttatatataaacgcgctttaacacaaaaaggcacagctataaaaaaaaatataaaaccattacaatttacaaagtaccaacagtagagtagaacacttgaaacaccaaacagagagtacaaccctagaaacacaaacaatagaaaaagatctagaagaaatcttcttattgcgttacattaaaaagggatccatatatcttctctcatcatagaggtgcctagggtgcggctatcttgaaaatggtgcggtaaaactatttatcacccatatcaacgtccgagttgtagtttagtacgttttatgatccatgttttcctataaaaaaaaactcattgccgtgttataaaatgacttggaccaaccccaacaaactgtgtatgggatatatatgcataagtaactgtcatgtctgtacgtatatgcagggcataacggtaaacggcaacgtacaatctttggtgggttttatcctattcgttgattaatctcaacacaagaatatatcctttgcttgggtactctttattttatttggaaacgtaatttttctgttagaaagaaatatgaagtttctacatgaatatataaactggattttttttttaaaagaagcttatttgtgacaataatttttgggttcatgaaactctttattcacctcctcttagcttaaccaatgaaagtgtgccaagtaatattacatataaacaaaaataattaattaaaattaaaatcagaaaaaccaaaacaaaattagatgcagatgtataaacatagataatcatcatcacttgctccaaaccatcaagctttggatagaaactgtgagccttgataatcgccccatcgtaaatcattctccgatagtttcctctcagcaacctccactgtaacagatttgcagcaactcggtgcacaagtgaaaagaagaaactttgcaaacactcgtgccaagtaaatagatccaaaatttgtatgcaattttattgataagtttaaatgatcagttataggagatttgaggacttttcaaattcacaaagagagagaagattaatatgagatttttcgagctcccctccaacattttaatggatttgctgagaactttttgttctataattgatgatataggtttcaagtttcagacgttatgaccggtctcaatgatctcaatgttgttaatgaccgtacaatatgttaattccggtctcaatgtttgaccggtccaagagtttttatttttcaggaaaagcattattttcaggactcataattactgtactaaagaattttctaattaggcccattaatgtcttaggttaggcccaacatttcatgtttctgtcaaagatcccttttccataagtggagaagatcatttccttgaggagaggatactgaagcagaacaaacaacagcgccggtaaacaagcaaaaaggatcgtcggagcaacaatccatttcccttctttacccatcatcgtgaatagcgccgacgagaatgctataagcatcgccgctattgaaacgaacagtatcgaaagtccggcaatcatctttgtcggcagaaagaccaagaaatcgtcgaaggagtatcttgcggttagtatcccgaggaagatgaggacggaggtgcaagaggcgaagcaggagatcaaatctgagacgatgaatatgatgaatcgccgatcacgtaggtgaaagggtttaccttttgaattgtcgtctgtgccaccagggacagtgaagaccgccgcaaaggtgaccgtgacgatgagtgccgcgactaagctgcatgacatagccgtgtctttcatccatttctctgcttcttgtcgcagtccttggtgctcctttgtgaatatctcgatcggtgtttgctcttctgtgtttactctctccttctcgatctccggtgcgattctctccacttcctgcattaatcaaggaaacagtttagacctctgtttcctctgttttagctatgcatgagagaaacagagcaaaccttgaaccattgtaactcgcgttgcaactgcaaaggtgcgccaacgacactagagagcttggaaggaggagacggaaagccagcgagatgaagcacaccatttccatcacagtccttgtctgcgagcaacaagtactttctgtcgtccagaccgtataggagactaaacaccttctcttgtctgaactcgacggccaagagaaacagagtactgctcgagcttgttctcgtggaccatagaagctcggagttgtttctgatcatttccaccaagaaatccacattcccatatctcactgcaaagagtaaagcctcatccactgtctcggaacgttccttcaagcccaaggccaatgtttcttctgatattcccagtagaagcttcttggcttgtagatgcatgaccttaagtcggtacacttcatctattcctgaagcatcacttaagtaagatttaaatttcatgtgaatccttttgaatagactaatacttaccagtccatttggagaggcctttgagcagtttcctcatcagagtatctggaaacaaatcgaaactttttctcactttcttcagaggaatatatgaactttaatgtatacggaagaacttactctgctgatctctgtttgaacgagaaggctgtggaagagttggcagctttacttgtatccctagcaagtgagagaaggacaaattctttgattaaaaatgacaaaatgagtgatctttgtaatgaagaggtcttagattagtacgaacaagagtagatgaaacgtgtcaatggtccaagatagcagccaccaggaaaaagatctggctttgaagccaagacaatgatgggtatcgactcgatttgcgagtgttttgtgacggctaagcgtctgctcatgttgaacagatccaacgcgatgtctaattatatatagaaaaacaaatcaagaaatcatcatcatcaaaaccgccaaaaatatggtttgcttgatgtccaagaaaccgcttaccaagcattttatagaagatggcattgagaaagagcaaagaaccgtgatacccatcttggtcaagtaacacttgaaccggagttctggtgtaaagatagcgagccatctccatctgtgtattctcaaccgcaaccacaaccggaatttgtccattgattccaggaatctctagcagcttagggttcttggcgactaaggcttcagcaatctccatgtttccactaaccgcaacaacagtgagaggcgtgtggtatgaagcgttttggctcatcttgggaagcatttgttcaggtgtcatacgacgtagaagctctttaacaatctcgggtttcccacacgcacaagcctttaacaatggcgtctcgtaaaggtttatccattcgtccactgagtccggatgatgattcaagaagtccttcacgatttctacacgaccttggcttattccttgacttaattgtatatactcataatatacgttcgtattctttcctacatcaacaacaagatatatacacagaataatttaacccgacactttgatgtatctccttgtaacttgcttataggcgattgattagttgagaatggtataaagaactcttaccgcgaagccgagatgtggaaagagctgattcgatgaatggaatctggatattgacggggtcatttggaacttcttcttcttcaggaacttcttttataggagagacactgtcgcctagaccagcatgaggaacctttgtattagcgaatttgaaagggctcctccgaaatgtttccttcaaagttgcgtctaagtaattagaactcattgccatatcaaatttgcttggaccaaaacctaatagaatatgaaaaataaacaaagacaaatagaggtaatcggatattatatgtaaaagctcaagtatatgtagtagatatccggaagtatatgcaaggcataacggtaacatacaatcttcggtgttttctctatcctattctttgattggtcttacataagaatatatcctttgcttggttactctttattttatttggaaagcttttctgttggaaagaaaattaaaggttcttctgaaaaatataaatattcgacaaattagaaagaagcttatttgtcaaggtaaaacaatatgcagtgttacaaaccggaaccttaacctagaagattacattccaatttggtttctataatttcctaaacaagaaaatcaattttaggttctgttcttgttgtgagactgaggaccatccacgaacagaagcaactagcttaacatttctcaccatgtcttaagatctttgttgcctagagagaatatccggggagttaatcatccacaacgagcttcttgtctacgcttgagaaagatcgataaaacgccttgaaatgtctgtacgcgatgtctatatcgtctgttccacaaatctctctcacactgtctcacaagtaacgagttccaaaaaccagaagctgagtctaacatattttgatttggaaacatgagaaagagttgctaaggaatggcagtagttaacatacctatgcatagaaagctgagctatgccacaatcaacggttcggatccctactcctgaagccaatataggtcctattgttgaaccacatcccatatcgtttctcaccacaaactcctgcagaaatagcaaaaatctaaatgtcagtatttcattcttaaatgtgggtggattagtgcagagcatctagaagatctatgatgtgtagattcatcttaacattaagaagaacacctaacctgaattggaagatcatggagctttgctacttctttgaaaagaaaagaagtgattccactggttgcatagcgttgatttgcgttatgtttgattacaagacccttgtgtagttggggacggtggttctcttcatgcttgtctgcaaagttggggtggactccatgagccatgtctgcagacactgcaaccacaagaacccaaacacaagtttcagtagaaattagaaagtaagagataggaaaccatcccaattttgtaaccactgtctcacaaaaattctggaaactacatatgcataaacaactgcaaaagtagaaagtgtgtaccaagaaacgatttccggatagcacggtcaaatgtacactcagtgacctgcttatttcctagggaactcacaatccgtctcattgcttgaaacatagtgggcgccccagcaccttgacatgaatctgaaccaacctattgaaacaacacatttttaggaagaatttttacaaaaaggctcagacggttcaaggacatcatcagctcaaagcaaaaaagttatggaaggttaaatgcaagtcctctttattcaacaattttcaggacaatagtgctgctagtatgttactcgatttgaaggaacctaataaatatcttagaggaaaagggtacctcctcgttgtcaaataaagctatcatccggatatcatgttcagtcgacagattttctgatgattcacatgaatcaatgagagctctcaaagcacagaaacttgatgcaagattatcaagtcttccagagaatatgaattcattatttgctcctccaaggcagctaggttgggtgtcacagatatttaactcaagactcactatatcctcgaccttacagtccaggtcatctgacaaaatctgcaacacgatcaggaaactttgagatatttgcggattttacagttacccaaatttaaactaaatgatacaaaaatttagcaacactaatggattatgatgacactatgatagaaactcgaaatgttggtaatgatacaaaaatttagcaacactaatggatgatgatgatactatgatagaaactcgaaatgttggtaatgatataaaaaatttagcaacagtaattccacagttctcatgatctaatatcttagaaacttggtgcatgttcagaaacgatgcagaggaatgactctagtgactaaccaaattatgtcatactcatacctgcatgagtaatggatgatgagcatctttggaggatacatttttgtccttggactctgctgaggattcatctgattttgttgccagtagcggaacaagttgggtctccaaatttggtttaaatccatcactgttcactgtgctaaacaatacacgaagaacaaaacagcatgaatgagcttcaaaacataactccacttgatggcaaatgcattagcctaaaacttcactagacaagctcatgaaagaaatttaccgatcaagatgaatggccaaagtgggtacccttagtaatggccttttcactttgacaagcctatgaacaaacgagccatcactggctctcacaattgctcgccccgcaacacttaagtctcgatcaaaccatgtgtgccacaaaccacctccataagtctgaacattcaccatgagatagccagacttggatgaagcagacttcggtttaagtttaagacacgggctatcggtgtgagcagctatggcatgaaaaccattaccaggcacatacctacaaaatgaggaacaaatgtaggttccctgaacccaacaaataaggaatctaagaaagaaaaaaaaaacgatttttgtgaagaacccttcaattatcaaagcttgaactagttccaggattcattatcaaagccaaaccaaatcttataccatggaagcataattgaatcggaagactcacttttctccgacagcaaaagcaaccaaacaggacatgtttcgtgtaaagaagtaacggccaccaggtttcagattccagtcttcgttttcactgaggagatcaaacccagcagccaaaagctgtctcttcgcctcagctgccagcaaagagaaaaagaccaatgagagtcgtcacttaaagttgaataccgaaaagaaaacaatatttcaatataccagtggcgtgaaactgtgtccaggattcattaagataatccagaagatccccaacaatcgacgcattagaatcactccccggcgatctcgaatcgcgatgggaggtgcagaggattggagagacggaggagaaggagcgaaagggagagcgatggagataagtaggaaaagagagagactgagagaggaaggatgaaggattgaagatggagggaagagaatgagttagtggaagacgagctatggccgccattaatttcgctccggactctaaagatgaggtcttcttctgttatctctaaagtctaaaccatccgccgacgattaccatccgccggagatttgaagaccacttcgacttcgagaaccggattttgtttcttactgtgtgtccccagtcttctaatcttgaggagctgagctgagggccatggcccatgaggattatatgggctatggtgccacttctatgggctttgggcccatgtactcttcacatgattttatttggaccaaagaacctttgccttttatggtccacacttgcatcattccaattttattgaacgcgtgttaaggacgtgtctttatgtattgggccttattaggcttcagtactttgcccttgggccttattagacataattacatgaaagatgatgacattaatttgccaaaagtctttatctttattgggtctccgtagactttaccaaaaggtgactgcaacgaagcttcgttaatgggttccacaacgtcacctacttgtttacttccttttgttttgtttacttcgttgcttgttactccactcttccttgccttttcttctctccacttatctctctctctttttctcatcggcctttgccatggcagatataatcggcggcgaagttgtgacggagctcgtgaggcagctctatgcggtttctcaaaaaaccctcagatgcagaggcatcgccaaaaatctcgccaccatgatcgatggtcttcaaccaacgatcaaggagatccaatacagcggcgtcgagctcacacctcatcgccaggctcagttgcgtatgttctcggaaaccttagacaagtgtaggaagctcaccgagaaagttcttaaatccagccgttggaacatggttagacagctactccatgttaggaaaatggagaatcttcagagtaaagtgtctagctttctcaacggtcaattgttagtccatgttctcgctgatgttcatcatgttcgagccgattctgaattccggttcgatcggattgataggaaggttgatagtttgaatgagaagcttggttctatgaaactcaggggaagtgaatcgttgcgtgaggcgttgaagacggccgaggctaccgttgagatggtgacaaccgatggtgctgatttgggggtgggattggatttgggaaagaggaaggtgaaggagatgttgtttaaatccattgatggggaaagacttattggtatctctgggatgagtggttcagggaaaaccactcttgccaaagagcttgcccgggacgaggaggttcgaggtaatgacttttctttgctggcctctgattccatatcgtttgttaatttgcttggtacatctttgtgatctctattgcagtggctttgtggtgtttcttaatggtatattttgttggtttatcttgatgatcatgcttctattgttttgttgtatagttgagttgctaaaattgctttcatttactgcttttatacaggccactttgggaacaaggttttgtttctgactgtgtcacaatctcccaatcttgaggagcttagagcccatatatggggatttcttactagttatgaggctggggttggtgctactcttccagaatcgaggaagctagtgatccttgatgatgtttggacaagggaatctctggaccagctgatgttcgaaaatattcctggaaccacaactcttgtggtctcacggtctaaactcgcagattctagagtcacttatgatgtagagttactcaatgaacatgaagcaacggccctgttctgtctctctgttttcaatcagaaattagtgccttcagggttcagccaaagtttggtcaagcaggtaattggtctgctttaggtgacacatgcatagtagcaatgttcttttttgctttcagtactcatattgtattgactctgtttggtaggttgttggggagtgtaaaggtctacctttgtctctgaaagtcattggtgcttcattgaaagaacgacctgaaaaatattgggaaggtgcagtggagaggctatcaagaggtgaacctgctgatgaaactcatgagagtagagtgtttgctcaaatcgaagcaactctagaaaatcttgaccctaaaaccagagattgtttcttggttctcggtgctttccctgaagataagaagatccctcttgatgttctcatcaacgtgttggttgagttgcatgatctcgaggatgcaactgcttttgctgttattgttgatttagcaaacaggaatctccttactcttgtgaaagatccaaggtacggttggttataaaactctttatgatctgatctcttgtagccactttcaacggttttattcgttcttagctaatgtaattaccatcgataaattttcaggtttggacatatgtacactagctactatgatatatttgtcacgcagcatgatgttctaagagatgtagcacttcgtcttagcaatcatgggaaagtaaataacagagagcggttattgatgccaaaaagagagtcaatgcttccgagagaatgggagaggaacaatgatgagccatacaaagccagagtagtttccattcacacaggtaaggatttgttacacgaccatcttctaatgaataatttggtttgttactagaataataaagttttgatatggatttctgttttattttacaggagaaatgactcagatggattggtttgacatggaactccctaaggctgaagttttgatactacacttctcttctgacaagtatgtattgcctcctttcattgctaagatgggcaagcttacagcgctcgtgatcatcaacaatggtatgtctcctgcgcgtctacatgacttctccatctttaccaatttggccaaactcaagagtctctggcttcagagggttcatgtccctgaactctctagcagtacagtgcccttgcaaaacctccacaagctgtctctcatattctgcaagatcaacactagtcttgatcagacagagctagacattgcccaaatcttcccaaaattgtctgatcttacaatagatcattgtgatgatcttctggaactaccttcgaccatctgtggaatcacctctctcaattccatcagcataacaaattgtccccgcatcaaggaattgcctaagaatctgagtaagctaaaagcccttcagcttctgaggctatacgcttgccatgagctgaattctctgcctgtggaaatctgtgaactgccaagactaaagtatgttgacatttctcaatgtgtcagcctgagttctcttccggaaaagataggaaaggtaaagacacttgagaaaatcgacacgagggaatgcagcttatcgagcataccaaactctgtggttttattgacttctctacgccatgtaatatgcgatagagaggctttatggatgtgggaaaaggtccagaaggcggttgcaggacttcgtgttgaagctgcggaaaaatctttcagcagggattggctcgacgattaggttcgtgattctctccctccgagcccttagaagcatgttgtataaaatacttaattgctaatctgtagcaaagtcttgtataatattatattttatgagcacactcaagagtcaagagtcagtgcaaacttcgttcttgctctttctccagaaatttatctaactataaaatttccattcaagaatcagatttatgttagtatcattccagattcctttattagagtagcttttgagccaacgccataattgatttatgattttatttcaagaaaatgaaagcgtgggtgccaagacacctttgccttttattgccacaactccacacacaaatgggactaacacaacaaagaagtacccgttgaaacacaaacattacatcctctagacgaccacggctttctgattttggcgacatccttctgtaatatcttcttatggtagccagttctttgtatcgcggtagaaaagtcgtttgccataggtggaagaaatcatctccttgagaagaggatattgcaacatcaagaagagaagcgatgggaagctggcgagtggcttcagtgggtatacaagcgctggcttgtgacgcattgacgcggaaagcgacgtgataaatgcaacaagcattgaggcaatagagataaacagaatggattgacccaatatcatctttctaggaagtgatacaatgaagtcatcaaaagagtatcttgaggtcagaatgctgaggaatatgagcacagagatgcaggaggcgaagaaggcgagagtgtctgtgaaaatgaacgctctgaaatgtaagtcattaagaataagaggtgaacccgaagttccatcaatacctccaggaacagtgaatatggcttgaaaagtgacagttgcaatgagagccgccacgaagctacaagcagtggcagtgtatttcatccattcttctccttcttttcgtagatgttcgtgataatgttcgaatatttgtcgcggggtcttgttgtccttgtttttttgcactacttcacgttctgataccaagctctctacttccttaaaccattgagactctctttgcatcttgagagcagctccagaaatcttagaaagttggtcgggagtagagagacgaccggcgatatggagaatgttattgtttcctttgtcgtaagatctaagaagcgtgacctttctatcatctaaaccatgtatgagattaaagatcttctctttcttgaattcaacggccagctgaaagaggtttcggccagaggtagggttcaagatccaaagaagttgagagttacatttgataatctcgatgaaaaaatccctgttcccactcttcgccgcttcaagtagtgcttcatagactgtttctttccacctgatctcgttcttggccatgatatctcgtagtgatgtgcacatttgttttagcaacttttgagcttgagaatgtcttttttttagatcatatgtttgcttgattcctatgttgaaaaaaaaaggagtacatcttatattgttatggaagccacactaaatagcagaaaaccctaatatatgatataaaaaagcatatattcatcacatatataattaactcatcatgtgaatactgcactgagtgtgaccacatagttaaatctatctactaattaaactactaaatgcacgtttaattaacgtcatttcgaaatgaagcagacaagtcctgtctatgtgaactctattgtagcatagatcatagatgcatcaactttggataaaaattagaccatagttagacttacgtaccaaaccatttaagaagactttggggtagtgtcatacaaaaaagacctgatgtaggaaatagatagaaacttcaagtcgaggtcaaaagataaagaaaaaaaaaaagatagaaacttcaatgtgtgtatatatagcaaatgtttaggaaaaaaagtccaaattataagagtgtatgtgagtggcgtacgattgtctcggtttggtctcggattctcagatacacgtatacctaacaaaggaagaaatttatataggaacaattaagttcaagaaaattaaatgaaaaaagaaccaaaaaaggagtttaatggattattatatagatagatcatatttaagtacatacacgagtagatgaggtgtcgccagaatccaaaattgcagtggctacgaaacaggtcaggtttcacagctatgaacttataaataggtaatctttgccttgcgtgtttagtcacggccacagacggtaaatgcttgatgatgtccaacgcaatgtctaacagcccatgaaaccaagctattatattgaatgcccacttattatgttacactatttttatcataaagcatggccgaaaatttttgtaatctaacaactaacatatatgaccacaactaaaacaaatcatgaattttgatcacataattaagcaaccgaaattagtggagtagctcaccttttcatacgctatctacaaatgttcatggatattctcatattcatttaaaacccaatttttctgtaaaaagagtcttttttttttataaatataaaagagattttcatccattgatgttccttatattatatatcagattagattcctattaatactaatcgatcaaagattcctaacatttccggttgaggtttccattgtactactacagtctacagcactagttgtgtgttatcattgcttcaagtgcgttacatatcattatcaagtagttaaaagacttaccaagaaatccataaaatatggcatcgagaaggagacatgtagcccaatatacatcattatcattctccaaaacaagaggaagggttctcttataatgattgtaataaaggtagtcagtgacctttttatgccctgcattagatgcccgcacaaccggtatagctagcccatagcgaactgaattattacgagcaagcggctggttgagatggggttcacacagttgctttaccctcgtcaaattgccattcccggcagcaatatcgagcgctaaactttgacaataagcatcgttttccatttggccacgactcgtcatttcgtccaatagtagcttcttgacgatctccaattgacgtcgactacatgttttttgccatgttatctcaaatgcgtccatcaaggcagtaattgtctctgtctgcaggttcaagaagtttcttttcacgcgctccaaatcatcgtcgctaatttgctgtgatagtgataaattttcacaaatttcacctaaaactgcaaccgcacatgaagaagaaaataacataaccaattagatagaaattaaattatccataaacaaaattacatataaatattttgtgctgaatgtagagcatctaattttacatcaagcagcctgatacatatataaacaaacataacctaacttagaaaacaagttatgagaactatgacgtacaatatgtagaccgttggaagttaccaaaatctcctcccaataaaaaatcagatcaggaaacgaagtaaacttaacgtggacgaaacatgcgatgtgtttcatttacaatgagaattgccacaagtgataagtagtaatcaacgaaatgatgaaaagaaaaactgtttaccttgcatttcgtccgaagaacctggcactccttgtgaagaacaaattggagttgtactgtcaattttcttctcaaaataaatctcttttgtgatttgcgatttgatgaaatgttggcacagtgagcttgcttaaatagacttttttcgcttaaagttaataatgcgcaattaactttcacatcatcacattctcttactgtcttcatacgtcatcgcatctagtttcttactaacagtttttttgtttgttttgagttctcccaactagggcatgactcatgttcttatcagtaggatcattttgtttgtttgactctaattcttttcctgttttgttttaattcctaaaaggtcaacgataatttgataaatgtttaacgatcatttttaccaaatatattataaagtctgtaattagaaatatctcatgttgtacattttaaattcttttgacattttcgcatatatatttttaagaagtcctttttatatgtgacgtttgtgtttagtcccttttggagaatccatcaaactagtgaacttattctattccttgtgaaatttaaataatatgaaagctgtcaccaagaagtagaattagtcatcaaaacaataaaataaacttcagcgaagtgtttttttctccttttattatattattgacatttgggacgacaaaagtaaagtgacctttgggaaaagaaaactagaatcagtcaccaaaacaattaaaaaaaacatatgcaagagtattgccgaataattatgatggatcccacgtcgaaaagttcactcgttaattagtttgattgaaagttcataattttaaatgatcaaaaaaacagtccaagtaggattcattgttggttcgagggtaaaatgcggtttgagatagagcgattattaagagtcgttatcacgaaaaagcatgttggatcccaaatttagaatatatgatattaatagttatatattaaggagatgaacaaatacactcatgccacttaaggagattaataagtctaatccacaactttgttttgcattaagctgttattaggtgtgttacggtgaatagataagtccgcatgcttgcccgtgtcctatacttctttctaataaattagaccgcttcgaaaaaccaccaaattttgcgtccagttttcaggttaaccacagactaattaaggtaagggaggtttcagatttgtaaaaattgagtcttctacgaattttctaaacgcacccaaatcaagtgtcaagaacccatttattttttagccacagtggttcaattatagtatcacgaatttccacataatcttccatacagaagtctgaaagtttcgcaagcacagatatgattgctttaaaggataaagagcagttttgttttagagcaaacaaaagctcatttagtagctgtcaatgtcagtttcaggccttctcaggaagtaacgcagacagttcaccaaaacctgcaggagatagttgattctttttacctctctctcttcttttaaaggtgcaaaatacaagactaacagaaacaaaaacttacctgtgacaaagatctgtttagagcttgcccttggtagcttacgtgaaacttgtctttcgcaaccagtccctgagagagacaatggagacgtactattataatgcatagcatagaaatggaatcacagtgtatgtacttatgtaggttttgactacctctgtatctatctctgcggattccacgtctatgttgacatcagccatcactttgatcatctctacgacaagacctggcctgtccgctgtctctatgacaagcaggctagagaaaacaggaaacaggcgagaattatgtaaactatttcaacagggctattctttatatatgattttgtggtgtcattaataatgctaataaatatggtgaatacctcctctttggtccatcttctttcacatgtatatgagttgcgatatcgacatcaatctgtaccaaataaatccaaagcagaaatgagacatcagtaacctagagctagcttttaatgactgcaagcttctttataaaactcgactaagacattagaaaagagtttgtataaaacacaggacacaaaagtaatcatccaataagcagagtaaacattaccttcttttcgggagcctttattccaaaagtctcacccattgcaagttgctcactgcattcctgcaaaacaaccaaaggcaatgttcaaaaaaaaaaaaacagctgcatgcaagcctctttgaatgtgaatgtgattacggtaaagagataaagaaaactgtaggcagaccggatggtatttcaagagattgttgatgattgttaatcggatttgttccaacaagtcaggatcttccactttccggccagtgtctctggtgtgaaaaagaaaatttatttcaggcatctgtaacaactgacaatgcaggttgctgaagatgatatatgcacacaacaccaataattctcaaaaacagaaagttcttttttatcagattcacttgtctcaagctaattatctagtttagaaagaattctccagagaaatgatatagcccaatgtcaagcatgaacttcataggacaactgcagaattctatactagcataatttgagataagggaagatcatatcagcactaagcagtttgagacaaaattgtgcatcctattgaacaagtgagaagtcaataagtgatagaaaatcatctaaagcaaagggagaccaggaaaagaaaggcctttcttaccgtttcgttatagaaaatttggtctgcttaatggatccttcagttgagacagttccttttattacatccaatcccaaatctttcagcgcccgcatctgccacacacatatgattcataagccgaaaacaaggcaagtttacatctgattctgatagtaaaaacgctacaaatcaagaaaagctaaagttttttcacatcgataagatagaacaaaaaaccaaaacaggatatagaatccctcactgtgtcaataagagccccaagacgatttccaaaactgagttgtacaatagtagcttcagggtcagcatcctggtctatcataaccattggcattggaacaacgtcgtcatcgtcttccgatttctgcgatcaaattttccagcaaatgtcatctcaaagcacacgtgaacacaaaactcatacgcagaccgtttccctattaaacatgagaaaatcaaatcacatatcaaatagcatacacatgaacacataacgacatactccctacatttccttgctgagcttctgagagcgaacatacatgcaagtcaaatcaatagatccaagaaacatccgacgaaacaaaaaaagactgaaacaagttactgaccggatacgatggagtagcggccgaatcaatgctgttaatcgaagcatatacacggtttttaatactgcatacaaaacgaacaagcacggaaagatatatcagcaacctcagatacatcatacaaagaagaatttggaatcggtacatagagaaaccaaactaccaagcaacttattctaattatctaaagaaaccataagaacttcaatctcgaaatcgaaatttaatctacctttgctttctcaaatctcttaagttcaagattcataacgaccaatacaactactctaaacgagaatctagtataatagttccgtttgccggatcgttcgagcacatacagagcaaagatttttagtcgaatcaagcttaatagtagctgaacataaaagacgaagcaaagattactcaaatcgatttagcagaaggagcaagaagactataaatctccatcaattctagtaaaggaaagatctaagagcgagacacgacgcataagaaataggaaagagcctaacctcttcgtcaagagagacattacacctccgacgaacttccggcgatcatcgaacaaagcaggcgatagatctggagaagcaatttgagcgggaaaacgagtctgcctactgattgcagaagaaggacgcgaagctaacgaagaagaaaactgagtaacagagaagatggaactcgagaacgccattgaagtttgaaacaagaatattttttttctttctttctcctccgaagtcagagagaacaccttaatctataaaatggcgagagaaattggcgtttagtgataacaaaaagatgatggagtgctgaatctgctgatgtgatgtgtgacgtcactatcgagatgctccacctatacatctactaagcttttattttatttttattttatatggtttctacaagtaactaattgaatatttgcaaattgctatagaataatgtgatcatagtgagacgaatgtagatgcaattatttgcttgctgacgttcaaacttctacgctgcaagttaccaaatatcttctcttttctattcttttaccctccaagccaatcggactggtttgctgtttgcagattttttaaattaaacctgctaaagaattttaaaaaatattttgttttgtctctaataaaaagtttaaagtaaaaaaatcttgtataaaaaattaaaaacttttattcgttgaccaaagaaaaggaaaaaatatctaaaaacaggggaaaacatgtatgtcaacttgggccattaaaccaaagaattgtagacgagtctggggaaaggttctcactattgggctattgtagcccattgggtcattagaccaaagtccttagctaacaattacgccggtgcaatgttctagcgggttcttcaataatctatacccgacccggtccggacccgaagctgcctaactgtctcttcactccaaagacattttctacccaaaaaaaacgattttgagaaaaccatctcactgattagcaagatgtcgtcggctcgttctgcgatcacaaagctaaagctggctcgatcctttggggagaggcagattggtgcatcgcgttcggtggtatcgactcgaggaccggcgattcggtacttcagtgacgataaaggtcgtgtgctcagcgaagaggaacgcgcgaaagagagcatgtatatccaggttcttcttcatcgtcgactttttctaactcttgatttatgtatcgatgctataatagtttgtttagccgctgttgcttatttggattcaatgtttggttgtcgaaattttgcttcaagttagcgaatactggtaaaaatctgatctcaggaaatcaatcaaattatatgaaatatcgtttgggaaattgcgttagcattgatttttaagcttatgagatacactgataaagatccgaggcttattcttatcataagacttgaatccaattgttgtctatcaaattgtaaagtcgtcttttgataataaatggtcaaatagtgtgtggatgagtttttcaaggcgtattagttcatacagatggaaaataattgaagtaaatgttgtctgtgtgaatctgtgatccaacttacgcctctacgaaaagtatttgttgtagaaaggggaagaactgtgtgttgttgacattgttgttaagcaatctctatagctttttgtgttcctttttgatttgaggttgacctcatagttacagtttaaacacaattttatagcttcgttgcatctcacttgcattactcaggctcagaatatttggctatgactattgaaattaatgaaggaagctatttctcttcacgcacttataagaaaccgatctttttgttgtagaaaatggagagggagagactggagaagaagaagaaactcgagcaagataagctagatggtgagaaaggaagtgccaacaaggtaaactttcatcataccatcaacttccattggtctcttttcattcaagtgttcagttttacgtacgaaatgccctgtggtcagaagaagcgcatttctgaacctgaatttggctttaatgtcacagcaaatgatgatctaacttaacatagcaaagaaatgaacttgctcgttgactgtttgcttttcactctcttgtgcagaaacctgagacaaacaagccatgagtttatcactcacagtatacagaatccggtcataaggcaagcagtagtgaaaaacaataatgcctttgacctatgttctctcttggtatgagagatcttgtacttgtacagagatctttaaccttctgatgtgtgtgtttgtgtgttgtaagaaatcaagtttaaaataatcgagaaaaacaaccatatgcattgattcaaaataccaaaatggttaccaaacatatttgtgtttacaaaaagcttccctatacattatttttattctttgatcatcatcatcatcatctgtataagaaaatacccaatcctatttctttccctattcacataaaatgagtaaaaccctattaaactaaagccatcccaatttgtctccccctttcttcatcacatccgaaacccaaaatcctcgaaatgaccaggattcaattgctgaccgaactcagacataatctgttgctgctgcggcgcctgaacaggactcccgtgttggccagtccagtccatgttagacccaggcatagccaaagtagcatcaaccgtagttatatcatggatgctcgaccttttcctctccttcttcaccgagttctgtctcagaaaatacttctgagcgtgactcgcgacttgcgtcggtgtcctcgtcaccacaacgtttctcgagatactcctccaatctcccttaccatatctctttaatccgatcagaaacaatctgcatcaataaaattcatatcaaacaatgtaattaaatcacctaaatttagcaaaattgcatttaattcctaaattctcaaaccaaccaaaaccctaatttttttgaaatgattgataaagaaacatacttgtgttcgttctctgtccaaggagttcctcttttgcgttcactctcgccatgtttagacccaaaagagatctgaccagcggaatcccaacccgccgccgcagccgccgagtcatccatgtaatcagggacatcaactcgaccagaatcaatctcgaaaacatcatgaaccaagacctcgtaatgctccctaacttcaccagcagatttatgaagctgatcagcgattctctcccaccgattaggagatccttcaggaaaaagaaccaaagcttgctcaaacatcttatcctccgacctcgtccactgacttgacgccataatcgttgatgattactcaagtagagaagaagaaaacaaaaacaaaaatctgaaatttgttggatattggaagaaactgttaggataatttatacggattcttctggtttttattcttgggaaagttttttgtaaataagaaaataaagagctggaaaaataaaaataaaaaagggaaggaagaagcagctcagagaccaacttcaacacggtttctctgcaattgggatgtcttttgtctctctctttctctcagttttattttcaattttaattttagggttaacacctgacctgacttactgattttttgctaccagtttgttacagtttctccctttttatctttaaaaatttttatttaaaaggaaatgccactttgtttttccaataaaatgggaacacgtagctatttaaaaaaaaaaaaaaaaaccaaccgcctaaaaatacgaaaaagcaatctagaaagacttgttttatttaggtttcacattctcgaatcaatcacagcactgcactgtctacgtcttccttgtcactatttttgtccaatcctctctcaacttcactttcgtaattatggttatctgtgattttccatctgtttatgattttttcattttactaaccttataattcttgttatgttttcggatttttttttgggccaaggacgattctcatgatgaacaaatatttttttttatagtgatggtccaacatttgacgtgttaattaaattatgtaccgcaaagtttgactaatttttgacagttgggtcattaatgttagtcaaaaaatccaatcctcaactgttttaagtgtattgaccagtaaaagctccaaacacacactacaatcaatcatattctattcatagcacttccatcagttcatgccttggtgagtgttacattattacttgttgaaacacataatgttagattgtcagcgtaaacgtgggaagtggaaaacatgagtatatttgatttcgaacgtgttataaaatagttcgatttatactttttattaaatactcctgtagagaaagataacaccgaaatttgtcttatcttatcggaagagtttcattgtatttattaaactatgttctcaacgaccttcaacaaaagaaaacaaagcaacttcaactaatttttttagtatttttttagccgtacttgtttctttcttcacacgtagtttactttacttgtttttaaaaatggtttacacactttttactaaattaattggattgcaaatatgaagtggatacgttacgaagtcgaccaagacgccaagaccgactcttcaccagtattgagccacgtgtcttctgccaattgttttgcgaggatactttttggcatcggactggtgcatctacatgacgtggcctcttgtttaatcgtcacctggctttccaatttccaaataaaatctactaagctcttgctattttaagctttttatctgctaccatatgtttcaagttttgatattatcttcaaaaatatgggaaaataaatacagaaaaatcaaaaaaaataactgtgagtatgaaaaatatggggcgattattggatgataaaaagaaggtatgaaatttctgaattgaaaaaaatacatagaaaggaaattagaagaggggataaattggtgaggtaaattttgaatcaaacattaaattaacaaaaatgtagtaaaatagggggaaaaaaaagttttttttttttttttggaaatgtgtatgggctagtagcccaaaaacaaggaaaacacaaactattggactggactgatcaaaatagttaatgagcggttttggtttatgtaaaaaagagaatgggccttttagatagactctttaaatagaatttgacaatctcttaagttatctatttatggataaataagtgatccaactttaactaggtgaatttgacaatcttaaactagtagggagtctcactcatgaacattttacatatttatttttaaaatactacactttcttgaatacacagctttttttttgggtgatataataaggtatcttcaaaaatttatatatgaaatcagatcctaatatcttgcttttactgaaaccaaaaattgtgtttacaaaacggctcacatatcggattggcactcaaaagtcaaatcacatattttgccacggattttatataacttcaaatatatggagaatggaatttttgtatttttcaattagaaaaaaatactatagggaaaacagagatgggcaggtctggcacagggcgtgtgagacgtggtcggattgaggcaacctgaattttgcatcttatctaaaattcagatttgaccatcccactcactgtataaaccactccacattatcttttttatttatttcattattactcttttgtgtacccaaaaatgtgagacttattggtgaccatacaagtcataatttattcttgtcgaaattaatttatatataaatgtatgcgtatgtgtgttgtagatacgaatatgtgtcaacgttgctgacactaatctaattatcattattgtgaacaaagagaggcttaagagtgttcgattgaagtagatatttaatactatttgtttggataaggtagtgttaattcaatgcagtgcgcggccaaccaaaaaataaaaagatcaattgcaacgtgtatccagttacgggtatgattgggagcgatagaacttttacataaacatacacaaatcattctacaacactttttaatcaagtttcatagatggttagatgagttctattcgaattaaccttatagtgagttttggtgtggtaaaaatagtgttgattttggattacatatacacatgcggttagttggtggtgttggtgattttggattttggatttcagtgaacagcatcaaaggctccgagttcgacccatgaaaataaaatcagtcaatccattgcttcttcttcatcttaaagcgtcgagtctaatgccgatttctctatggagaatactcatcaggatcatgatacaacctgcaaacatgttgcgttgcccttatcacagagaacagatcactcatcttttttttcaagaactcactcatgcatattaccactcacacatactatcaaataacacggcactaacactaaaacaaattactaagttacaaactgtaccaacacaagatttgcggttatttattcctctaagtaccaaactattcgtgtcctcgttttaaaacatttaaatgcagagacaaaatcagttgaagaagaccttaattagctgcaaatatgcgataatattttcctagtaatgccaagttgccaactataaaaaatgagaagattgtcgaaaagaaccaactaattacaaaaactcatttcctcaaattctggtcacgcttcgctttaaacctgtgtgcttatccattgaaaacaaaacaacatcccacgtgtcaccttctttgccacacgtgtgaatcttaaaccacacatagccgttagaggtaacgtcgttaccgtgtcttatgatatacggaagttaacgccgtttgtttagttttttctttttaacgtccgtgacggtttcataacctcgggaactaagtaaggaagagcttttgaagcagagagtcgttacgtttcaaacaaccgatcatagtcatagacacaattatggtattaatttcattaattagtactaattccctatcaattacaaggaacgcaattacaaaattttgtctataataacatcaattttagaccctcatttcaaggaaaaatgtgggaatgattctccaatgacatatttatgattaaaaagttcatttctcaggttcgaaatattttgaccattttgaaatatactaataatgttgtttaaaaacatatcttattagaatgtttatatggtgttatagtgttgagatattttttttaaatataaataattgagtacaaatctataaatttaaacaataaagagtgttattaacaattaatgataagtagtaaaaaaaaaagaatattcttcaataaaaaccgtaattcatttttttcctattttttaaaaaacaaaacaaaataagataaccataggaaatgccactctgttacaactcagcagtctaatgatatttaataaaataccaattttagtggtttatggtcaacaaaaatagtttacaagcttagctagatgtgaatacatactatatactaccaaactagtttatgatttgtatatgaatcaataaaagcgttagcataattagtatatataaatgtaactgtaattggaccaaagagataaagcatcttgggtttagtaagcttttgagctgatgatgcttatgtgattaatgtgaatataagaattagggaacaatcttgttgttaataacaatacttataacatttaaatgcccttaagtatcgtcataattacatctttgtccctatccttctctttttcacttttcctaatctctaatataaaaccaactcttgtcaaattcaacaaaattctcacacaaaccgacccgacccgaatctggccggtgagaaaatggaggtccaaagcagcagcaacaatggtggtcactcttctttctccagtctccgcgtctacctcaactctctttccgcgacgccttctcgcttatcccgccgcgctatttccgtctccacctcttccgacgagatgagtcgcgtccgcgccgtctccggcgaacagatgcgccgtactctccggtggtacgatctcattggactcggaatcgggggaatggtcggcgccggtgtctttgtcaccaccggccgtgctagtcgtctcgacgccggtccttcaattgtcgtctcttacgccatcgccgggctctgcgctctcctctccgctttctgttacaccgaattcgccgtccatctcccggtcgccggcggtgccttcagctacatccgtatcacattcggttagtctcccgcgaaaatcatcactactcctccgatctgttcacggttttctgaaaattttaatttcaaaatcaaaaaccgtaactgatttcttttctgttacatttccgttcaggtgaatttccagcatttttcaccggagcaaatcttgtaatggattacgtaatgtcaaacgcggccgtttcgagaagcttcaccgcttatttaggaacagctttcgggatctcaacttccaagtggcgattcgtcgtctccggtttaccgaaaggattcaacgagattgatccagtcgcagttctcgtcgtcctcgtaatcacagtcatcatctgttgcagtacaagagagagttccaaagtgaacatgataatgactgcatttcacatcgcattcatattcttcgtgatcgtgatgggattcataaaaggagattcaaagaatctatcctcaccggcgaatccagagcacccctcgggattttttccgttcggcgcggcgggagttttcaacggagctgccatggtttacttaagctacataggatacgacgccgtttcaaccatggcggaagaagttgaaaatccggtcaaagatatccccgtcggtgtttccggctccgtcgcaatcgtcaccgttctttactgtctcatggcagtctctatgtcaatgcttctgccatacgatctggtccgtacttcaaatttattattttcttattgtatatttccgttttcataaagacggcacgtagtctgagtctaaagctgaaaacggcggggcatgtgttgttgtaacgcagatagatccggaggcgccgttttccgcggcgttcagaggatcgaacggctgggaatgggtgacgaaagtggtggggataggagcaagctttgggatattaacatcacttttggtggcaatgttaggtcaggctcgctacatgtgtgtcatcggacggtccagagtggtccccttttggttcgctaagattcatcccaaaacatctacgccagtcaacgcctccacttttcttggtacgtttctttgtcttcattcattcatcaaaaaaacatttatttaattactgtcaaacaaacaatgatgaaatataatcaaatcatatatagttaaaaataaattttggtccagaaagtgagatagaggagtagtagttaggttaaaaggggaccccaatgagaaccgtttcggttgtttccatgatctttttattgatttgaacttttaacgttttctctaaatcatacgatccacgtgatttcattatatatacgtgtccatttcaatatattttaaagatcaaaagcttttggacgttaccattttaaaaatcttctgctatcgatttcgatcgtgacaagggctatgtacgttgtgtaagtatatctcaatgtagggacatggttcaatgtgatttgtatcattgtatggtgtttaagacaagagtcacagagagagcatctgagtccgattgctagatgtcgttgttcaccactggttttcttttctgctctgtgaaaagtttcgtgttttttgattgttcaaagattcaatcttttcaacggtcttgattgtgatggatttggtgggtctctttggttctttttgtgtctccttagtgttaaaaatacatattccacttttttttaaataaaaatacgatagttggattattagtcatccattggacgactagtagttaatcaatcatttttttatttcattttttttgtgaagatactactaagcctagtcggctgatattttgacaactccaacttttcgtaatttccggaacatctggctgagctatgcaactcgtgagttgttaggtaccaggatttagaataatgaccatctttgataaaatacatagaagattggaaaacatatactaacgtttagagccatatttatatgcataatctttgtaacaagcattgttttcctcattaagttactctcatgcctttgtcacaaaatggatcattataaagggggtcatcatcgttcaaccttatccttgctaattttagcacccactaactcacatttgctatatccatcaatagcattgacaaaaagacaaaataaaggaacaaatcctcccactaccattcatttcaaatttggacttttttcactagtcgaatcatctacagttatagagaatatgaccattgaccaatcttattaacgttcgtatattttatcccttatcaggcattttcacggcggctcttgcgcttttcaccgacctaaacgtcctcctaaacctcgtatccattggaacactatttgtcttctacatggtcgcaaacgctctcatcttcagacgttacgtcccggttggacccaccaagccgtggcccacactctgcttcctcacactattctccataacctctctcgtcttcaccctcatctggaaacttgtgccggaaggtaagcctaaagctttcatgctcggtgccagtgcggtggtggctatagccatcgtgctgagctttcagtgcgtggttccccaggctaggaaacctgagttgtggggagtcccgttcatgccgtggaccccgtgcgtgtcgatattcttgaacatttttttgcttggttcgttggacgcaccctcttacgtccggtttggattcttctccggtttgatcgtgctcgtgtatttgttttatggcgttcatgcgagttctgatgctgaagcgaatggatcttttggtgtgaaagatggacaagtcatgaaagagctaattgaagtgtgaaaagtatttatttagtttagttttctaaagcatcatgaaccaaaatgtaattaaactctctaattttttttctacatgagggggtttgaaatattaatgagaaaatattaaatacaactttaggaaaaaaaagaatatgtattttggtttaacgaacgaccaaaatgaaatcggtcatatgcaagtcaatctgttgagagaatagagaaactgatgatatttttgttttaccgttgtgtacaattcacaacacacaatatttttaaatacagtacaaactattaggttacaagtttttgagattgaaagatcaaatctttgtcaaacctataaggcaagatcacgtatgaaatatacatgtgatagataacattaataaatggaaacgttagatagacataggtctctcataaatacgagatggcgtacaattgaaaacgatgggtccccatctttctcacgggacacacatacgtgacattatccgcaacttcatatatatccaacaagatcaccttttctttttcatttttttgttcacaatcacttgtttcaaattccttgaggatatttatacattcttttattatttgcatttatatattctatatatcaatagtactattgaactttcgtaaacaaagaaccatgcacaaaaagtttcagtttattaaagatgtcttcatttttctacttttatttcttatcaagtatgatttagtttatcttattgatttcataaagatgaatgtctaaggtaggatcgaatatgtgatctcaattagtataatcagtccaattattcttttagtgaacactaccaataggcaataattatgtgagtaatttagttaggataacatacataattacatttttatatattttgaagtggatgatataaatctcgaatctaaatgaactgtgtttaagtgggagacgacacttgcttgtattctctctctttttggtaactatattcgtaaggatggggtccaaagaaaagcccaatattttcaagatcgtcacattgttggaagctttatttttacattatttatggatttgtttataagaaatattctgccaataagaagatgtgattctattggcaatacaaagatttgatgtctttctagaaaccccactttactcaaagtaatgagttccctctgtaaaagggttcaactctaagcgtgatcagtgcttctttttaaaactttcctttatcctaattacaaaccttaatattggattctacattggattaactaccaaaattttgacttttgaggtttacaaaaagacaacatgtattttgtttaacaacggccatgaaagaacctattttcttcatttttttttttttttggtacaacctgtctaaactaacaaaatatcttggatttaggatcattattattgcattataattatcggctatcaatttctgaaatgcactagagtaaatgaagaaaactagagcttaatccttgattaaataaattatatagaacacgggaccacgaaaatgtcaacctcttataaaccattcaaagcaaaatctaaggcaagttgtgtagaagatagagtgagcccattaatccatagctatataggtctaatcaattatttcacttttttgttgacatttttatcacgaaatttttttccgacttctcatgagctttgacattcgcttaaagaaaaaaagatctttatgtataaaatagtgttttccaaaaaagaaatcataagaggaaagataggaagaaggataagactttgattctcaccaaacagcgaagtttttggcaacttgcaacaccctccacattttaattatccaaataaagttaaataaaaagttaaacttagacattctattccatgatgttaaaatcttgtcgtcaagttggtcttactcatatttcaacattcttaatcatacaaatacggaatcgcaaatcttatttatctgctttctttcaccaattgtaatagattattatattttgaacaaacaacatttatgactttacaatttaacaaatataagatagaaaaaaacaagttaaaaatatataatcatctgttaatatggcattaaccattcccgccaaatttccaaataagttgtataacaaaaaaaaagagcagacttgagaaaaagcccatcaatattcgaatgtgatagtacactttaggcatttaggcctttggcccaaactaagtatgttgtctccttcgctgccaaggatgaacattcttggtttcacggtgaacttcttgatccgatgcaaagtcttacccagaagaagcaatacgagttctctctcccgaaacatctccgtactcgccagttatgatcaggaggaagtatcaccgggacgatatagcaatgagttttcgaatcgtaacttggtgcacgaaattttacagctttgtgctagaaacggagctgttatggaagcaaaagcttgccatgggaagattattcgtattgatttggagggagatgttactctgttgaatgttcttattaatgcttattccaagtgtggttttgtggagcttgcccgccaagtgtttgatggaatgcttgagagaagcttggtttcttggaacaccatgattggtttgtatacacggaatagaatggagtcagaagcattggatattttcttggagatgcgaaacgaagggtttaagtttagtgaattcactatatcgagtgttctttctgcttgtggggtaaattgtgatgccttggaatgcaaaaaattgcattgtttgtcagtgaagacatgtattgacttgaacttgtatgttggtactgctttgcttgatctttacgcaaaatgtgggatgatcaaggatgcagtgcaggttttcgagtctatgcaggacaagagttcagttacatggagttctatggtggcaggttatgttcagaacaagaattatgaagaggcactccttctttaccgtcgagctcagagaatgagtttagagcagaatcagttcacattatcttcagtaatttgcgcttgttcaaatctggcagctttaatagaagggaaacagatgcatgctgttatatgtaagtccgggtttggttctaatgtctttgtggcatcctctgcagtagatatgtatgctaaatgtggaagcttgagagagtcttatattattttctcggaagtgcaagagaagaatcttgagctttggaacacgatcatctcggggtttgcaaagcatgctcgtcctaaggaagtgatgatcttgtttgagaaaatgcaacaagatggaatgcacccaaatgaggttacttttagttccttgttatcggtttgtggtcacacgggtttggtcgaggaaggaaggagatttttcaaactcatgagaaccacttacggtctgtcgcctaatgtggttcattactcatgtatggttgatattcttggtcgtgctggtctattgtctgaagcgtacgagttgataaagtctattcctttcgatcctacagcttccatttggggttctcttctagcttcttgtcgagtctacaaaaatctcgagctggcagaagttgcagccgagaaactattcgaattagaaccagaaaacgccggtaatcacgtcttactatccaatatatacgcggcaaacaaacagtgggaggaaatcgccaagtcaaggaagcttttaagggactgcgacgtgaagaaagtaagaggaaaaagttggattgacattaaagacaaggtccatactttcagtgttggagagagcggtcatccgagaatccgtgagatctgttcgacgctagacaatctagtaatcaaattcagaaagtttggatataaaccaagcgtagaacacgagctgcacgatgtggagataggaaagaaagaggagcttttgatgcagcatagtgagaagctggcattggtttttgggttaatgtgtttaccagagagttctccagtgaggattatgaagaatctgaggatttgtgtggattgccatgagttcatgaaggctgcatcaatggctacaagaagatttatcattgttagagatgttaataggtttcaccatttcagtgatggtcattgttcttgtggcgatttttggtgacaaagacaaactctgttttattattgatctcacagataaataaattattttttccaacgaatgttttaaattatgattgcgtcaatttgttgggcttattggccaataggcaaaacgaagagcataacaaagcagctctcagagaggcaaaggtaaaacttttcaaggctttgctgatgattttcacttaattactacctagttaattcgtagacgctttctgatctttatgatatagatcaaagagcttaaggctctcataggtcagctttctggaaggagttcactgtattgttcagatgcatgtctgaagagatatctggaagcgaggaattggaacgtaggcaaagccaagaagatgttcgaggagacgctgaaatggagatcgagttttaaacccgaggaaatctgatggctatgcatcattactaaatcttggaatccttttgagacttcctatctaaccaaaacttacccgttgcgttttgctttttactagaatgaagtttcaggtgaaggtgaggctggtaaagtttacaaagctggattccatgacaggcatggaagaacggttcttatactgagacccggcttgcaggaatctaatgatcatttttcttagttaatgagttaacttcaaagcacaagctaaaacttccattttcattgacattttttgtagaacacaaaatcattgtatctcattgcgaatgctattctgaatctgccagaggatcaagaacagatgtcttggcttattgacttcacgggttggtcaatgagcactagtgtgcctattaaatctgccagagaaactattaacatactgcaaaatcactaccctgagagactagctgtagctttcctctataatcctccaagactctttgaggcattctggaaggttagacgaatcacttcatctatgactcatagttagacaatacattggtttggttaagacaactttgtgtgtgttttgttcgtctatatgtgcaggaacatgcaaagacattcgtcaaggtgaagtttgtttacccaaagaaccaggaaagcgtggagcttatgagcacatttttcgacgaggaaaatctcccaaccgaatttggagggaaagctttgttgcaatataactatgaagagttctctaagcaaatgaaccaagacgatgttaaaactgcaaacttttggggattgtgtaacagtaacaataaccagctgcacgcgagcaacgggttttctggagctgagattgcccctgagccagtccaaacacacccttgactgtttttaaaggcaatgtattgttataaccaacccttttgaatcttagctcttgatgctaactagagaggttgtatgatttagacatagcatttgaataaaataaagaggggttgtgtgtgtgtattagtaactcttgcaaggcttgtaagtgaatccaaaaactctttacactcataagcattttattaacaggaagcagaaaataagattcacattaccagcaacaagctttgtttctttcaatctgaatctgaccaaacacaagaagaagggaaaatgaattctttcaaaatttgaaggcacaaagagattaaaaaaagtacataaaacaaaaattatactagacagcagtattagcttagactatatagcttagagttctgcagtcaaaagtgatgtgcaacggattggagttagagcctagagggagagagagagagtaggcaatttgaatgaaactagataatcctccttctgaagtttctggtggttgattgataggtgcgaaccagcaggccaaccccaatgccaaaaacctacacagacaccaagaccaattcccacaccagcgttgaaccacgacatctcaccatcttcaccatctgcgtactctctattccaatacatgtcgctgtgttctccttcatattcttgtttactgaattggaaataggcccaacaaaatgcgacgaatgttagggcccattaatggaaaacctatatttatatagataagcaattagggattgcgttgccgcttagcttcgtctgaaaaaagggggatcagttccgtcgccgcttcttcgatttttgacgccgccgcttcttcttcttcctcgcaggtacgttctgggtaacttagggattgcgtcgttgtcggaaactgcaaaagcttgtgctgtaggtttcgatttgttgtttttttttttgtctctgtagcttttgaatcttaggtttggttagattcgttaataagataatggaaaagttatgaaatgggttgatttttattaccggatactgccgctgcatcttcattcttttagttttattgtatcaatggcttcgttgtttttataatcacattaggcctctgtcaagttcagtgttatggtgatgtatatttcttgattcatttgcaattctctagacattatttgacattgcatttacatgtgattcctgtgtttgtttagtgttacacctgaatgttgatgtttaagacacaaatcaactatacacttggttgtttcttcatttgtcatatgcttatggatctctattgtttctatttgacattgctgttcatatgtttccttgaactatgattataacaatcgatgctttaggtgcatttcttgatacataaatggttttaatttcatgatgtaattgaatcacggattttgaaccctaactaaagacatggaatttctttggtttttcccctttcagcaggtaagtcacacaggtaactgaaagatggggcgtgttagaaccaagactgtgaagaaatcttctcgtcaagtcatcgagaagtactactctcgcatgactcttgacttccacactaacaagaaaatccttgaagaggttgccatcatcccttcaaagagactccgcaacaagattgctggattctccacccacttgatgaaacgtatccagaagggaccagtccgtggaatctcactcaagcttcaggaagaggagcgtgaacgccgcatggactttgttcccgatgagtctgccatcaagactgatgagatcaaggtggacaaagagactcttgagatgcttgcttctctaggaatgtctgacactcccggcatctctgcagtcgagccacaacaagctatggcaccaatcgctgctttcggtggtggcagggcacccagaagatactgagatggctttgttatcatcagccaatcaaggcaaacgactggctctcttttttcacagttagggataagaaagacatgtgtgttcttggaaagtttattgtttcttttgattcaagtttttatgtcttaaactcagagtgagactctttcgtattaatgggttttgagttatgtggaaccaaaattggagttaaaactttcgatagtaacaatatcttttgcttatcagatccgagttgattcatgggggagaaaatatcgaaattcacctgaaactttctcgaaagttgggttaatacttatttggactttgagaagggcaatttggtaaaatttcaaaagttataaggattatgtttcgttataaccagagagaagagatactagagagaagggaaagatagagaatggataatggagggagcgtgttgtcgctctctgctccacacttcccttactccgccaccattctccgacgtcactctccggtggcttccatatctttctcccttaagcaaccaccaccgcaaccaccagaacctcctgagagtcctcctgacctccgccgcccggagaaatctattggttcttcttcatcttcttcctctccttcccctatcccttctcctaaaacccctcttaagattaatccactcaagggtttaaccaatcgctcttctgtgtctcctcttgttcaatcagaggtttcgagtaaagtttcttcctttggctcctctctagcatccaagctacgtttgtccagcaagctctctcctcctcctcctcctccacctccgcctcctgttgaggaaaccacccaattccgagatgagtttcggagtgacacgaaaccaccggaagaagaaactcgaaacccgcaacaggaattccgacaagaagggaagatattcgttggtaatttaccgacatggataaagaaaccagagtttgaagagttcttccgacagttcggaccgatagagaatgtgattctaatcaaaggacatcacgaggtcgagaaaaacgcgggatttgggttcattatttacgcggcagagaagtctgcaatgaaagctgtggagttcgacggcgttgagtttcacggcaggatattgacggtgaagctagacgacggaaagaggctgaaaacaaaggctgaacagagagtgaggtgggtagaggaaggagaagaagacacgaaaatgtctaataagtcgtcgtggcatcaagagagagaagggtctcgaaagtcactacagaggattttagataccaatggagataactggcaagctgttatttcagctttcgagaagatcagcaaggtttgtcattgttaacatcaatcacttttgctctgttttttgacttatcatttggtcaattgatgaataatgtaaaaagtctcacttatacaatgtttatactcagccttcgaggacagagtttggtttgatggtgaagttctatggaagaagaggggatatgcatcgtgcacgtgagacttttgagagaatgcgcgcgaggggtatcacaccaacatcacgtatatacacaaggtacaaaatgtgttacatctcttgttcagattctgcttagtcaaacatttcatggataaagtctttgttatgaattggttcactctcttgtctcatttccaaagtaaaattgattggtatcttttgtgtaattagtttgggattcctcaaaggttaaaagaggatttgtttcatgcagccttattcacgcttatgcagttggtagagacatggacgaagcactgtcttgtgttcgtaaaatgaaggaagaaggaattgagatgagtttggtgacttatagtgtaatcgttggaggattctctaaagcgggacatgccgagtaagtaaaatattgtgcctgcctgtattggtaaacgttgttaatcattgtatatgctaattcgatctgatactctgttgtctttggaagagctgcagattactggtttgacgaggccaaacggatacacaaaacccttaatgccagtatatatggaaaaatcatatatgcacactggtaagcattgatatgatttctgactctattagtgatgtttgtcttcattctaaaagattatggacattttctcagtcagacgtgcaatatggagcgggcagaggcattggtgagggagatggaagaagaaggtattgatgctcctattgctatctaccacaccatgatggatggttatacaatggtcgctgatgagaagaaaggcttagttgttttcaaaagacttaaggtattatttggctttagatttggattctttcttacttcctctttagaatctgagcaagtgaaaagttgatttacttgttttgctataggaatgtggatttactccaacagttgttacttatgggtgcctcattaatctttatactaaggtaaggggaacaatagtgttgtgtataaagtgaaaacattcatcttggtattattgtgtcttgatgcttgcctcctgttaggttggaaagatttcaaaagccttggaagttagtagagtgatgaaggaagagggcgtaaagcataatttaaagacttattcgatgatgattaacggatttgtaaaactaaaagattgggccaatgcgtttgctgtatttgaagatatggtaaaagaaggcatgaaaccagatgttatactatacaacaacatcatctcagcattctgcgggatgggtaacatggatcgagcgatccagactgttaaggagatgcaaaagctgaggcatagaccaaccacacggacatttatgcctatcatacatggatatgcgaaatccggagacatgaggagatcactagaagtttttgatatgatgagacgatgtgggtgtgttccaaccgttcatactttcaatggtttgattaatggtttagttgagaaacgtcaggtatgtttcacgaatctatgtcttgatgttttcctatagagattatctgattgaactaatctcttgtcaaattatttttgtagatggaaaaggcggttgagatattagacgagatgacattggcgggtgtaagtgcaaacgaacatacttacacaaagatcatgcaaggctatgcatcagtcggtgataccggaaaagcctttgagtattttacaaggcttcaaaacgaaggtttggatgttgacattttcacttacgaggcgttacttaaagcttgctgcaaatcaggaagaatgcagagcgcattagctgtcacgaaagaaatgagtgcacggaatatcccgcgcaattccttcgtctataacatattaatcgacgggtaatgtatctggttttgtagccactttttggcctgcttctagaattctcattcgtttccctctggtttattttagatgggcacgaagaggcgatgtatgggaagccgcggatttgatacagcagatgaaaaaagaaggtgttaaacccgacattcatacttacacatccttcattagcgcttgttctaaggccggcgacatgaatgtaagtttccattcaagaagcagattcttgtcacgggtttgtaacgagaaataaaacttttggaaatgtttggcagagagctacacaaacaatcgaagaaatggaagcactaggtgtgaaacctaacatcaagacatacacgaccttaataaaaggatgggcgagagcatctcttccagagaaagccttaagttgctacgaggaaatgaaggcgatggggataaaacccgacaaagctgtgtatcattgccttctgacttcgcttctgtcgcgtgcttcaatcgcagaagcttacatttactcaggagtgatgactatctgcaaggaaatggtggaggcaggcttgattgttgatatgggaactgcggttcactggtctaaatgtctgtgtaagattgaagctt

SEQ ID NO: 1405 - DNA, 44867 bp, Arabidopsis thaliana
ttgatttggtacattgttcaagatgtagaatcaactggactcgtgatggtatgcagatcttttctgccactgttttttactaatgagaaagttaagacataaatcttattccagttcacttgcacaaacttgttaccgttccttccaccatgtttaactcgttttcctatttttggtttataaataaagttatcgatccgtggccacatagagctaaaactgtgctttggtagctgttttgccatttaacaccaaacttttaagtaaaaaacgtactgaataccaagtatttctaagcttctactgatagattcttctgcattgtcattgtttttgatatgtagatgggatcctgctccttgaagttaataggatgcttcgtgccggaggatattttgtttgggcagcacaacctgtatataagcatgaaaaggccttggaagaacagtgggaaggtatcatccgtgcaccttaatatatcatttcagcattcatgaagtgtcagttttgcctatacaaacattccaaccaaagctcgtttttgctgaaaactctctaattttctagggagaaagctctaaaagctactacctacactatactgttgaattaaaaaaacatccatctttgcttcagtttgcctatcagaaggcatttagagaaagtttcttttggtcttgcaaggatatatattgagtctcttatttgagaccatgcttgtatgtggtttagtaagatggttttttcttttcgtttttccagagatgctaaacctgaccactaggctgtgctgggttcttgtaaagaaggaaggatatatagctatctggcagaagcctgtaaataacacttgttacctaagtcgtggtgctggagtcagtcctcctttgtgcaattctgaagatgacccagataatgtttggtatgtttccgatgccttcaactttccacttcttttagctgccaaattaaaaattaaacatcgagaaactgctttggttcccaatcttgacattgactgttcgacttattggtggaccttgcttctattccttaggctaatagttgtttgattcagaaacttcttgtatcctaggggtttgtcacctttcaacgattctgtgattatgttaggtacgtggatctgaaggcatgcatcactagaattgaagaaaatggatatggagcaaatcttgctccttggccagctcgtttactgaccccaccggataggctgcagacaatacaaattgattcatacatagcccgaaaagagctatttgtagccgaatcaaagtactggaaagaaataatatcaaactatgtaaatgccctacactggaagcagataggactcagaaatgtcttggacatgagagctggatttggcgggtactttttcttatcttatcgctctcttattagaaacttcatataatccggagtttctaatttcttcttctttcttttttttttggcagatttgcagctgcattagctgagctaaaggttgactgctgggttcttaacgtcatcccagtgagtggtcccaacacattgcctgttatatatgaccgtggactgcttggagttatgcacgattggtaaaaaaaatcttactccaaaaatacaaccatcttaaacttattggattgttatcccatgccacactcttttaattgttgtcacgttttcctcgtttgaatctttattgaggcctagattacacaaaacattgtaaattggcacagcttaagacatttatatttgtctttgcaggtgtgaaccttttgatacttacccaagaacctacgatttgctgcatgctgcgggtctgttttccattgaaagaaaaaggtaataacagtcactttgctttgccaaaataaagaagaatcttcaaggacattggagttattataaactttgttttggttggtggccttgttcagatgcaacatgacaacaatgatgctagagatggaccggattttaagacctggaggacgtgtatacatacgggacacaatcaatgtaacgagtgagcttcaagagattggaaacgcaatgaggtggcacacgagcttacgtgaaactgctgaaggacctcactcaagttacagggttctcttatgtgagaagcggtttgaatcgtctgagaagcgtcgtaccaagaagaggaggaagactaaaggaaaaagagcttgacattttcatagaatacaagtgctgggctagaattttctggggatctttggatcaatggacaatggttagtttagttgggaggctttttggaattttagaaaaattagggacctgaaacagtgaaactgtttgtgaggttttggcgtttaaccctctttaaagttgattgaaaccggattaaactcacttagcccaaatatttcacttgtttattccataatttacgaagagtcacaagacaacactgtttgatccatgatggtatgtttgtcgatcaaaatactctcatccatatacctaaatcaatgacaaatgttgtaggtctacataaactggtgcacaactgtgccttgatttatttaacggctacattagaaattcaaacgttttgatattactatatgtttaaagaagtcacaaaaactaaacaaagacaaacaagaccaacacatcacgaggattcttgctttattagtaatgttgcgattcgagattaaggcttcatagcatagctaaaaccgttgacagtgaatcctccatcgacggatatgacctgtccggtaatataagatgatgcgggaaggcagagaaaggcaaccaacgatgagacttcctctggttctccaacgcgcccaagtggggtccttgaaactacagcctccacaaattctttcttctcaagtagctgcataagaacaaaaaatcacataagtgaacattataagctacatattcatagtattgatctgccaagccctacccttatcctcctacagatttatcaatctaagtgaaacaatgttccatatgcgtatcttatagtacagtatattataccgtttccacaagtgaggtcttgatgtaccatggcgccacgcaattggttctgatgttgtcgcttgcccactcgcaagctagatttcttgtaagctgattaagtgctcctgagaaaacaatcctaatgttacctactttaaccatcctttattttccgtttctttgaataatgaagaacatagactcacctttagttgcaccatagatagatccactgctaagatgcaccaggccagctacagaggagatgaacacaatgcttccgacaccagatgcttttagaagaggatgagcaatttgagataaatggaaagcggattctaagttggtcgacatgattttggcatattcctcgcttgagtattcaactgttggtttcctgacattagttccaacattgtttatctgaaaacagaacaaagttgagaaattttcagaagggcaaaaaatggacttatacccctaacttgtgccggtgatgtttaacatgttatataacagatcttgcataataggtggaaacttacataagatcaacaagcatcactatatgtttcaacgataaaccgtaagccttagattacttgtatggaattgacagatagcggatcattcaaggcaaaaccaccacaagtataaaccatttcaatgctaagaccaaacaaatatagacacctgataaaagtgtggcagattagttcgaagattgttctgctaatacgatatatgatttcaagatttggtgaagattcctccaatgtgtagaaaacaacaaacttttgcaggagaagggaacttacaaggatgttgagcttgccactgaaggcagaagaagcttcctgaatcaacttctccctctgatccctaaccgaagcatcacaaaccgaaccagacacgactaaaccattcgctttccaatcattcaagcatgcatttagctcttcctggttccttgaacaagtatgaacttttgcaccaaattttgctagttcctctacaactgctctcctgaatagtatacgccggaaaacaaaaacagagattatgcattcatatctatattcatgcaatcacagagatgccataaattcgattcaaatcttgttataaattgtcaatacagagactcaaaagttttatcaaacaaacacaaaatcgctgtaaaagagcttcgaaacaatcacatgagaaaccaaatctcttatgccaatttgaattctaatatttatcaaaacaacagaattgcgattgcagaacttatccgtcttaccggagaatacttgacggtggtaaagaatttagtcagtcgtaagataatggaagcgaattatacaaaagagaggagcgacaaacccgattccacgagtcccgccggttaccagagctgttttcccggcgagagaccatcttttgtcagtttccattgtcacgctcacgcactctcctccttggaatctctaactctctttttgtggatgtgtgagtgaactaaactggttggctcaactccagttgagatattaccattgggcctaaaattacgatgggtctgtttatgtgctcaaagcccatcatgttccttgaaattatacacataggacgcgaataagtaaatttaggttttggtttggtctaaatgaatttacacacggagagacacgacctcaatgtcataatggaaaaagaaagtaaatatttttagaaagtagctatttgactttggatgcatcttaatgcacacggttttgtgaaggtgtgtacatgcgaagcagaacaaatagccaaaaaaggaaagtacattgagacaagagaaagaagaaaaggttactaaattagtaaattctaatggacaaatcattaaaaaaagagctaaaccagaaaaatgaattttgatgaataatgagagagggaagcatcaagcatgagcatgtgcattctgagctctcctttaaaggctctctcgtctctctgtattatcttgttttacactaaagaagtcacctatttgccactctatcttcgaacctttcactttcctattgtatgcattttgatataaataagacctcttaaacattatagatgtgtaatgatggtgcaacttcaagttgagtttcttgaatgggaaagcatgacaacagagaatttagacttttcactttacctgtttgtgtatataggtgttatatcaacacacactaaaataactttggggtacattgatatattagcttttaaggtaactattgaaatatatattcttaactatagatataggttattacaataatatccttataattattgagactaaattcaaaaaaaacaaatcataaaatcatcacaaacatttttataacatatttaccctcaaaccttaaaaaataaaagtgagagaaaaccaaatagaaaaaaataaagtaaagaatgaaattgagaatgataaagaatgaaataagagcacattgaattattcagaagccgaatttcctaaagaggaaatgatgttacagcaggtggttacaagttacatgacataaattctttttattctccttttacattcactttacattttttgtcgagttaagttctcttgcagttgcagagcagagtctgagagttttttttaattctctgttttttttttttttggttagacttttggttcagtctggtttcgatgcttcgaaatatattaagtcaaaaaccatatcccatgaggtttcctcttttagacaacgttgaaattcgatgccctctcccttttaacaccatattttcctttttaaccatcggtttcattctttctttctctttctttccttaaatgacatatataaatttattccatttctctcttctatacaaacgttagcgtatgtttatattaggaggtgtaaattgtgaaaacttaaaagaccactctcacttccttcacttagattttacccttctcctcttagttggtactagtcccacagtcacaacagaatatgtatatatatacatgtaacatctgtaatagtatgttcatatatataatatatatatgcaagttggtgtgaacaaacaataatcatctgttcctgcatatgctcattacatttctatttaattcgatcattaatactttgatagtccattttcctgtttaccaagagaaataatgaaaaaatatatttatcactgttcagtatttgtttccagatacagttttattgatttataaaatttcgaagccaactagttagaaaagtaatttttgaagttcctactatttccaaacatataaaacacaatgattatatactgtctttcatgtgccaaccactgatacagcaatatatgtaaaaatgttaatttagattggagcttatagtaaacattgattacgttacggctatttacaagtaaaacccaaatacccaactataggcttcttttatttgtcaccacccaattataggctatatacatcagttatcaagatttcagttaggttatatataatttatacttatttcttcttattcttaaattgcatcgtaagattatgataattcgtctctaatttctcttacggttattaggagttcacatggaataccagactaattttcatcaacgataatatttttttatttttttttttgcctaccaattatttagtgttaatttaagtttgtcatcaccaagacactccaatcaccagaccttttcaaaattattacggcaactccaatcaaaaatctttcgaataggcataaatattgaaaaccaaatcgtgagaaagttacatcattcgtaagaaaaagaaacaatcaaaatattttaattgtcttatgaattagagcaaagactatacgtgttgactttatccataagataaatatattactatatcaaagccaacactacagaacctactcacttttcactcttgagattagagacagtttaacttcttctttttggcaatcacattaactattattactttttaattacttaagctagttaaccttaggcggatcagctcctagccttagctcaagatccaactcctcatgatggccgttgatctcggaaattccaatgaccaaccctaacatcattggaaatcttgacacatccgtctttgccctcttccatgacgaagatgatccgttgattagttgcttcttccgaggatcaaactcagtactcagtagaccgaccgataagtcagtcttgacttcaccattgtcatgttcatatcttttcatagaactttctaaaacgttgttattacaaacatcacttatctccctcttggttccgttaggctttcttgtttcttcttgaacaagaacctttgatcccacatcaagaacttgttgttgacgatcacattcaggaggtgtggcttggtcagttgatgaaggtgataatgattgttgtttgagtcgagctcggtctcttcgatgaacgttcatatgaccgcctagtgcttgcgccgacttgaactctctcccgcaaaagctgcatgagtaagacctcggtggccacatgcaaccacctccgccgccatactcctcagctgacgcaaacgctctctcttccctaaacggccaaaataaagtcccatccgaagatggcctcgtcaccatcggtctaagcttcatcgacatcaagcattctcctctatccatcatatgtaagatttttctatgcagtagaagaagttaaggtgagtgttttttttgtgtttatttatgtgggagtagtgaagtatgtagatttagacgcacgtagacttatataaagagagacgcatatagatagaggtatgtgtgtgtgtgtgtgtatatgactatatggttaaagcattgaatgtgagaaagcaacgtggagaaccatgagtaaatagggagaggctttgatggggaaagttctcttttactttagttactcgtatgtcttcactctatacatgttaaatgtttagatattaataattagttggtgtgagcttttgatttgataatagttaaattaatgccagacgcaacttaagttttccacgagtctacaaaattaataagtcagagtcgatattttctaataacacgtagctaataatatgacaaaaactatggtttaatttgaaatctttataacaattttatggagtctaaaatatacaccatatatcatcggaatcatcggatgtatgtggctgtgaggtacaggggcccaacaattgatttatgattaattatattgatttagctaattagacaatggagccgtgggatactgacaataatttatcgtgtgatttatttacaattattatacggatgaaaagtagagatatttgcctggaatttagattatttttatcaagacgttaattgaaggactcatatgtcaagagattctttctacctatcattgtcgccatattacgggttttaagacagtacgagagaaataaacaaaacgagattggagtacaaactacaaaatatccaaaccaaagtgacttaattagaacgcaaaaatatattttttgattattatacgaagaatgtgataaaccgctaaaacatgaacttcgttttcgtaattttgttgagattgttgcatcaatttttttattatttttttggtgtcgtaacaagacgccaagaccttttcaataattgaagacattatcacatcatttctcggatagaagaaaaacccacttacataagaggcttttgggcttgcaatggtttacgattcagatgggccattgggctcctaagaaacttttagactttgatattggatttatatagatatttcaagcccaacaataactaagaaagatccaagaattcccaagatcaaaataatttagaaaattgaatatttttgtaatatatagattacatgtttattatacatagattaattgttcaaaatgatgaaatatcttttatgataaattatatgatcttaataattaagaaaattaaatatattttgttttttatgacggaaagacagttcatagttatactatataccaatttaattctctttattaatttataatagcattttatatagtataatattacattaattagaatttaaccgaatggtacacaatcaattttacagagacccctcaaatgaaaaactaaagacattgttttagaaatccaactttaattggagggttaagatatgcttaatccttaccaaattgcatatgataaataacgcgaatgtaaataacaagactgatatacaaaacataaatcagatttatcataacaacaaaaccatgctccacaactattatatatagatccatcgtttttagttcgcgtcgaattttgttgtgcttagtaataataatccatgttctggagccattgatgattcacgagcatttcctctgagttcgtgaagaacccatcatagcagtttcttccgtcggcattgttcaaaacactctcgtcgacgaaattggtcgtggccatagtcatctgattcacaaactccggtatgttgttaagttgtgatccgttttgattagagtatgaaaaattcttcatctgtgacccgagaaactcaatctcttcttgcaaagtcacaacctaaaaaaataaacccaccaagcaacgtgatcagactgcttgaaatggtctaaaatctcaacaagaataaaagaatatcgttcaaaactttaagagacctgttgatgaagagcgaagatgtgagcaacgcagccataaacaggatcacgcatgcgagagagagcctcgtaggagatggtgatagcagcgatgtttctttgatgttgaggcaaatgaagcaaatgtttagagacattacttgcgccgaagactttgtgaaccgctgcgaaatgggaagaggcttgttcgtagctgaagtaaggcgagaagacgcagtcgcggttgcatttcctccttagaaacttgcatgctccacaagatgatccatgacttgccattttttcttttactctgttttgttttatgtttttaccttttgttagattgagacaaatcacgttggtttttataagccccaccactaaaagttcttgaaagaagggcaaaagagttcaattttgagataaacatcaatcatttttataactttatagtattttacttacacttgattgatcaatattctcatgaatagtaaggtacaaattagacactatagttaaattacattttcgttttttttttttggtacgagtatatatgttgtatggaatacatatatgtacgtcgaattttcataatatccagtacgtgtctagctagtgtctcttctcctaatataaaatttgatttagcttattttctgggggtctgcatcgtggcctacattttcatgcttgttttgggcaagcccatattttatttaatggcttaaagtgccttttaaattttcttcaaaaatcatttatatatatgcttaggacaaactagtctttttttccttatttctcaactgttaaatagtctttaggctttacggaaatgataaataattggttgggatacaaatgcagccattttgcatggggtgacacagacaaaaggtacagtgtcttagaaaaggtcaatctccaatcaacttggttgtacattgaacttctttatcgaagccaatccagatttttctttccttattagtaatcaaaccgagagatatatactatttgatacgaatagaaattatacatcaaaacaaataaaaaagtcttttttttttttttttgtaaaatgaggaaatcaaagcctaatgttatacaaaatctataataattagcattactccgatccacacatagatttctggtctgatttagaaagatttcaagaagttgttgctattttctctcttttgaatatattagtattgctaatcataatagatctcataacaagataacattagctttatcactaaaaaccagaatatttaaattgttctgtgtatgtagttgttttcatttgttggaatcaaacgctgtctgatgtcgaaattaatcaagcccgcatctagatgccagcacacttaaaatcaaaaatacattttctcgccaattactcgtcggattagacaatagtcatatagaggttatgaatcatcctcccctatatatatctacgactatgttgtcttgatagatcaataattattgataacctaaatgtctaaatttagtgtccatttgattttaatcaatctataactgtgattattatatttataattggccctttctttgtttgccacttattgtgttggatgcgcaaaataagaaaattaaacaccaaaaaaaagtcggcgactatgacccatatgccaataacattgaacctactgttgtaagtgctcccttgcaaacctcattgtagctagtttttattttctccgtaactttaacgcattcaaaagaaccacattttattattgttttccaaaaataggacactatatttctaattaaaaccagttaaagaaaccttcttcctaaacatttccttacagaaatgatgttaattttataaaacgtgttcatatactaatggaactcgaaataccaaatgagctagaaaatgcagactaagacccaaatgccaataacattgcaaaacatatttggatacagccttgggaagatgtagtcaagcacggaagaaacaaagagacgtacaaaagggaaaaatggggcattgggattgggactaacgaggcgttcaccgatggtacttaccactttctactttcgagatagctacatcgtttgtctttaatcacgcatgcaatcatatattaattagtgacattattttaatacgaattataactttaacatttcattcttcgtttctatatgatattgttatatgtgaatcctacgagcctagtcttcctgtatgtgcgtgtcattaggctcattcataattaattctcgtttctagctatcttttgttttggtgggtcttaaagcctattgcccaaccggtgtcatctgttttatggactaaattatgaaaacatttttaatttgtatcttctagaacttcgttagtagttatataacactaccccaaagaaaaataaaacagccaagtgacggacaaaaacacaacaaatattctttttgctattatagtgacctacggattacggatggtttaaatactagctagttggtgtagtcgaccgattttgttcacaaattcgattattacattgtttttaacatttcaatttgttgatatgtatatatatatatatatatatatatagctacgtaccgattagttgacctatattaaaaccggtctagtcgtcgattattagaagaatgaattatgtatgtgtctcgatgaagcaacgtaccatttgactttagtacgtatatagactatagtataacttcaagaatcgcacatttttgttcagatatgtttctcatgcaagttgttgattttccaacctaattttagttaacatagtcacacctgattaagatagagaacaattggaagaagcaaaaaacctcgcaccaagtcaacgacgaagaactaacacttttaaatatggaaactttcaaaacttaagaaaggatgttagggaaaaacatttatcgttttaattaccacatcttgtcttgcctttgctgtgcaacatttttcattttatttagttaacactatatatttttaattaataattgggaaattaaataaatgttcagtttaataaataaaaatattatttattcatataagtttttctattacatatagaaattcttagtaccgattgcgttcaattgacaaagtccaccatagactgaaaagaaaaagaagcccaagagaacccacatatttgataaaccaaattgaaccacgcaagcaaaacgtaattattcgatgaatgtgaaaacggtcaaatgaatcaaatatgttaaaattaagggccgaatatccacaaagtactatgatgatgtgacgggatgttaaacctgtcgtctgtcgaccatatataaatctgttagtacaaatgccaacaaacaaattaaatctgtcgatcatacagtatttaattttccgtaataatacacatgccaacaaagcaaataaagggtccgtttcctattctcacaatctccacacacgtacatgttacacgtgtagacatatggacacattccaaatgtacgcgcatacataatatgatcttcatatttttaggtgtacacgtgacctaatattggcgcagccaaaccgaaaattcggaaaatcaagttggtgaaagttaagccatcaaattgtttcgattcgttgattgtaaatcttacgtgtagtcaatataaaaaggaatcagagaacacgtacgtgacattcagtatcttatcttatgtgttcatacattgacctaaactaattattaattaaattgacatacaaattaatgcgttcataaacaaaaaaagtagttgcgaaactgataaactgccgtgttattgcattagagacaaatgactccaaccaaccttataaaaacaaactttataatccacaattttccatattcaaacaaatcaaaaactcaagaaaccacacacccaaaaaaagaaacaagttaagttgtgatggagtcatcaactacaacatcgtattcagttgtgtcggagctagaaggaacactactgaaaaacccaaaacccttcgcctacttcatgctcgtagctttcgaggcttcaggactaatccgttttgcgaccttgctgtttctctggcctatcatagcactccttgacgttttgggctacagaaacggtagccttaagttaatgatcttcgtcgcaacggccggtttgcacgaatcagagattgaatcagtggctcgagcggttcttcccaaattcttcatggacgatatcagcatggacgcttggagggcgtttggttcgtgcgataagagagtcgttgtgacaagaatgccacgagttatggtggagagattcgctaaggatcatcttagcgccgatgaggtcatcggtacagagattgtcgtaaaccgtttcggttatgctaccggtttgattcaggaaaccaatgtggaccaatctgttttcaacagtgtggctaacttgtttgtggatcggagacctcaactaggtctaggacgacatattatctcggattctccaactttcctatctttatgtgaggtaagtactaaagacaacataacgttaggaattcttttaggttgttttataatttatgaaagcgttactatcatttttctaatctgaatgattgcatatgttatgtacatgtaggagcaagttcatgcaccagttccatcgaactacaacggtcataaccagcggctacatgtgcagccgttaccagttatcttccacgatggacgacttgtgaagctaccaacaccagccaccgcactcatcatccttctttggatcccctttggaataattctagccatgattcggatattcgttgggttcttacttccattatgggccataccttacgtctcacggatattcaacactcgattcatcgtaaaaggaaagcctccggcacaagcaaccaccggaaacccaggcgtactattcgtatgcactcatagaactctaatggatccggtcgtattatcctatgtgctcggacgtagcattccagctgttacctactctatttctcgtttatccgagatcctatctccgattccaacctttaggttaactagaattcgagatgtagatgcggagatgatcaagaaagaactgtctaatggggacttagtggtatatcccgagggaaccacttgtcgcgagccgtttttgctgagatttagcgcgcttttcgcagaattaaccgacaatattgtgcccgtggcaatgaactacagagttggattctttcatgcgactaccgctagaggctggaaaggtttggacccgatcttctttttcatgaacccgagaccggtttatgaggtgacgttcttgaaccagctcgaggtggaggcgacgtgttcgtcagggaagagcccttatgacgtggctaactatgtacagagaatcttggcagctacgttaggctttgagtgtactaactttacgaggaaggataagtatagagttctcgcagggaacgacggaaccgtgtcgtatttgtcgtttctcgatcaagtcaagaaggtcgtcaccactttcaaaccttttttgcattaatttacaagttattttgataattatatactctaaattacgcgatcactgattgcttaagttttcatttttaaagatttttttgttgaaagtatattatgactacggttttgtgttttttttttccttactttataaattgtcgaatgtaatcgcaagtatattaacctttttgttaaaagttgaaattaaatacatgacaacgtttttacatatctttcaaaagagagcccaatagaataatttccttgggacattttcgctttatgaaaatacgttgacaaaattgtccaaatattctatatatctaactacttgttagttaaatttggttatgtttaatttacatcacatcttaaaagaatgtatagaattgttttcaatcatacaaactaagggtgagaaaaataatggttggtaatgcacagacgattaatagtttggtggtggtagctaagaaattgattaaggaaacttgagctgcaaatatcatcttataacttttttgatcaaataatagttaattgcgtatttggttggatgatgacaatctctttgaccgccaaatttttagctgccgccttcccgttagagttggccaacttttagattcgccacattaacaaaatagttaatagtacatgcttcagaaaacagttaacattataaaattttctagattaattaggttaataatactaaagaaaaatgttttatttgtttgttttattcttaagaagaagaaacgtaatgggctttagtatctctaacttgaattctgttgtgggcttttctttaggatcagaagtaggtttcgtaagcctagtgttgtccttatacgggaatatacatacgtataaacatacgacacaacatgaaatgagataaagagagtgaccaaaaaaggctgcaaaaaggtgaccaattcaactctatttctttcttacaagttacaactctttcaaatcaattattcaatctcactcttttactatctgaatgcatttcagttaataaaccaaaaggattgtcttcataagctgcttttatttttgcttaagctttgatttagtaaaaactctgattaatttttagtaacataattacaatgctaataacaataataaaatagttaattttcacaagttatcgtattataatatatttaagaaaacgttttagaaaaagaaaaatgggatagaaagtagaaaagagtaaaaggaagagaaagagctaagcttctctccctccttccatttccactcgatgttcagctgcccaagctaagctcggatctctatccagctttggtattttccttagccttgagcttctctccgcgtaaatataattttttgtttctagattatctttccgtttctatctcgaattgctgcttttcatggatctatgattgattagtccttaggatctttaaaaactttcaatttcagcttagatttcaaatcaggttttctgttttttcatattcataatctgatagtatcttctttgtgcgttctgatctatttcagctgatctttatctgcgctttcgattgatgtttgcatcagctttgttgttgatcttcttcgtaatagactactaatcttctcaatctaatttttattctctgttggttttcaggtatccagcgtctgacagttctggattttgttttttttttctttccttatttagggtttgttttcctctttcgtctcttttaattctttatgactatgaactttctttatttcaagctgaagtttttggtgtttaggtgggagcttgatgtctaaattgttactgtcagtggtttaattagaaaagagatgagttacacgagcactgacagtgaccataatgagtcaccagctgctgatgataatggaagtgactgcagaagtagatgggatggtcatgctctcaagaaaggcccttggagttcagctgaagatgatattcttattgactatgtgaataagcatggtgagggtaactggaatgctgtgcagaaacacaccagcttgtttcgttgtggtaaaagctgtcgtctaagatgggctaatcatctgaggccaaatttgaagaaaggagcttttagtcaagaagaagaacagcttatcgttgaattgcatgccaagatgggtaatagatgggcacgtatggctgcacatgtaagtgttttgtttctgataaggatatggttccttttgtaaaagtgtgtttcgagactaatttcatagagtttttgtttgctccagttgcctggccgaacggataatgagataaagaattattggaacactcgtatcaagaggcgacaacgagctggtttgccactttatcctcctgagatgcatgttgaggcacttgagtggagtcaagagtatgccaagagtagagttatgggagaagatagaagacatcaagatttcttgcagctggggagttgtgaatctaatgtcttctttgatactcttaattttaccgacatggtacctggtacttttgatctagcagatatgactgcctacaaaaatatgggtaactgtgcaagttctcctcgatatgaaaacttcatgacaccaacaatcccctcctcgaagcgactttgggaatctgagttgttgtatcctgggtgtagcagtaccataaagcaagaattctcgtcgcctgaacaattccggaacacatctccacaaacgatttccaaaacttgcagcttctcagttccttgtgatgttgagcatcctctctatggaaaccgacattcacctgttatgattccagatagccatacccctacggatggcattgttccttattctaagcccttatatggggcagtgaagctggagctcccttcattccaatattcagaaacaacatttgaccagtggaagaaatcgtcatctcctccacactctgatctccttgatccctttgatacttacattcagtctccaccaccaccaacggggggagaagagtcagatttatattcaaattttgatactggtctgctcgatatgttgcttctggaagccaagatcagaaataatagtacaaagaacaatttgtacaggagctgcgcttcaactattccatcagctgatcttggccaggttactgtatcccaaactaaatccgaggagtttgacaattcccttaagagcttcttggttcattccgaaatgtccacacaaaatgcagatgaaactccaccaagtgagttactattcaccttaccatcacttgaaatagtttgttgaagatttcatctttttccctagaattctatttggtatcctgattttactttttgagaatcatcacttgcattaatttgtttcttatagccgagattttgagctgatcaagaactcacctaaacttaaaaaattatgcagggcagagagaaaaaaagcggaaacctctcttggatataacaaggcctgacgttttgcttgcatcgagctggcttgaccatggtttagggattgtgaaagagacaggtagcatgagcgacgcactcgcggttctccttggcgatgacataggaaatgactatatgaatatgagtgttggggcatcctcaggagttgggtcttgttcttggagcaacatgccacctgtctgtcaaatgacagaactaccctaacgagcccgggaaatcctccactccattggtggtgtggattggattagagccgttcagaatctgtcagttctcacttctcatggtcatggactagcaactgccaatgcaagaacaatatcttttctttgagccttttgatcacagccgatactttgttggcttctgtaccaataacccataatgacgattcatcaggaggatgaagtggttgattttgtagaactggcttctttaaggactatggtatacatacagacagttgatttgattcaatgttaaacagagaattgtttcttttaatatatttctctttggattaagtttgatttcgctttggtttatcaacgactcccttcggctattcgtttgtagactagatagaaaaatgaaaacaagataacaccagacgatcaaaaaattaaataaagacagagagcataaataaaattagaacaaaatagataaataagaatagattcggttgtcaaaaactctatgtagaataagagcagcatgatgatgtatacgaattacgaaaatatgaattgtagcaaaaattgagtccacgctcatctctgtcaaaacaaaatctcaaagcgtgcagctcgaggaatcggataggttaggctgtgggtttcttggttctgatgacgtccttaagatcagcaaacttcttcttgcattgattcatcgttttccctggaacagctgttgctactctctcccatctttggtttgtctcctttgggaacgtcttcaaagcctgtaccagagctctttcttgcacagcagaccaaccgtctgggtctgaaccagatgctgctgctggttcagagttgccgttactgttgttgttctctttggtcttaccgttctgttctgcggtctctgttttggttgagttgttgtcttcatgagctttggtcggtataattggttctccgagttcctctcgtgtagagagaggagagttgattgaagcggcaggtttcctattctccagaaaagagtcaaaagctttagctgagtcgggtttctggagaagtactgttttagtagccttgagaatttcctccacagatcttcctgtaccaatgtactctgatatgacttcccatctctgagatgttccttttgggaacttggttgttccttttctcagcatgtcaatctcttccttgctccaaggtttctctttcttctcatgagtagcagtatccactttggcttctacatgaccattggcttctacatgaccattggcttctatatgaccattctgcttaacagctacttgaacttcttcttcttcaatctctattttatcatcatcaatgttgctcccattcttgatcacctttgccaaagccatcccttccttgttttccatcttgtcacacagtttccgcaactgctcggtgttaagtgacatgcatagatcttccacatgttcatcagatatgccaagcagacgctgggacagaacaggggcggagagaactctgagccgacttcgttctttgcgcagaagcttcttctctctttccttggctctcttgtgcagctgagcagcctctgccgcacgttttgcttcttcttcttttcgccttttctcttcttcaatagctgcagcagcagcttcttcctgctgcctcttggccataacttttgcttctttcttctgcagcttcttagccttttcgtcatcctttcttttctgtattcttatgtcttttttatatgcgttgtccacaagagtcctaatccgagcatattcctcctttctagccttctgagtttttcttgcattctctctctccatccacctcttttcctcgcgggattcagcttgctcgatatcatgctcctcttcttcaggaaactctctccagcttttaaaagtgtaccaagtactgtagaacctatcaacctctttaagtggtgtattttcatctcccaaatctggtaaaggcgaatttgaccaccttgcgtttctcttaaatgctggaccaaaaaccttgaagaagtcttggggagcacaatcagttgggactttgtcatcaaactcatctgtagagtcaaatattcttctttttgttgagtccatcaaaacctcataagcttcttgaatcaacttgaagtgagattctatctcatcctttttggcttgttttgcttcttctgtctcctcaagaagaagtagagtagccagtttatcagggtgatgcttcagtgcagcatcgcgataactttttctgatctgatcatctgttgcaagatatcttaaattgcccaaacccaacaacgcatagtgatcatgttgtagcttccccgacttcttctttcctttgatgttatgggagtcataggaaggaatatattcaccatccttctccttagggaccttcttatcggtatcttcgttcttgcttgtggcttccttagcacaaccacgcagtttgagagcagcagaatggaaggcatgacccgcaggttcacggtttaaagccttcacaggatgacaattggaagaagcatagagcgcttgtccatccttaagctcactggagtatgtaagtagcttaatagcagagttaattccccaactctgcatgatgaaatatgtgtcagagcttcaagtccaccttgcttcaaaagtgatcaccaacgtttattcctgtaacaaagaatcaaagtacagttatatacagaagcaggtatatttccatagaaatattgacaggatacagaaactacagataaacttatatgaagatagaaacttttttactttagatccacaaccccaggatatttcaaaacgactgtctttgattagaataagggacaaagtagttagatgcacaacagaacgaagcaatcaaaaccaagagaacagtgtcacaaatccaaataatccacaagacctaaaggcattcacaaaagccttataagaaaccagaagcagtaaatacgtattacaacatcctctctgaaacttgtcaacggaggttgaaacagaagcgagtcaacaaacaatcaataactcaatacatagctcctaaaccctagttatagttaccctacttaaaatcatcaacacaaacaataaacatagaaaccctaagatttcgtcttttagggtttacctcttcaagaaaaaatagatacaaagtcagattttttaaagcgatctcaacaaaatcgacccaactcagaaaagaaaaacaacttttctcaccagaaagtgagcttgcctttgcctagattagcctgccgtaagtttctcctaagaagttatcgcagtccaaaagagacgacgaaaacgagaagagttcaataagttcaggaggaaacggcggcggcagcgcaaagaagaggaagagaaggagaaatagagagagacaaagcagtttgcttaaaagtgggaagtatcctaaacctgtttgacacactcttttcgattttatactattcaacacaaccaagcccttatttctttttaagcccattttacgtatggtcctaggaccattaaattaggcccatattgaaacatctctcgagccagagagagagagaggtgagggagcatctgaaccaaaaaaagaagttaatataatcggtgaattctcttcttcggcgttataaacgctgtcatcgcctgatcagactgcacgtctcttaatcttcttcttctgcttcgttgtaaccatcgacgcttcgcttgatcgagatttagttcgccggaaaacttcaccgaacaacaaatctgattaactaccagctcaatctctggtaagccaaactttagtttctcacatcgtttgctttttccgagtttttctcttgctcgatggtttgttcttcttaatgttgtgattcgtgaagttgtgaagatcgatgataaatcttcttcgtgtttgtttgcgccaaatgattaggatattattgaaatacgaaatctaggttttctatgtgttcatttctccttactgtttccgttttctgtgctcaagtggttatgattatccttgcacagtatcgaatggttaccactgctattgtctacatacttcgtttattgtttcatcaacacatttttcattgcgctttcataaaatcagataggatttagctgtggcggaatgatactgtaaagtctgagcttaatatcgtctaagagttttgtttctcttccatttctgctgtaattagcttatatagcagcattttgataatgtgtggtctcacttagagttgtgtgtcagtccggcgttttgtatgactagtatgagtatttacatgggtggtttggcaactgaattttgatttttggcctttaaacagaaatcaacccgagtactgagctggagtaaggtgatagacagcttgaatacattttccatcatgcagagttaggaacttatctctgccagtaggcttttacatatttttctaatactatttgtgtaccttctctctcttgcgcttctttgtagtatgagatctacatgatatttaccgctagctcacttgtgttgtctgtgttaactcatactgcacttttgtcattgttaatgttgttccatctctgtttggatcttggtgtttcagttttcttaagaatggttggttgcgtttactgtggaaatgtatcatttgttttttttctcctgcaacctgtttgccttattgtgatattaaatttccaatccaattctagatattttgattgaaacagtgaaggctctctggaaaatattattgtaatgattcattcatgtcttttgttgccacttaacagttcttaaatcagaatactttgtaatataattgtaatcttgtcaaaatattcttgttaaaacggtagtggtatctatggttttctacctttttggtcagattctgctttgttaccaatggagagcttggcgcaacttgaggcaatgtgcgagagattatacaactcacaggattcagctgagagggctcatgctgaaaatagtctgagatgcttttctgtgaatacggattatatatcacaatgtcaatacattctcgacaattcatcaaaaccttattccttaatgctcgctagctcgagtttgttaaagcaagtaactgatcatactcttccgctgaatcttcgccttgacatcagtaaacttcttatgtcctcctaaccaaataactagaatatctctttttggcatttaatatcttacttgtttctggtgttctttctgttgtctttaggggcttatattgtgaactatctggctacaagaggaccgaagatgcaatcatttgttatcgcttctctcattcaactgctttgccggctcacaaagtttggatggttagatgatgatagattcagggatgtggttaaggaatctacaaacttcttggaacaggtgattcatcttctgggggaatacagtgctttgtggacatttttttgtagaattttcagatatttttaacaagggcttgctgaatacgttgcttacatcaattttatttcaatagggttcctcggatcactatgctattggtttaagaattttggatcaacttgtgcaggagatgaatcaggttagtgatgtattgtggttgattttccatgtcacagacatgtcctaacataggctggaataactctcttttaagtttgagttcttggcatgtattgctaattgcatttgagtcatgtttttgtatattagctttgagttgcctcatatttttgtttcttttcgatctagagtagcagtctgttatagatacaagtgggaggtttgtgctgtatctaaataattgtctgttttcaccattcctttatttttttaattaaaaacatttaagatggctgttttgttagactggccagaattatatgtgcacagtgtgcatgcttttagatagatagcgtgtcacaaactatattttttcgagggtatttatttctaactttttgtttttctactgtgttccaacttaccagggtattttttttaaatgcttattgacattttttcatcccttttttgctcaattcttagcctaatccaggactgccatctacacatcatcggcgggttgcatgcaactttagggatcaatccttatttcaagttttcagaatagctttgacgtcattaagctatctgaaaaatgatggtaatatgagtcatctatgtcaaaattttcgttatattccgtcatgccaagtatgaaaacttctacataccagcttcataatttatgcacattggaatgttttgtaatcgttaagtatgtaactatctttgtcgatgtatatctgttggtcttagcataggagtggaaattttcaattgtaatgagtcagatattttcttttaaccagccgctggtcgtttacaagaattggcgctttctcttgcactgaggtgtgtatcatttgactttgtcggaacttcaattgatgaaagcacagaggagtttggtacagttcaggttgaacattaatgatcttctatcttcaatctcttttcaatgctttgtgcctatgtatttgtgtactcgtttttaaggggtgttaacttctagtgttactgataatgtttagattccaacttcctggaggtcagtattggaggattcttccacgctgcagatatttttcgattattatggtagtacagagtcccctctttcgaaagaggtatgtctttattgttatttgtttttttccgtgcttgactagaagaaacaaaatggcatcttttgcatcaaagatagattttgactaccttttttttgtgaattttttattcactctcattatgaggacaaatgattcaattgcagtaatgtcactgatgacgtgatttatttcatgtacagttgggactcagtaggtattatagatgacttacaatttgttattttttaatgtttctctgttttaacttctaggcacttgagtgcttggtgcgattggcttctgtaaggcgctctctgttcacaaatgatgctacacgctctaattttctagctcatttgatgacgggaaccaaagaaattcttcaaactggaaaaggtatgcttgatgtttttatactatgggactttcctatgtctgactgtaaatattgcgcttaaggtgttgcattgtatgcaacttttaactcttcatgactgacattccagcttctcaattacacagtctgttaacatgttatgtacagtatttgttaatattttgttctgttgcaaactttacacctcattgaactataacatctcactgatcttggttcgtcaacacaaattacttttgttggatcaggtcttgctgatcatgataattaccacgtgttctgccgtctacttgggcgttttaggctgaattatcaggtaaatttctcggttagattcctttctagtttacagattacggtttgtacaattttgtttgtgttgtagcttgaaatttatgttatgatgccatgtacttgagtaaatacacacatgttccttttttctgtatgtgacagttggacagtcttaactattcgtaatttgtgacgctatctatgattgtcatataccatttggatataatttattggtttatatggctaaattcagacattatgtaatagcatgttacgtgtatgaattcatctgcagctttcagagcttgtgaagatggaaggttatggtgagtggatacagttggtggcagagttcacacttaaatctctccagtcatggcaggttcgcaagtttatgttagtgaatgcattagcataccaattatagaccctactagtctttaaagttctggttatcctccagcatgatcgtttttagtatatagcttaaatatttggcggagattgtatcttgtttgcaaaatccatgtgaccttttttcttacagtgggccagcagcagcgtgtattaccttcttgggatgtggtccagattagtagcatctgtcccatacttgaagggtgattcaccaagtctacttgatgaatttgtacctaaaattacagagggttttatcatctccagattcaattctgtgcaggtatataacatcacttattctggaggattgccagtactgacttgtagtttttctttgatattttcctatttgaaatcccctttccaggctagcgtcccagatgatccgactgatcatcctttggataaagttgaagtcctgcaggatgagctggattgctttccttacctatgcagatttcaggttagtcttttcttcatatatgtgtcatgcagtaccctggttttgctcacatgttttgtttgattatgttgtatcttaacacaattgaactgcatctgagagtcttatcaattatcatgcagtatgaaagaactggtatgtatataataaacacaatggagcctcttctgcaatcatatacggtaaagtctactgttattctgtgtttagcgtattgttgttctgtcaattcttgtacgtgtcttcctaatcttgagctgagtgattgtgtaacaggaaagagggcaactacagtttgctgataattctgaactagcactcattgaagcaaaattgtcatggattgttcacattgttgccgctattgttaaaataaagcagtgcagtggttgtaggtaagttgatatcatatcttggggtttctttgcattttggtctgtttgaagaacaaaataatatatggattgaaatttatacgtattttgcagtgtggagacgcaagaggtgcttgatgctgaactctccgctcgtgttttgcggctagtaaatgttatggacagtggactgcatagacaggtgttacatctgttagatacaagcaatttcattaaatcaacttgaaatattattatataatctctatatgtatggttctattactgcatttctactgaacataaaccatcaatacagctacaaaatttagctaaaagggcgtaagcctgtatagccacaattagtaacataagagtgatttcattaatgattatgaaattaattttctgcttgaagtgcacctgttggattttgttttctctcaggtaagttcactacattaatctcatctctaattaatcaaaaacacttctttctgcagagatatggtgaaataagtaaacaaaggcttgatcgtgccattcttaccttcttccaaaatttccggaagtcttacgttggtgatcaggccatgcattcatcaaaagtaaatgcaaaccctgtttcttttttttattgtatttgttctatgtatatttctgatactacctttctgttgcagcagttgtatgccagattgaaagaactccttggactgcatgatcatcttgttctgttgaacgttattgttggcaagattgctacaaacttaaaatgttatacagaggtaatcttgtgttctttacttttttctagcatgccgctctacatcaacgtcacctactgttcaaacaatctatcttttgtttctccagagtgaagaagtcattaatcacacgctaagtttgtttctggagttggcatctgggtaactctgttataacctgattaagctgatgttacattagtttatatacattttcatatcgatttttttttatgttttgccgttctcgtgcagatacatgaccgggaagctgcttttgaagttggacacggtgacctttattatatctaatcacactgtaattcttctccaaggactttcttttgtggacatcattgtgcattgtaatttattacgagcaacactctgactatgtgaattgtctaattccagagggagcaatttccattcttagaagagtatagatgctctcgcagcagaacaacgttttactacactattggctggttgattttcatggaggatagcttaataaagttcaagacttctatggaaccccttctgcaggttatactttgttttctttcagcattttatcttttgcagctttccttttagaataatgattctgtctgaatctgcactgcacactcaccctatttacagttctaggcaaaatttgatatcctataaacagggattgttccacatccattttacaatatatcttataggcagattcacatagtggtcttagccagtaaaccacatttttattcaatcattctaggttttccgcaccctggaatcaacaccagattcgatgtttcgcactgatgctgtgaagtttgctctgatcggattgatgagggatttaagaggaattgcaatggctactagcaggttttgagttcatctagttactttgacatccatagacatgttacaatcttatgatttattgaagctttctctttggatttcagccggagaagctatggttttctatttgactggctctatcctgcacacatgccactccttttgagaggggtctcacattggttcgacacaccagaggtattaagttatgcattctgctccattggattgacagaacactggcctagtaataacctgagtccgtgcatagaaaaaatgattctaatccactgcttgtgattttacgccttctgccattttagtgtggttagtggtgccttcattgtctcatctcctcttcttggcttgttgatgtaggttacgaccccgttgttgaagttcatggctgagtttgtgcataacaaaacgcagcgccttacttttgattcttcttctccaaatggcatcctgcttttccgggaagtcagtaaattgattgtggcttatggttcaaggattttagccctgccaaatgttgcggatatatatgccttcaaatacaaggggatctgggtttcactcacaatactgtcaagaggttagaacatgattttgaccaatgagagctaaccattcgttgtttagtttattgttatgttataatacttaaccatcatctaatgggcagcgctctcgggaaattattgcaacttcggtgtctttgaactttatggtgaccgggctcttgcggatgcacttgatattgcgttgaagatgacccttgcaatacccttggcagatatattagcatatcgcaaggtatgtgtggcattgcgttttccacgtgcctccaataatttcatttggtgatcaaatcaacacgtttttgatattgtttgcattatctgaattatgtttactctgaattctttctttgtcgttataaaatctctaatctttatagtcttcctttcatccttcagcttacaaaggcatactttgggttcgtcgaggttttgtgtgccagtcatattaccttcatattgaaactggacactgcaacctttatgcatctcgtaggttcccttgaatctggactcaaggggttggacacaagtatttcatcacaggtgagaattgtgacaaaactgttaagacacatcaatttatcaagaaattcttaaagctttaagctgcaaaagatattcctcgaaatgcaactttctgaagcattgatatctattatcctttcagtgtgcaatagctgtcgacaatcttgcttcatattatttcaataacatcacaatgggtgaggcacctactactccagctgctattcgttttgcacagcacattgcagactgtccgagtttgttccccgaggtaactcattacactcctcaatctctctttgttaaattgaacacaataatgatgggctataatgccttttaacaaatatcctcttacaagcagatattgaagacactgtttgaaatagttttattcgaggattgtggcaatcagtggagtctcagcagaccaatgttaagcttgattcttataagtgagcaggtatgtgtaatttatacatttatctctcttgtgcagttttctgttccgaatgagctttgttgttcattcatctaacttatttcaattgatttccccagattttctctgatctgaaagctaagatcctctcatcacaggtgatgatccaaaattctatatctatatatattttacccctgagtgttgctttttgtgtatgccttagagcattattctaatggtgcagcctgcggatcaacaccagcgactctctgcctgctttgacagtcttatgacagacatatcgcggggattagattcaaagaacagagacaagttcactcagaacttgacccttttcagacacgagttccgcgttaaataaaatcggccaaacacagtccctgagccacagtctactacattaggggtctcatcaaaaagacccacatgacacagtgaaccagaaatcttcagaagttaaaaaatggaaaaacaaaaaagtagtctcgagattgtggtactgtacagtttctttattctctcagaagaaagggtaatatgaagaaagatttacgttttggtggtttcctcgcaattgtggcttaattcatcattgggatttattttgtctcttgtcagccccataacaaggttgatgtaaaacattgaaatctagggtttacttttgcaaatgttgggagcagttaggtcacatattctttgtaatggtaaacaaatctgaaagaaaatgcagtatttgttttgtttattgtctggattttcgtataactctctagtatttattagcctatattgctcatacagtaactcttgcattactgcataccacaacatagatggctttcgaaaatgaaaaaaaaaactttacacaaggaatatataacacaaatcttgaaaattagggagtttattcaaaatgttcttcttcagcgagggcttgatgtaacacaaaggaagaaattgccggcgataatttcttataaattagggtttccatgaggacgctgtagtcatttggcacttttttaatacaaaagaattctttaaaatagtaaaataattgacagctgtgggatttgaacccacgccctttcggaccagagcctaaatctggcgccttagaccactcggccaaactgtcttgttgtatttacacatcgatttgtaatgaattaacctacattatccggttggcaagaaagtttgtgaattaataatcgaagtgtaaatacaacaagacagcttatgatgacggagttgatggctactatatatcctattatcttcaccggagatcatctggtgaatttttttagtttgtgaagaagtactttacataaccgatactttcccatgtttactatagacaaaagttaaaaattctaatgttacttttattatgtaattacttttattatgtaaaacatttatatgacgaggtttggctctcctcagttctcataggcttggcttagcttttgcaaggaccaatttcaaaggaggccattgttttctaatcgaaagggtcaaagcgggggtcatgctcgctagctgttaccatcccggtgcaaagacatgtcggacacatcacctgattcatatacaaatacacatttcaacattacaaggacaacaatgaattatataatactcagatcagattgcatgaaatagagagaatcttacctttcctgcgccggaacaatttagacatctttttgtggtcgcgacctgcataagctggtttgtagctctaggtcttgtgatgggatcaatgctcaaacacacaccactagctgagcatcgagcgcatggcaagtatcctattatcatgtgaacacagaccagtgagcatttctccaactcattttgagaagtaattcgaagaaaaaatcaagaattttcatgatatatacaataaaattaccagtcccaaggcagtatttgcacctcttcttctcttgttgtttaacattgttaacttcgattagcatcaaggttgaaatgactcccacggccccgccagaaaaagatgccacaattggatctacctggctacattacagaacaaaaaaaaaaaaaaaatcaatgtcgctgtttcagattcaggacaagtaaagttgactagtttgactatgttttcaatcatattagtcttcaagctactgaactagtagtagtaccttaattgcaagggtagatgtaagctccttataaaatcttcataagaggttcctccaagtcctaccttcagttccagctgccatgtaaaatcatcaatttatcattcaaggattagaaaaaacaagaatagctattgttcttctggtaaagttacagtaactcaataaaaaaccaaaaaactgtatacatcacaaagaaggaaaaatagtaatctccacaatctgttgctatcaacaaaaagcaagtatatttagattaatgtgccattgttgttgcatcactaataacttgatggatcctgcaaaatatagccaggaaagtaaatgcatatattttaaagagctctcgtgcattgttgtaagattagtagggttctaagagctgcagtaaactgagatgactgtgtgaaaagcatattaactcaaacaaaatctagagctttgatattgctataggcgaacataaagaaagaaacgtggagtctactactcttgtacttacattaggtgcaatgagaccaccaaagaagataattcccgatatcaatgcaacgctggtcgaatagagttgtttcaaagtctttggtgtctatatcaaaagataagaagcagagacaaagaagagttaaaacagaagggaatatcaaaaactgaacaagagaccgtttcataatttgtaactgaccacattagggaggaaaggaatagaagatgtgatctcaggcatctcggtagcctcgagctcactgtcctcattgatggctttaacactcttgatacgttgctgcacacgtaacctcctcacttcctccatgaggagaaatatcttattgcgtctactccttatgttatcttggatttcctgaagctgcatctgcacaaagtcttgaactgtctctgatccctcaatgatacagaagttactgaaacaatatccaccaaacaaataatctattaccagttagaatcaaaatgataatcgttatacacgctatagatcatatacatagctacaaggctcccacttaatcactaatcgagctctcaaacaatagatatcgatttggccaaacccaggtgaaatttgaagatgaaacctagaattcatcaataaaggaagaaatcagaggaacttgctttgggacggtgtcaccggagggaggaggacggttgttgctgccgtctgaacaggagaggagagagcgagatgagccatggaagagaagactggggctaggtttcagataagatgagggaaatcgaagcagggatttggaagtagatggagaagaaagtagaagatgatggcgatgaggagtagcagaagagaagcacgtcatcttcttctcgcccaacgctttttgctgtctatcgtcttcttcggataatttttttaagttattgcaactttttggaaccctccgatcactacgaaggttaccattttgggctaaaagttaggcctaaacaaactctaaccgaaccagcaacatatcttaaaatgacacagttgtgatctgcagcatccaacataagaagattcaatatactagcagtatcatgttagtgaattgggaaagttgtaatctaaaataaaattgttatatgaacgtttaggagagtaataatgacgcatatgtatcttctttacaagtggaaacaagccaagttaactaaacttgaagttgacaaaaaaacaccagaatttctcacaaaaacaaactgcctctagacacaaaccctctcatgaaggaacacacacagacacaggtaagtttagttttggatttagacagaataagaagcttcaagtttgggaagaagggatctccaagcatccgcgacactgtttgctaagcgagcttgtcctttcgcaaactgatggaatgccactcccatctcttccgtcttctgctcttgaaaccttactatctcatcttccattctctttactatcctctcaaatcttctcgtggcttcctcactttctgcttttatctgcattgttgcggtatacaccacaagttcaagcacccaaaagcattactacaaaattttcaaggattgttttgagttcttcttacctctctgtattcgatctcagcttctcctactttgtctgaacgtgtgagcatgagtttgtcactacaataacagacgagaatttctataatgttctacgacgattgttgacagagaagacaaaaagggagagaagccatcatacagatttatttcttttaactttgttgtttctgacaattcacaatgttgtttgaaagcagtgcctcgttctgctattgttgcctggaaaagcaaaatatggaaacaaaaaggtaagagtttagtaccagcaaaacgaaaccatgaaagagaaatcaatcccacaggcaaaggctagagaactcaccttaatcgattgtacataacgaacatagtccttcaagggttcctcgaagttcatcaggacttgttgagcctacaaatagtgcaagataggtcaataaaagcatctaggaatatagaatagatgaatttcgccaagatatatacatttcttactataatgatttagaaaaaaagaagaagatgatctagtcttacaaacttaatacctctttctggagcttaatcgataacagttcagatttagttccaagatcggaaaatgcttttcctgtaggttcaccctcacaagccccaagaagttttacagccttgccaaaatccaacagtgattgacccaactctgccaataggttgatacagcattaaaactgaagatccattcatgcggttgggaaagagaaaacagaaaacataacagaatttatatagactaaattctgatttgtgatatttttattacctctatgcctcttgactaggcgatacgcatgcttctgagcctcagtcaagtggttctcaagctcgaaaatgtaatgtttaagcttctcgtagtcagcagtagtttcttcaacaggtttttcttttccaaggacagcatcactaacttttgactggacatcctgtcaatagtgcagatatggcagtaagatgatggcgcaccacaaaggtcaataaagagcagaaaaataatatttacatggtcagaaaaaacattcttaccctaaacatttgcattagatctgcaggcttcttgaatatactagtttcctgaaacctgaatctgtccattgtctgacgagaaaagtaaactgtcattagagacaagaaccttctaatatgcaaattgcagtccttccagtaggaaaaaagaagaagcattctacgagcatttttatgtgaagatgatgtagtagcaatgtgaagtccagatatcctacctcttcatctgcttgcaaaaaggtcctaagatcctcactctgctgaagctcagggtgtaatgctattcgattaacaaatatatccaatgctgctcgcctcatttcaataaattcggcactaaagcggaatttttctgccaaaaagagtattaataaacatgaatccaatatactaatctccatcagataacaattacaagaggaaggcactcataagtaataactttatcaaagctgtacattaccctcgtgcactttccaaagtctcaacacctaatcagagacctctactaacaacatctaacctaactaaatggaacaaggatagctggattgactgacataaaactatagagatgcacaattcgtatctttgactcaatcagataatgtgttcaactagatagagagcaatagaatagatgccgactacaaaagattcaaattaatagctagaaagggaaaagctagctaatttacctacagcactcttctctggaagaggaggaatgaaaatgcccttgtacttttcaaaaagccgatcccgtaaccagacgaaatcactgtatcgtctaataacaatcttctcgggtccttggtactccggcaagttagtctgccaaaaaaaaaatccaatttgtcagaaattgatccttagataaactaattcacaacaaaaccataatcaacccaaattctagctgctcagcatacaattagatagtttcgcaacaacaaaaaatcagcgaataatcttctgttatcacccaatttttcaaatagaaaccctagactgaaagctacgaatcaggttccaagaaggataaaccttggtgataactctgtaagagatataagcttgtacgccattgcctaatttgacaggatctgtgacggagactgacagatacggatgcgaagacggagatctagggctctgcatcgatccggagatgttcctcggctgctccgtgctctccatgagacaacaacgagaatcaaccccgtgagatcgaaaaaaaaaaaaaacgatttagtcaaaaattcacctctagtggcagatttgtaatattcacgagttttgtgttcaactttcggtgcacaagtaagtaacctttgaaaagagaaaggttatcagattttttaactttaaaccaaaatttcattttgtcatatttaacaacaaaatttgatgaaattagataaattagttcgttttagatatgattattaaagatagattcttgacaaaaattagaatgataagacacttaagattgggacaaaagaaaaatggaaattttaactttttcactactagattatgaaatatactatcaaattaataacactactagtattttgtagttatgctttcaaaataaaccggtttttagtggataatctcgtaaaaatatgctatattagagtagttttcattaaaaccttcatctctagtttaaaaaataaataaatcataaaacataaataattgggattcacgatataacattaactattttatgcatttcatttatcatcattcaatttacaataagtcggaaactaattgcacgcatctgatttattacagtcaaacatcatctatctgttaaagatatagtagaaatctaatatccaagtaatcagagattaagaaaaacactgatgagaagaattcattaatacgtttgaactcaaaaaaacaaaagagtatctgatgagaaatctagaattttgaatcagagagagatctgatgaaaaaaaacatctaagaagaaacaggcttcttccaatcagcagcagcactcaagagagacttggccggagaaaccatagcaacacctccattctctgccttcgagtacttcttgtacactgcacgtagcctgctctcaccgcatctcgagtgaagaaaagctaaaagctttgagcagtccctataacacagcacaagaaaaccatatcagcctctgcaatcaagagtccaaaaaacaaaacaaatgatgctaacttggaggtctttgtttctctacttacataatctcagactctgtgtagccggtgtggaactgcaatgtatcagtccaagcaggggacttgttcaatgagcatcttgccgtgtaaacagctgaagcagcaagcatggagggacagaacgtcaaggtgtcgtaatgcatcatccccaattcagcaaggaagtgaaccatattctccatctacacgataaacaacaaaaccagaatcaatctctttccatcgaacattgttataacaaaaaatctgaactttaaacaaaaaatgtactcacttctggatcagacatcgaagctttgatgaagcggacaaggaagacgtattgagtcgggactgtcaaataccattcgaggtttccaagaattgccttctccatcaccagaatctgtctgctactgtaagcattgtccgtgacatacaccagatcgttaacctgcacatcacatgaacatcagctcacagtcacatagtaaaaacacaatcaaattgttgaaaacaaacagtaagtacctgaggtggccagatttcttcatatttggaagcaataagcaaggcactgattcccactagctgtaactctcttttagggacagctttcacagagaggaatcgatcaatgatgttgacggtgaggtacagagtttcaaggttgagctcaaacttgatgtgaacttctagtaaccaatcaatcaagatcgctctcatcttctcattcatttcagtctgaatgtgcatgtacatcttaggctgactctccttctcaacttctttatagaacgagtacatatcatcaacatactccaccgcagccaaatggttatctttgtcagattcatcaatatcgataatctttggtttgttgactataccacaagcagctttgctccgagcactaagtacagacgagtacgtcactttcttattcttaggtgacatcgctacttcctttttagtcacctccttcttcgtctcgatcacttcaacaggcttcgtctgttgcttaaccactagattcttcttctgaaccgccctttgagcttctgggtttcttgcagcaagaggttgtctctttggaccaagagctggaaccttgttgtctccattgattggctttctttcgagttgggcattcgctaataactgggcacggaaacttcgagtaatgggtcgattaatcggaggttgagcctttcctccttgaactccgggaacagaaacaagatttccgatgtcaccgagggcacgccgactcttcacagcaccgtttttgttctgaatcttcaaaccatcaacgagaggagcacctgtttcacagaattcaaaagaaacccatcaagatctcatctttatttctaaagattcacaatttcaattctaaagattaacaaaatcgatcccgttacgagatacttcatattcaaatcggatctgtatcgtcgacgagtaatcataacaatacccaaatcggaccgatttagggcaaacgagttatattcaagttaaacgaatcaaaccaaacccggattttagatcggcgtaatccaaaaagcaaagatttcacacgcggatcgtacatatatcaaacacaacccagcaaaaaaatcaaatcgattcaaagaaatcaaaacaacgagatcaacgataacccagattaattcaaatcgattcatagaattaagaacgacgatatcaacgataaacccattaaaagacgcgaagaacaaacctctgacttgttcaggtacgtttgctctcgtcgccatgatcgctctcccaatgattcttactcttcttgtttcttagtcttgatatttctctttcgtaaagagtctctgcgattgtgacgaagattggaagcgagcgctgcttatgaagaggaggaggagccaacggttcaattccaacggtcatatttttggggatttcatctgttgccgttagatgattaaattttagatctaacggtggataggttagtcttcgaagttggaatgcgctggcactggataattttacactagtcatcgaatgaggccgttggactgtaaataaaaaaggtaaagcccatcccaacttttatttcttaattaaaattttggaatatgattaagaaaggaatatttcattattctttccaaaatagcaaaatgagattgtatgtttaggttttttgaaaacaaataaaatttgaaagtcttcgtatatggacatatatctgaccaaaatcaaatatctgtgtatttttcaaaaaaaaaaaatatcgtaaataaatataataaaaaaaaataaaggtaaactatgtgatagcttactttaaaaaatttgacagtcgtatgaggtattgaggttgtatctgtttattttgataatttttataaagtttgactcaaattttaagttttatcaaaaaaggaaccaatgatttgttaggaattggataattaaggaaattaaaacattccaattttgtaagaatatcaaagatcaaaaaattagttcaaaatttgtgagtacactatcatctgaaaactttagtgattgattcttacatgtagtatcctatattaactcatatctgtttcttgttattgaagtaaagtcctcaactattccttactagcattgtccatacaaaaacaaattttatatcctcgattgtgatagtcaattcaaaaacataaactaaatactgttttaatgagacgaaacctcacaaaaagatgacgaatggtttgattttacaaaggcgaaaggtagaatatggtttaaagggatatagtaaggagagaagatttcatcaagaggatgtgatcaatcagatgagaccttggcgttgaagatcagagtaagtcttcttgttgtaaatgttaccttcacgatcttcatattcttcttcaagttctggcctccatttgttcactccttgcctctcctgtatcctcttccacaattctttggcttcctgaaacaaaccaaacaacaacaagatcaaattaccaaactatttactactttaagctgtacaaagtctttgatcatattatattattacctcaatcgaagtgatttcgttgaagttctttgtgtttgggattcctaggcaacgcattccgtgttggtgtcgccattctttaaaatgtctctcaaaagcccttcttccccaatagctatagttcccacatatctcgcatttaaactcctgcgtaataacaagaaatttaatgtgaatctatgttcctttgatacaacaatggtctcataaataaactacatacctggccaaggccatgaagtttgtagagccagtatggtataggcttcccatcccaacctattggtagcttcagcggattgtaaatcaaaccgtcctcgtcatcactttctaattcggtattagcttcctccccttcacgttctccctccatttcttcatatgtcaacgactgtttctttacaatgttttgttttgtcctttcgatggtctataaaaggtgacaacaagaaaagttaacagaaaaagtacaactagatatctgggagggggaaaaaaatgtcactatgagctttcaatcaactaacctcatcaagtaaattgcagagtttcttcactttggcctctgttagtgcaatctctttagcattttcagactcatgtgttgatttggcatctccgttttgttttccgttgtgtggaggtctggcaaaatgtttcttatccagcttttccaaaggcgtatgctgtacaaaaattgaattaattaagggaattagataacctcaaggtaataagaaaagcttcaaatagaattcaatccctacaaaacatgaactatgacaacaaaagccttagtttcatattagaagaagagctgagctgaactaccaaactaggtttcataacagctaaatgttccttccaaacccagtaagaacaacaagaacgcggctactaattgataaaagtaccctctcataagacgaaacttaaagaaataggagattatatagcaagtgtaaaaacctttgtcaggaaaagtctctcggcacgctgctgcggagtaccaccaaccttcagtcctaatgcccccaatgcctgaatggcatacaaagaacatatgattaggggaatatgcttcaaaaaggatattaacatgaagtagtatggtcattacctcttttagcttttcaggtcctacatctaccagttcctcgactgtactgtagtaatcaagatctatgacagtatgctgagatggaataagttcattatccaggccttctactattccatctgcatattgctcttcaaaatcagaacaaacctgtaaaagaaccaaacatattaatcgcaacagatcaaacaataggcacagcattggccaaactagaactaccagaatgtcaaactataacatggttcaaaaccttccgaggatatacaatctctgcacttagagcaaactatgcaccaatgaatattgaatacaaccatctagttatggccatttattttccaaaattatgtattatctccagggggatgaaagactcacaaagcaaccagttgttagaactaaggaaatcaaatccaaagttctacacttaatacttgggaaactagtagaaacttcttaagcacgaataaatataccagttatgtactaatgcatagttcgaaacgcccataaaatttcataaggcaacaaggtaaacgcaataaaatgataaagaaagggaggagcttaaaccttagaaagtatccggtcaagatcttgcaacggctcggttcgctggaagaagtagaccaggtactcaagtagagcttccatatacttcatgtattgcctaaaatgaaaaatagcaatacaaaaaggaaagccattcagctgcagctagaaaaataattggaggctttctaagtaaaagaaaattccaatgaagtgtttacctcgataacttcagtttacgcggtattttctctggttgagaaaaaacatcaaggtaagcagaatattcaaccctttccccaaatttagagttgatgtactggttatacatatcatgcaagtccaagtaccgaccattgccttcctgcgtaacagacaagaagatttaagtattgacaataaaaaaggggcttacaaactgttaaaaaatgcgtcaacaaatagcaacaataaaaagtcaagcagaaacctacctctccactgaacgcaataattggttcctccttcaggcgtgcttcgtagtcttcattagcatcaacaagacgtccagaaggatgccttttatgatattcacgtatctgtaagtttataaaagaagttaaatagttgcagctctgatgctttcatcagtggtacaagaaaatcaaataattcagacaataaaaaaaaaacgaattagcaatttgaatcttattcagggtgtcctcatgaaaatttcaccgccttaatactcttatgcaaagcaagccttatacagctaaccaaattgttgatggaacagaactaatacactttcactgagattttgtacataattcttgattctccatcacagtggttcaaggcaatcaataaaactatttttttttaaaagatcaacagctaaataacaatgtctagattaactaatagtccggtaaagttagctgctcaatctctaatatacaacccacagaaactaaagtaaagccaagtcttggtatagagaaccataggcaagttttagggaaaaaagaccaaggaaggtgcaaaggataaagaacaaacctctttcaaacgatcgtaaaattcactaaacacatttgtccctgtcgcagtctggccaccaagcgctgcaatctcatcatcccacgccccatccttatcttcataggtttcaaccttacaacaaacaagaatcaaggttagcattaatccaagtttgagttaattatcaacaacaaaaattaactcaaatttgtgaaataacactgaagcatgcttagctcaaaacttagaatccctacatacacacttaagaccccaactataacctatattcaacaccaatctctgaagtttcttctcaatttaacacccaagccagagtgattcaaagctaacttaaaccccacaatgataacctaaaaagctaaagcaattaacagaaaaagaggcaacactcaacacgaacctgttatttaaaaaaaaatcagcaacccaagtttctctgctctgatctaacgtattcaaaagagaagagacataaaaacatatgcgggaaatagaaaagaagattaaaaattgacgagaagaagagagaaagcgtacaagtttctcagtggtgagcataatagactcaatcatgtgacgaacacgatgtccctggaccaatctgtccttgctggacggtggctccttctgtagatcttccacaa

SEQ ID NO: 1406 - DNA, 45301 bp, Arabidopsis thaliana
caagtttgggaagaagggatctccaagcatccgcgacactgtttgctaagcgagcttgtcctttcgcaaactgatggaatgccactcccatctcttccgtcttctgctcttgaaaccttactatctcatcttccattctctttactatcctctcaaatcttctcgtggcttcctcactttctgcttttatctgcattgttgcggtatacaccacaagttcaagcacccaaaagcattactacaaaattttcaaggattgttttgagttcttcttacctctctgtattcgatctcagcttctcctactttgtctgaacgtgtgagcatgagtttgtcactacaataacagacgagaatttctataatgttctacgacgattgttgacagagaagacaaaaagggagagaagccatcatacagatttatttcttttaactttgttgtttctgacaattcacaatgttgtttgaaagcagtgcctcgttctgctattgttgcctggaaaagcaaaatatggaaacaaaaaggtaagagtttagtaccagcaaaacgaaaccatgaaagagaaatcaatcccacaggcaaaggctagagaactcaccttaatcgattgtacataacgaacatagtccttcaagggttcctcgaagttcatcaggacttgttgagcctacaaatagtgcaagataggtcaataaaagcatctaggaatatagaatagatgaatttcgccaagatatatacatttcttactataatgatttagaaaaaaagaagaagatgatctagtcttacaaacttaatacctctttctggagcttaatcgataacagttcagatttagttccaagatcggaaaatgcttttcctgtaggttcaccctcacaagccccaagaagttttacagccttgccaaaatccaacagtgattgacccaactctgccaataggttgatacagcattaaaactgaagatccattcatgcggttgggaaagagaaaacagaaaacataacagaatttatatagactaaattctgatttgtgatatttttattacctctatgcctcttgactaggcgatacgcatgcttctgagcctcagtcaagtggttctcaagctcgaaaatgtaatgtttaagcttctcgtagtcagcagtagtttcttcaacaggtttttcttttccaaggacagcatcactaacttttgactggacatcctgtcaatagtgcagatatggcagtaagatgatggcgcaccacaaaggtcaataaagagcagaaaaataatatttacatggtcagaaaaaacattcttaccctaaacatttgcattagatctgcaggcttcttgaatatactagtttcctgaaacctgaatctgtccattgtctgacgagaaaagtaaactgtcattagagacaagaaccttctaatatgcaaattgcagtccttccagtaggaaaaaagaagaagcattctacgagcatttttatgtgaagatgatgtagtagcaatgtgaagtccagatatcctacctcttcatctgcttgcaaaaaggtcctaagatcctcactctgctgaagctcagggtgtaatgctattcgattaacaaatatatccaatgctgctcgcctcatttcaataaattcggcactaaagcggaatttttctgccaaaaagagtattaataaacatgaatccaatatactaatctccatcagataacaattacaagaggaaggcactcataagtaataactttatcaaagctgtacattaccctcgtgcactttccaaagtctcaacacctaatcagagacctctactaacaacatctaacctaactaaatggaacaaggatagctggattgactgacataaaactatagagatgcacaattcgtatctttgactcaatcagataatgtgttcaactagatagagagcaatagaatagatgccgactacaaaagattcaaattaatagctagaaagggaaaagctagctaatttacctacagcactcttctctggaagaggaggaatgaaaatgcccttgtacttttcaaaaagccgatcccgtaaccagacgaaatcactgtatcgtctaataacaatcttctcgggtccttggtactccggcaagttagtctgccaaaaaaaaaatccaatttgtcagaaattgatccttagataaactaattcacaacaaaaccataatcaacccaaattctagctgctcagcatacaattagatagtttcgcaacaacaaaaaatcagcgaataatcttctgttatcacccaatttttcaaatagaaaccctagactgaaagctacgaatcaggttccaagaaggataaaccttggtgataactctgtaagagatataagcttgtacgccattgcctaatttgacaggatctgtgacggagactgacagatacggatgcgaagacggagatctagggctctgcatcgatccggagatgttcctcggctgctccgtgctctccatgagacaacaacgagaatcaaccccgtgagatcgaaaaaaaaaaaaaacgatttagtcaaaaattcacctctagtggcagatttgtaatattcacgagttttgtgttcaactttcggtgcacaagtaagtaacctttgaaaagagaaaggttatcagattttttaactttaaaccaaaatttcattttgtcatatttaacaacaaaatttgatgaaattagataaattagttcgttttagatatgattattaaagatagattcttgacaaaaattagaatgataagacacttaagattgggacaaaagaaaaatggaaattttaactttttcactactagattatgaaatatactatcaaattaataacactactagtattttgtagttatgctttcaaaataaaccggtttttagtggataatctcgtaaaaatatgctatattagagtagttttcattaaaaccttcatctctagtttaaaaaataaataaatcataaaacataaataattgggattcacgatataacattaactattttatgcatttcatttatcatcattcaatttacaataagtcggaaactaattgcacgcatctgatttattacagtcaaacatcatctatctgttaaagatatagtagaaatctaatatccaagtaatcagagattaagaaaaacactgatgagaagaattcattaatacgtttgaactcaaaaaaacaaaagagtatctgatgagaaatctagaattttgaatcagagagagatctgatgaaaaaaaacatctaagaagaaacaggcttcttccaatcagcagcagcactcaagagagacttggccggagaaaccatagcaacacctccattctctgccttcgagtacttcttgtacactgcacgtagcctgctctcaccgcatctcgagtgaagaaaagctaaaagctttgagcagtccctataacacagcacaagaaaaccatatcagcctctgcaatcaagagtccaaaaaacaaaacaaatgatgctaacttggaggtctttgtttctctacttacataatctcagactctgtgtagccggtgtggaactgcaatgtatcagtccaagcaggggacttgttcaatgagcatcttgccgtgtaaacagctgaagcagcaagcatggagggacagaacgtcaaggtgtcgtaatgcatcatccccaattcagcaaggaagtgaaccatattctccatctacacgataaacaacaaaaccagaatcaatctctttccatcgaacattgttataacaaaaaatctgaactttaaacaaaaaatgtactcacttctggatcagacatcgaagctttgatgaagcggacaaggaagacgtattgagtcgggactgtcaaataccattcgaggtttccaagaattgccttctccatcaccagaatctgtctgctactgtaagcattgtccgtgacatacaccagatcgttaacctgcacatcacatgaacatcagctcacagtcacatagtaaaaacacaatcaaattgttgaaaacaaacagtaagtacctgaggtggccagatttcttcatatttggaagcaataagcaaggcactgattcccactagctgtaactctcttttagggacagctttcacagagaggaatcgatcaatgatgttgacggtgaggtacagagtttcaaggttgagctcaaacttgatgtgaacttctagtaaccaatcaatcaagatcgctctcatcttctcattcatttcagtctgaatgtgcatgtacatcttaggctgactctccttctcaacttctttatagaacgagtacatatcatcaacatactccaccgcagccaaatggttatctttgtcagattcatcaatatcgataatctttggtttgttgactataccacaagcagctttgctccgagcactaagtacagacgagtacgtcactttcttattcttaggtgacatcgctacttcctttttagtcacctccttcttcgtctcgatcacttcaacaggcttcgtctgttgcttaaccactagattcttcttctgaaccgccctttgagcttctgggtttcttgcagcaagaggttgtctctttggaccaagagctggaaccttgttgtctccattgattggctttctttcgagttgggcattcgctaataactgggcacggaaacttcgagtaatgggtcgattaatcggaggttgagcctttcctccttgaactccgggaacagaaacaagatttccgatgtcaccgagggcacgccgactcttcacagcaccgtttttgttctgaatcttcaaaccatcaacgagaggagcacctgtttcacagaattcaaaagaaacccatcaagatctcatctttatttctaaagattcacaatttcaattctaaagattaacaaaatcgatcccgttacgagatacttcatattcaaatcggatctgtatcgtcgacgagtaatcataacaatacccaaatcggaccgatttagggcaaacgagttatattcaagttaaacgaatcaaaccaaacccggattttagatcggcgtaatccaaaaagcaaagatttcacacgcggatcgtacatatatcaaacacaacccagcaaaaaaatcaaatcgattcaaagaaatcaaaacaacgagatcaacgataacccagattaattcaaatcgattcatagaattaagaacgacgatatcaacgataaacccattaaaagacgcgaagaacaaacctctgacttgttcaggtacgtttgctctcgtcgccatgatcgctctcccaatgattcttactcttcttgtttcttagtcttgatatttctctttcgtaaagagtctctgcgattgtgacgaagattggaagcgagcgctgcttatgaagaggaggaggagccaacggttcaattccaacggtcatatttttggggatttcatctgttgccgttagatgattaaattttagatctaacggtggataggttagtcttcgaagttggaatgcgctggcactggataattttacactagtcatcgaatgaggccgttggactgtaaataaaaaaggtaaagcccatcccaacttttatttcttaattaaaattttggaatatgattaagaaaggaatatttcattattctttccaaaatagcaaaatgagattgtatgtttaggttttttgaaaacaaataaaatttgaaagtcttcgtatatggacatatatctgaccaaaatcaaatatctgtgtatttttcaaaaaaaaaaaatatcgtaaataaatataataaaaaaaaataaaggtaaactatgtgatagcttactttaaaaaatttgacagtcgtatgaggtattgaggttgtatctgtttattttgataatttttataaagtttgactcaaattttaagttttatcaaaaaaggaaccaatgatttgttaggaattggataattaaggaaattaaaacattccaattttgtaagaatatcaaagatcaaaaaattagttcaaaatttgtgagtacactatcatctgaaaactttagtgattgattcttacatgtagtatcctatattaactcatatctgtttcttgttattgaagtaaagtcctcaactattccttactagcattgtccatacaaaaacaaattttatatcctcgattgtgatagtcaattcaaaaacataaactaaatactgttttaatgagacgaaacctcacaaaaagatgacgaatggtttgattttacaaaggcgaaaggtagaatatggtttaaagggatatagtaaggagagaagatttcatcaagaggatgtgatcaatcagatgagaccttggcgttgaagatcagagtaagtcttcttgttgtaaatgttaccttcacgatcttcatattcttcttcaagttctggcctccatttgttcactccttgcctctcctgtatcctcttccacaattctttggcttcctgaaacaaaccaaacaacaacaagatcaaattaccaaactatttactactttaagctgtacaaagtctttgatcatattatattattacctcaatcgaagtgatttcgttgaagttctttgtgtttgggattcctaggcaacgcattccgtgttggtgtcgccattctttaaaatgtctctcaaaagcccttcttccccaatagctatagttcccacatatctcgcatttaaactcctgcgtaataacaagaaatttaatgtgaatctatgttcctttgatacaacaatggtctcataaataaactacatacctggccaaggccatgaagtttgtagagccagtatggtataggcttcccatcccaacctattggtagcttcagcggattgtaaatcaaaccgtcctcgtcatcactttctaattcggtattagcttcctccccttcacgttctccctccatttcttcatatgtcaacgactgtttctttacaatgttttgttttgtcctttcgatggtctataaaaggtgacaacaagaaaagttaacagaaaaagtacaactagatatctgggagggggaaaaaaatgtcactatgagctttcaatcaactaacctcatcaagtaaattgcagagtttcttcactttggcctctgttagtgcaatctctttagcattttcagactcatgtgttgatttggcatctccgttttgttttccgttgtgtggaggtctggcaaaatgtttcttatccagcttttccaaaggcgtatgctgtacaaaaattgaattaattaagggaattagataacctcaaggtaataagaaaagcttcaaatagaattcaatccctacaaaacatgaactatgacaacaaaagccttagtttcatattagaagaagagctgagctgaactaccaaactaggtttcataacagctaaatgttccttccaaacccagtaagaacaacaagaacgcggctactaattgataaaagtaccctctcataagacgaaacttaaagaaataggagattatatagcaagtgtaaaaacctttgtcaggaaaagtctctcggcacgctgctgcggagtaccaccaaccttcagtcctaatgcccccaatgcctgaatggcatacaaagaacatatgattaggggaatatgcttcaaaaaggatattaacatgaagtagtatggtcattacctcttttagcttttcaggtcctacatctaccagttcctcgactgtactgtagtaatcaagatctatgacagtatgctgagatggaataagttcattatccaggccttctactattccatctgcatattgctcttcaaaatcagaacaaacctgtaaaagaaccaaacatattaatcgcaacagatcaaacaataggcacagcattggccaaactagaactaccagaatgtcaaactataacatggttcaaaaccttccgaggatatacaatctctgcacttagagcaaactatgcaccaatgaatattgaatacaaccatctagttatggccatttattttccaaaattatgtattatctccagggggatgaaagactcacaaagcaaccagttgttagaactaaggaaatcaaatccaaagttctacacttaatacttgggaaactagtagaaacttcttaagcacgaataaatataccagttatgtactaatgcatagttcgaaacgcccataaaatttcataaggcaacaaggtaaacgcaataaaatgataaagaaagggaggagcttaaaccttagaaagtatccggtcaagatcttgcaacggctcggttcgctggaagaagtagaccaggtactcaagtagagcttccatatacttcatgtattgcctaaaatgaaaaatagcaatacaaaaaggaaagccattcagctgcagctagaaaaataattggaggctttctaagtaaaagaaaattccaatgaagtgtttacctcgataacttcagtttacgcggtattttctctggttgagaaaaaacatcaaggtaagcagaatattcaaccctttccccaaatttagagttgatgtactggttatacatatcatgcaagtccaagtaccgaccattgccttcctgcgtaacagacaagaagatttaagtattgacaataaaaaaggggcttacaaactgttaaaaaatgcgtcaacaaatagcaacaataaaaagtcaagcagaaacctacctctccactgaacgcaataattggttcctccttcaggcgtgcttcgtagtcttcattagcatcaacaagacgtccagaaggatgccttttatgatattcacgtatctgtaagtttataaaagaagttaaatagttgcagctctgatgctttcatcagtggtacaagaaaatcaaataattcagacaataaaaaaaaaacgaattagcaatttgaatcttattcagggtgtcctcatgaaaatttcaccgccttaatactcttatgcaaagcaagccttatacagctaaccaaattgttgatggaacagaactaatacactttcactgagattttgtacataattcttgattctccatcacagtggttcaaggcaatcaataaaactatttttttttaaaagatcaacagctaaataacaatgtctagattaactaatagtccggtaaagttagctgctcaatctctaatatacaacccacagaaactaaagtaaagccaagtcttggtatagagaaccataggcaagttttagggaaaaaagaccaaggaaggtgcaaaggataaagaacaaacctctttcaaacgatcgtaaaattcactaaacacatttgtccctgtcgcagtctggccaccaagcgctgcaatctcatcatcccacgccccatccttatcttcataggtttcaaccttacaacaaacaagaatcaaggttagcattaatccaagtttgagttaattatcaacaacaaaaattaactcaaatttgtgaaataacactgaagcatgcttagctcaaaacttagaatccctacatacacacttaagaccccaactataacctatattcaacaccaatctctgaagtttcttctcaatttaacacccaagccagagtgattcaaagctaacttaaaccccacaatgataacctaaaaagctaaagcaattaacagaaaaagaggcaacactcaacacgaacctgttatttaaaaaaaaatcagcaacccaagtttctctgctctgatctaacgtattcaaaagagaagagacataaaaacatatgcgggaaatagaaaagaagattaaaaattgacgagaagaagagagaaagcgtacaagtttctcagtggtgagcataatagactcaatcatgtgacgaacacgatgtccctggaccaatctgtccttgctggacggtggctccttctgtagatcttccacaaccaatcgctccaacctttcaacctcttcgtgattggagcgagtttgctcgaggagagtcgacgacattttctctgtcttcgaagctttgaaatctccttcttcgccggagtctaaaccctaaattccagtcacttttcttttcctcaatccgaaatctcgccagtaaaatttttaacgccaatccgagagaaaaagataatcgggtggtttttgttgtggtttgggtcgtttaagccgaactatgttttgggcctttttagacggtttgtgttttaggcctttttttgactgttagtgttttgggcctttttagactcttttttttcttttatattttattattattttacttattataaaaaaatctataatatggtaaaataccatttggtaattattttcttttaagatctattccatttggtaatttatatattttttatctgattgcaatcctcttttaatgggaatactcaaacattatgtgtttgtttgatattgtactatacttcaatgggttcatttgcaaagatgttaacggagagaaggttgtacagaaaaaaaatgggcagtttacaaccatccactatgaatggctttgatattggtagcaaactaacacaaaatcaagtcatcattgtcaaagttaaagagttaacaagccatttattcactcttttcaaattgaattcatgatatctcacatgatataagatttgcaagctatctcctaatagtattgaggtttgttgagatgacatctttaatagatcaatggaaagagctatatttggttgttttcctcaggaaagagctatataggatgatcatatattcatattgaaccaacgatgggcattttggggtaagtattgccacctgacaacaaaataatagccaatcccatagactaatcttatgacttctgatattgatttatgtttgtaaaaccaaaggaagatctccgagtggacatacaaaattgaaatgtcgttaacaattcatatttggtattattttttttatctataaacaattttccattattagtcacttccatgtccaagctcaagaattctgtttcaggtgttgtctttgaaagatagtccatgccaacatcgtttacatatcagtatatcacttactttacggcaaactaaggcaaaccatatttcgattagttcatgagtcgctaattgtaacttaaggatatcaaggttggaagtaattcactttgaaacatcaccatttcgtatgagttgatcttcttaataaaaagataataaatacagagaagcaaatgagagttcatcgtaaacacagcaaaccaaatcaagaaaacaaagcaaatatggttattcatttcaaatggtggaatcagaatatcaataagcaaaaactggtacatggtttgattcacgtttgagttatatgttcctcattttccactattccatcaaaccaaaacaaacaataaaaactcaaacaaaacttttgaaaagcggcgaagtcagagatgttaaatatgcctcaaacagttttaagctcataatgaggaaattacccctcattcgcacatctaattggttcatcattctcgccgtttcattgcaaaaccaataaaaacaatgtatcctacccgattatatagaacgagatactaaatgaacgaaattaaaatctgaaaatcctcaaacgcaaagatctctagcagataaaagagataaacacttatatctgaagagtcagcgagagaggaccttaattccagatctaatgccgatataaaaaaactcgacctataataaatcaggaaggtaaaaactgggttagttcttaggagaaccctaatcaaaaacccttaataaatttcgatttagcgcagcaatgactcgacacgcttccattaagcatttgtggaaggcgatcttaagggctgcgcaacgatttaaaaaaaaaacgataaatacgaataacacgatttagaacataagccctaatatctaagaattgggggttataatcgaagatgcattgtatatatagtgaagacttgttttaccctagtcgaagaagcttatcctcgtttattgactattgggctttaagcccatgttattttaagccttataggcaaaacaagacagaaaacaaaaagaccagaatcgccttattcatcaagtttttttcttcttacttaaaccgaaccgaaccgaaccgaattggattgagccatgccgacacggagttctgctctataactttaattcggcacgcagtctaaatacagagacactatatgacaaactcctccatcgccggtggtctgcacaggggaggggaaacagcgattcgaaaatgtcaggtcgtgaaagttaccgtcttcagcaccgagatccatctcagacttcatattttgatgtattaccaaccttgttcattaatcataattggacattgtttccttctatgatgtcgttttacatttcactcattgtactcttttctttgtatcttgttgctaaaacagacaacttcttagcaaaatctatcctgaaagaagttattgtccgtcaaggtctgatgtaactctcaagcgatatgtactgaattcatgaagtaatggaatgtgggagtgtacttttcactgaggtactcgagaactatcatagatggctatacttgccattagagtagtggcttctcagcttctcttgttttcattcaggtttctgactcatataaacccgatttcccgcaacttgatgctcagacagagcgttagtcttttggagagcttgcaatcatgctggaaagaagatgttctcgttttctctgctgctggcaaatttcttcgcttgacattgcagcttcgttcgaggtttgtgaaatttgactttaatattatcatcaatattgatagacatatatctagtgaagataacgtgaaaacttgcttgttttaccttaatcgaagaagctttttcacgtttatggactttaggcccatatcttacgacataatcactttggaattttggatacttaaccattttatgttaggctcgtaactgacgacataatcaatttggatacttaacgtacccaaattgggttttgagatatcatttgtttcaccttctttttcttgtggaggaagtcaaaataatatgtaacagtaatgcggtttgatgcaaacagaaatttaaaaaaggaaaacgaacaaaacaaatttgacgagaaattgtaaacaaaaacatattacagaaacaagaaatctgtcacgatctcagaatatgtaaagataagataataaactgatttcagttagtcttgtcattattaccaaattcctataaggatatttgcgttatatcctttagtataaatgatttattttcttaactaatgaaacacagaatcaaaacgtttatagaaacataaatctcattcatcttccacacctcgtctttaagagacgagtccgtttcttttcatctcctctatcacgattcaccatcaccaaaacacaacctcttaagataacgtgaagaaactatgagtgacatccaagcaaaagaagatgcggcgcctgttgatagacagtcttcttcgtcggttgtggttcctgatgagccgtcacctctaagaaagatgatatcagtggcttctatcgcagccggtatacagtttggttgggctcttcagctttctctcctaaccccatacgttcagcttctcggagtcccacacaaatggtcatctttcatatggctatgtggtcctatctccggtctgctcgtccagccaaccgtcggttacttcagcgaccgatgcaagtcaagattcggtcgtcgtcgacctttcatcgccactggtgccttgcttgttgcccttgctgttatactaattggatttgcggctgacttcggccacaccatgggagataaactcgacgaagctgtcaagataagagccgttggtttcttcgttgtcggtttctggatccttgacgtggctaacaacactcttcaaggaccttgccgtgcttttcttggtgatttagcagccggagatgctaagaaaactcgaactgccaacgcgattttctctttcttcatggccgttggaaacgttttgggatacgctgcgggatcgtacactaacctccacaagattttccctttcacagtgactaaagcatgcgacatctattgtgcaaatctcaagagctgtttcattatttccatcactctcctcatagtcctcacaatcatagctctttggtacgtggaagacaagcaatggtcgcctaatgcagattccgacaatgagaaaactcccttctttggcgagatctttggagctttcaaggtgatgaaacgtccaatgtggatgcttctagccgtcacggccttgaactggatcgcatggtttccttttcttttatacgataccgattggatgggtcgtgaagtgtatggtggagactcagcaggagatgacaaaatgaagaaactatacaaccacggaatccaagttggttcgttggggttgatgcttaactctatcgttcttggagtcatgtcccttgttattggagtgattagtaagaaaattggagctaaaaggctttggggagctgtgaacataatcctcgcggtgtgtttggcaatgacagttttggttactaaaaaggctgaggagcaccggaagatcgctggtcggatggcccttcctaccaatgccatcagagatggagcattgagtctctttgctattcttggaattcctcttgctgtaagtccaccatgtcttttaccaatttttgttactattatccatgaattattattttgtttaacaatattaatccattttttgctatattttatagattacatttagtattccatttgcattagcttccattatttcaagcagttccggtgccggtcaaggtatttaattttaacctctccttttgtttctaatttgaacctacattctcatagtaatgctaattaaaatgtgtgaacacaaaaaacggtaatggagagatcagtttccaattataagaaaaacgatcgagtatatattttcacatagggtgatgtatgttatgtactaatttattggttaattgatatttttatacaatctgtttacatcttcaattattagttggttttcattcaccatataaaatttgtcataaatgtatcaataagatacataatcgttctgtttaagattattattaaagcgtttatcagattaataaggatagtgataacattttttgtcattttttcaggactctctctaggagttttaaacatggcaatagtgataccacaaatgattgtatcgtttggagttggtccaattgatgcgttatttggaggtggaaacttacctggatttgtggttggagctatagcagctctaatcagcagtgttgtggcacttaccgttttaccttaattttttttttttttttattgttatgtgcttcttttttattgttatgtatccacatgtttaatattaatgtagcatgtggcatatttatttacattatttaattaaagttttaattttaaaaagttcttcttgtttttgtttaacttctatatctatgtcaacatcaatctgcgtaaattaaagtattttaaacttctaggtaaataacaaaaaaaaaaattaatattatgcataggaattgtaaatctaacatttttacctttatatgacaattcattcatgatacattttattttgtagaaacaatgaaatattcaaaaaaacataatacactttaaaaaagtataaaataaaataaaatgaaatcaaagaccaaaaaaataaatttagtctaaacaaagacgacggggcaggtgggaagactcgagtagacacatggatgagtgtggtagcaaaaagcttaccggccgcggtttagcgaagaaagaaatgaaggcctacactaactttagaaggagagggggatgagtgtgtgttcaattttaagaatttaatttttgtattttagattctattaattctagtattatttaaattcttgattaacaaattttattaaatgctagtgttattcaatattaggattaataaagaaaaaatcccactcaagattgtgaataaaaaattccaggaattcatgcaaagatttggttagaattaattcaattccttaaaatctacttttgatcctcttaattctttaaaatttcttaactgaatactacaattacaattgagaagtcgtaagtttcaattggtacgaaatgtactcaaaacttatcaattcgaaatgaacatcatcatgtagcaaaattgaagcaatatatatgtggatctactgatactaagcaaaaaatcaagtattctctttctcgatgaactaatttatcagtcgtagcctagcgaagaaagatttcactaacattttgaaaaaataaaattgagagagaattgcaacagaaaattatggttaatgactgaaaatataaagaacttatattccagtagctctagaatttgacaaaattgcaacggaaaatactcaaacttttaatagccaaaaaaaatgaaatagagttagaaaatcaacaaaccaataacacaaatttttgaaagaattacaaaattatcaacacaaataatacaataatttaatttagtaaaaatatagaaatccacaagagttagaatcttaaattttaaaactctttagaaatcaacttgctaataatcgtaaaaaaattagaacgcttgaaatagctgaagaaggtttaattcgttccgattcccggttcaaattgattttcgatttattctgatttcaacttcggtttggtctagctggtcagtcgtcatcactctcgtcaggaatccctctcgtcactgaactttcttttcctttcaagtttcacctctaatgcgacgaacacagccacgggaactggccgtcactggtttatcggagaatctccaaggatgtgttttccgcacggtgaaacgagcagttctgatcggaaacggctgcgccggcgcggagaatcaatgcatcggtctccttcgatccttaggcctcttcgatcgccacctctattatgtaatctccgtctaaaacactattcctcttctggcttcttcattttcaatgtttctgagtttgttttttcctgttcagagagtagctaaaccaagaggtggaatccttcaatggcttcctatctctctctacaaacgaattcatcgttttatcagcactatctgtgccggattatccattaacgctactggtacaaccttcaacttttattcacagtttgaaaaatgagatttttggcagtaatttgtttccctggaaatggctgtaggaatcacgaatgtgtttgaagtagatgatgcgaagcagattgctgctatggctcgtaaaacgtttgaaaagtattgttcaaattttcctctgcttgattttgagatctctttacatagaatttgagttacttgtcgtctgccttatcacaggaatggcccgttgttagtcgtggcgtctggtagtgatactatttccgtcgcaagctcaataagacgactggctatggaaaatgtttttgttgttcaggttaagtcttttcccttgaaaaaaacaacaaattctatagctttttttgttttatatgaaggttttagctgatttttccatgtgactgatatcagcaactgccaaatcttggcctcatactctttgttttctccttgttataacttgattcttcttgtttactgtttttccaggtgcaacatccaaggtcgcatcttgagagatttgatctagtgatcacacctcaacacgattatttttctttaacacctgaagggaagaggcaaattcctttctttctcagaccatgggtaactccacgtgaacatccaggtagaaatgtggtatgtgtcttttgcaatgttcattaaaatggatttgatggcaaggcattgtcattctgttgctagtaacaagcttgaattctgaaatccagtttctcactactggagctcttcattacgccgacgcttctactctaagaaatgctacatcggaatggaaaaacgagtttgcttcgctgccaaagcctttggttgtagttaatattggaggacctacaagtaaacacattgtgcctctttgtattttatatactctatcgatctgtatttgtaactgcggttacgttttttttttgttaatttgttatagggaactgtttgtatggtgttgatcttgctaaacagttgtgtggtatgcttcagagtatcctctggagctgtggaagcctaagaatatctttctcaagaagaacaccaaagaaggtttgtaaaagtctctttagaatgtcacgatcatggggagcggatggtcatcatatactcgatctttctacaggttgtagaagtcataactggagaattgagctctaactctaaggtctacatttgggatggaaaaggtaaacggctttttactctcaacttgtctgtggcaaagtttgatgttttctcttcatccatttctcagaccctaatccgcatttgggacatctagctttagccaatacttttatcataactgctgactctataagtatgttgagcgaggcatgtagtaccgggtatgtttaagaaaacgacaatcttttccttttcacactcttaaaatgatatcaaaatctcattctctacacaggaaacccgtttatgttgtgggtgctgaacggtgtacatggaaattttctgacttccagaagactctccatggtagaggagctgttcgacctttgaccggcaaagaagatgtaattctgataactctattcaagtcttttgtttttgtttacatgatagctatactccgagacacccttctcttttttgtttatgttccgataaatcctgacactagcttctacatggatttaatatttcaagatgtgtgagaagtggagttactctcctcttaacgataatgtagaagctgcgaggcgtgtgattcaagatctggccaagcgtggctgggaaatcgaggcatgaccgttctttccctccacaagttttccagagtactactctcttttccctatatagtctacagttattattttcgtactgggaattatcctccatagaagttaaatgctctagtcgaactcagggtcatatacttagctcatcgtttgaactattagtctattaacgattggtttttgttagttctttggttttttccatttggtttgtagtctcatgtatcaagctcatcatctgtaaaggaacgaataaaagctgcgtgctctgacctagataaaataagaaagagtcttcctttgatgcagttaggattgatattctaggtactgacacttgagtttgctagactgaccatagcatagaccaatctcaagcacttgttacgaagtgttggcatgagtctcaaagagtgcttacattatgagaaacaaagaattgcagaatgcgtttggattgattaaacatgtgtgaaagactaaaaaaacatcatatggttcacgttcactcagggaggtggtgacattgactctccggagtacactcttgagtaacaaaagcagtatcttaatccaagaaaagacacaaaggcacaaaggtatgacacgcttctggattgaattttgtatgtttattgtacttttggtagagaatagttgaaaaaatagttttgcaataaaaatgttagaataatagaagttttatcaatagcgaatcatctcgagtcttagagagacaagaataaatcatctcgttacatagagttggttaattcatggaaaggagaaataaaaaattaaattcatagaaaagaaacaaaaaaacaaagcctaaacacacttttggattactgatctctgattattcctctagccctcagttgatcaaacctctccttcaaaagcttcttctcctctctgatacgagcaagctccatattccctagtactattaggacactagagactggaattgatatcaacgatattcgataccaaatatcacgtttaccaaacttttccacaattcttgctactacacccgccatgactggatatggatctggatcgcgagctgtaactactcatacgaaaagaaaacatagacataaatactcaaatccctaaatcggatgataatatgcgatacatcaagtttaaaacgaagaatcttcacaatcaaacaactaaacaagctggatttatagtaatgaatgagagagagagagagaacaaaaaaaacctgaagagagaaaagaccaaagctgctccagagaactcaaaagtagattgtgtgttccgtaccctacccatcttatatagccccaaaaaacatcattccaagattagttgactttgggccagaagcccaacgtatgcagtagcccaaacccaatattaagacaacgacaacccgtttatgctgagcatgggtatgatgcttaagttaagacaacgacaaccttttcctcttcgcactttcaaattgggaagtagagcgagtttttaacagttgaattgtagtgctctagtcgaactcaaggtcatttacttagctcatcgtttgaactattagcgaatgggttttgttagttctttgggtttttcccttttggttatattgatctactgattagttggaataaagtttttcaactttttttggtaagataataataataatacggtggatgcaccaccaactgataagagtctcttgacttagggatatatgatctgctgatccaattattatttattattttagttacttgttgacttgtataattttgttgccaactccatatcttagggaaaaacaaaacaacaactactctttctctactccattaacaaagtccaccatcagaacctaaaccctataaaagccatacactcacaacagcaaaagcatccagtaccattccccccaaacaagtacttcaagaagattggtgaacacactgagaaagttaaaagagaaaagatgaagagtgactcaatcgccgttgatgtccctgcagagtctagctcagtcatcaaaggcaaagctcctctcctcggtttagccagagaccacactggctctggaggttacaagagaggcctttccattttcgatttccttctccgtttagctgccattgtagctgccttagctgctgctgccacaatgggaactagtgacgagacactccctttcttcactcagtttttgcagttcgaagctagctacgatgatcttccaactttccagtatgactcacaatatttctttcttcttctttcatcttgtgttccatgggtactaagttatctaactttctgtttttttctttcaggttctttgtcgttgccattgcaatagttgcaggttaccttgtcctgtcacttcccttctcagtcgtcacaattgttcgtcctctagccgtcgctccgagacttctcttgcttgttcttgacactgtactcatcttcctcaatacttcaaactcttgatgctatagtttatacagaaattaaacaattctctgttttcttattgatgtgtacaggcggctctggctttggacactgcagctgcttccgcggcagcggctatagtgtatttggcacacaatgggaatacgaacacaaactggcttccaatctgccaacagtttggagatttctgtcagaaaacgagcggagctgtggtttctgcctttgcctctgtcacctttttagccatccttgtcgttatctccggtgtttctctcaaacgaccctaagtcaacaatacagactctttgagcgcaagaagaagcattgccaagggtttaattagtatttgtgtgaaatgtttatatggaagaagcttatattttgtatttgtgtgctcttggtgactctgttttctgttttgtattgatttttggaaagacagcaaaatgaatggaagttaattgtcactttttcttgtttaaattttgaaaatctgttagttaacttaagcgtatagattagttttgattttgtcccatctctggattatatccatacaataaatccgttccctctccaaatggaccgggccaggcccatattggccgattcatgacatgcttattcgtagtctctccaacagtcctctcgcgacgcataaattttaatggcggcgctcgcaaggatcggtggccggcacctgaaatccgtctgcttaataaactcctccgcctcatgtttcttcacacaacgccgtggtgttgcttccaagctctttattggtggtaactctctattcatttttcctttttgaatctgtgattaatacaatccatttctaggctgtagaattttaaggttttagcggatgcaaatttgttgaatatgattcattttaattgaaaattggtaaatctcttctgtaatgatgttgtaagtcttgaaagttattttcttctgcgagctattctattcactgttgtccagtaaccatttcttctcatggctttgattttttactttgtgtttctcttcaaagccatgtttctgtgaaactttggtctttttgtgctcacatgttgttcggtttgtagtaaattgattatgaacctgatgttctctactttctgaacattttgaatttacaatctccaataatgcttaattcccaataattcgattctgtttacaggattatcgttttgcactacagagcaaggattgtctgaggcattttccaaatgtggccaagttgttgaaggtatcagatgaatatcgatcccacatgtgtttgatctgcttattgtatatctgagagtttttgagatatttttgtctggttcttatcagcacaaatagttatggacagagtctctgacagatcaaaaggtttcggtttcgtgacatttgcttctgctgacgaagctcagaaagctttgatggagttcaacggacaggtatactgtgtttgttgttgtcttgctgctttcacttgcttaaaactatttctttatgataacaaaagacagtttctttcagcaattaaacggccggacgatatttgtggactacgcaaaggcgaagcagtctcttggtggtggtggtggctatccaatagctagaggaccgcctgatccagccgtaatagctgccactagaacaaccgaaacatcgaaaagcgactaacaaaatcgaagatagcaaattgctggacactgctgttgctatgtttcttggattttacttgtgtgcatgtgtaagagatgagcaagcttcggttattagtttcctacttgctctttcttctttattatcttatgaatcattcactgattgcttggaactaaagaataactaaaaacactaacttattatttctctaaaaataaaaattgaaataagtgaggtgggaaatgataatcttacagcgagcagcagaaaggtacatacgtggtatgatatgactggatgtcagttacaaatggagaagtccgttcgattgagtgaattttgtgagctccacgtctacggataaagatcctggccatgccacgtcatcatctctttctccctccccaaaaaaaactcgagcatcaaattcgagctcagcgttttttcgttttttttttttggttctctcatctcaatctcattatatcaccagtcaaaaattgtagaagacatttcccaactgattattcgtaaagcttacatggtagatggcagttaagtttcatcggccgggtcttgtaccgtcaaggtaaaccaatagcttacatttctctcgataatcttcgattttatgctcttttcgtggaatttttctgattaatcgtggtattgtagctgttcaaacccttggatgtccgttggaaccttgatttcgtgcagaagagtgctacaattggattatatatcaaactgctgcggaaattccaggactcaattgtttgtgacctatgatgataagaactactttcttcagagaaaactttttggaaacaagaaaatgagttcacggaggactacccagccttttctccttgcatctgctgaagatggagtggctgttaatgggtcaagagctagcgatgatgttcaggagatgagggccaaactcagtggatcactacaagatgaatatagctgtggtgaacttattcagtctttgcatgatgctgccaggacttttgaactggctcttaaagagaagatatcttcttcgagattaccatggttttcagcagcctggctcggagttgatagaaatgcatgggttaagacgttttcttatcaggtctgtaccattctaacatcagtcctccttcctagtgcttacattagttggtttctttgcactttcatggtaccatgattaggaaatctgggccagaacaaaaagttcccttcccattgcacatttagcttacactaaggatttcttctgtttatcattctcaggcttccgtgtattgcttactacaagctgcaaatgaggtttcatctagaggaaacaatagagacgatgatcttaatgtctttgtacaaaggaggtactgcacgacttacttaaggcctaagaactatggcatgcagcgttactggattgtcaacattttcttgtgttcttgatctagtagaaatttttgttattttgtttgaaatagaatgcaacaaagtattagttttcggatttatgcggtattggtttgattattattcttccaaagagtttcctttcaccaacgtttgaatctttttaaaactcagctgctgtctaattataatcgtctgttgctgcttcatggttctttatcatgtttaaataatcacatcatgcagtttatcacgccaagctgctcctcttgatagtatgatgcgggataaactatcttccagtcatcctgaagccaatgagtggttttggtctgggcaagttccttcggcggtgacatcttttgtgaattgttttgagggggaccaacgatttgtttctgctacttctgtgtatgtcatttctttttactctcttcatatgagtacgttctgtaaaacactcgtttgactttgaggtttttggaaagtgatgaagctttatgtttcatttcagctatgtcaaaagcaattccacagctgcaagcaatgagattgaggtgtcacttctcatgcttgtgctgaattgcatcgcagcagtgacaaaacttggcccaacaaaactttcgtgcccgcccttcttttctgtgattccagatactacagggagattgatggacaaatttgttgggtttgttccacttcctcagacctatcattcaatgaaaacccttggtcttcgcagagaatttcttcttcattttggacctcgggcagcagcatgcagagtaaaaagtgactgtgatacagatgaggttgtcttctgggtagatcttatacaaaaccaactgctgagggctattgatcgggagaaaatatggtcaagattaataacgtctgaaagtatagaggtaatgaatagaaacttgtagaggacatatctgaacagcttttagaatctctgtacagtatggatgtgagctcgtactatttgaaaacattaaagaattatgggcaagggaaggatttttatgacacagccacccttccatgttgaaatcattggatatatcatttgctgtaccttttcttataagtgctatttagattataaagaacatagccgaaacagtttgcaaacgtaaatgacactatctaggatcttcgtagagtggcacttatcgaaacagaaatctgttttatcttttagttttataactcatagagtgtttagattgttgaaatcagtaataaaagttgacttgcttggaaatatcttgggagcttatcatgacttgttggtgatgccttgcaggttttggatagagatttagctatttttggattcttcattgccttgggcaagagcacccagtcttttttagctgcaaatggtttcagttcgctggagaatcctgtggaagaccttgttaggtgactcattgtttttcttctgtttgcttaccatactctttgatacaccctatcacttagatcttctttatttaggcacttcattgggggaagtctcctacaatatcctcagctttcagccatcagttcttaccagttgtatgtagaggtaggcataaatcataccatcactggttgaaaatatatagttaccagtttgaaatcttatcatggaattctatagcgtaggttgtctgtgaagaactagattggattcctttctatccagccagaaaggactcccagccagccgaacaatcacacgggcataaaagcagaccacaagggccacctaattatgatgctcttccacagatattgaatgtttgctcttattggctacagagctttattaagtacagcaaatggcctgagaatccttctaatgtcaaggcagcaaaattcttatccaaggggtatttgacaacatgtttataaaataaattggagaaaaacaaagtaattggtgatcatattgattcatattctcaatgttttaggcacaacaagttaatccagtgccaggaagaactgggaatatcaaggtaagctcatgaagagcgatgtattctgtagaaagaagcttcgtgtatccatctttagaacgccttacatatccatccctatgcattttgcattcttgtatcccttgttgtggagtatacttttttaattaacaatcaagtaatttggctgtgtgcaactggattgtgtgatgcagtttggctgtaacagaagcgagttttattgacatgacctcatcctcaactgatggagagtcaagctcatttgacaaggtttgtactcttatgaattagtcatgaaaccattcacttttctgtacactatctgaatccagttgtttggctaacaactccgttgactttcagatgtactatagatcctaacagcagttatttctcaggctctagagagtgtagatggagctctcgttagactggaaagcttgctacagcagttgcatgcatcaagctcatcttctggaaaagagcaaataaaagctgcttgctctgacctagaaaagataaggaagctcaagaaagaggctgaatttttagaggcatctttcagagccaaagcagcttccctccaagaggtttgtagttgttgttacagatttttttccttttgatgcagttaggattgatatcttagtacttacgatggagcttggtaaactgtccatagcatagtctcactggatgcttatactatgagaaatataccattgcaaaatgcagttgattttgtgaaacgtttgtggaagactaaaaccttatatggttcatacagggaggtggtgacagtgactctcaggagtactctgaggaacaaagccagtatctaagaggaaaagacccaaagaattcaataaattctgtagatcaaggcacaaggtatgttgcttgttcttttagttaataattctttctttgtttttgagttataaacgtaggttcctttttgtattcctctggttgtggaaactaatttattgtatttcatctacattagtagggatagtggattctgggggttctttgttcgtactccaaaagggaagcctggccccgagtcattggtatgcttcattgtcttatcttatgttctatactaaagcatattcagatcttatacttggggctatttctgcttagtactcttcgttttctcagtccattcttggtatctctaatttggtctccatgctatgtttgatccaaccattttcagtttgttgtatggtgagaggttttaacatttttttacattatgcagacagataaatattttgagaaatccagagaaaatgtagataatgtggattccaaccccaatgagatctatcggttcgaacttctaaggaacgaactgatagagctggagaagcgtgtccaaggaagtacagatgagtcggttagtaagtagcagtcagacgctgctgctagatgtttgatttgtttctatatagtaaatattctaaatatctctatgttctgcagggacgaacctctgaagatctgcctaaatcaagcagcagtacgaaaggtgtgcagttggttcagagctcaaagaaagaaaacgtcattgagaaaactcttgaccaacttaaagatgccactacggtatgaatgtcattccacgcctcatggcatatacatcttcggtttcattgatcgaatcagcattttctaatcagcgttttctaatcagctttgttccttcactatttttctacttcactacatagttactaacattgcactttacgggatattctgacaggacgtgtggcagggtactcagcttcttgcgtttgattcagctgctgctatggagctccttcggaggtctgtggtaggagatgaattaacagagaaagaaaagaaagcactacgcagaaccatgaccgacttagcatcagttgttcccattggtgttcttatgcttcttcctgtgagtaaatactaaccttatcaaatttaccaatatcatatttccattctcgttggttgttcatcttcataacaccgtttctgttttctacaactttatgctgatctattgatggttgctctttgtacaaaatcccgtaataccaatcactgtatcattacatctaccttaacatttacaatatgtctgagtctatgaactaatctaatgggcacttatgtctaacaggtcacagcagttggtcatgcggctatgcttgctgcaattcagagatatgtgccaggcttggtaatgctttcttttttacttgcttcttctcttctgtacatttcttcaatcaagttgataaagaacacttttttccttttttgttcagataccttcgacctacggagccgaaaggttgaacctgttgagacagctcgagaaggtcaagcaaatgcaaacaaatgaaactgagcctgaagaaggcattgatgaaccagaatcatgactagatcaagaaacataaaatcagtatttacctcaaggaatcactttgttctatagttcattgacaagagttgcgcatagaggatctcattccatgtatctggtacaccgggtaggcaccagtggctacagtcttgaggaacatcaacagaagtgccttgctctcgataccgagaaatatgaccatctttcctaaactctgtcagatatgtaatgttcagaaacttaaccttactatgtcgatatctcatttcttcaattactttatagatatattcattgtgactcgcatcaggttccagcttccttttatcagtctcaggctcaatctctgcatcacatagaccaccggtattccatgtcccatttctgaaacaaccatagattcatcaaaacctttaaagaccccggtctctcaagacgatagtaaaacagcatttatctgaattgtcctaacctgtagtgcactggagagtagcttctgaagaagacataactcttgtcaggatcaagtttctccaagacccatgacttccatgtcttcaaagactttccaaatgcctccattactcccattgtcttgttcactttccttccctcctcaaaatagcatcccctgcacacacacacaaaaataaactcagttaagaaggaagagaatgtcgaattctgatcatagaagctgagggatttatcatacgttaacacagttttgtcttcgttccaccaatgccctgaattgaagaccagaacgtctgacccgacccatcttttcgactgccagttaaactcatcaactctcactgtggttttgatctctttcggtgatttatccggtggccgaccaatcacgacaagaaagggtgatctgtgatactcaacagtgaggttttcccgagggaatcgcatggagagaaagcccttgtgtttagttatagggttcccatttacttcatagatctcagatttattaggtattgcttgtgagagcatgcacataagggattcccactggtttcttccgatggaatctcccacgaacactatcctcccgttccgactcctctcaagtaaatcacttgcgttaaatctaaaccattcaatagccaaaaacacaaaaccagtgatcatttaagagaattactaaaacaaggtttcaagtctttttttttaagagaaagcaaaactttctttagtcagaagaaagtgaaccaaaccctaatctctagtgtttagcttgtaacttttgcaatggaatcaatataacttcaggtttaagcaagaaatatattttcgagtttaaagaaaaaggtagagtgatgacgtagcacaatttgttaccgtggaagatcgcagccgtgtggttgccatcgccaatcaagataaccagaatcttttcttccatgcttatgacaacgaaaaccagagtcaagaaagcgacactcttcgccataaaacaatccattaacggatgatgatgatgatgatgctcgacgaacccattttcctttggagtaatcgcactcctttgttactgtttgcgatgatgacgatgacaacaatccgatacgaagagagggcatgacgtcgacgaccacggtcgagaatatgaggaggctaagtaaaaagaggctgacgaagagatgtttcttgatcttgaagatgtacgaaaatgagcagagagagaagagttgatgatgatccatgttgtgtgtgatctcttctttctctctttgaacaagtcttcttctttttctctacacgagagagacgtcaaactaaggctatggctatatatatatatgactgctattaattttcgcttgtttttttcttcttaaaattaaactcatattgagtaaggaatcaaacaaataattttttgtttgttaaagtaaattaaagcaaataattacttaattatcatcatggtggaagcttccttgatcccacgttcgtcgtcttcacatcttccggtttgtgattagcgacgacgtcacgtcttaactattttacgaaatataaaattattaccattataaaatactactagagttgttttcattgggatacaaaataaaaagttaaatgctactctctcttgtaaagagtggtcaaagtaagcaaaatatgtaaatttatgttatacccttagttaatacactaaaacagtttctttatctaatgaataaggttaaaactcagatttgctttaaaaattgcattcaaagtacaaaataatactctgtaaaacaaaaacaaaattgaaaacgacattttttgttgtcaaagggagagagtgtttggttgaaaagtcctcaagttttgtatgtgtaggtgttatgagttttgttaaattgctttgtttatcgaacgtgttgaaaacgtgtcatcaagctgcaagatgcacgatgcacccttttggtctaagtgtgctttacatttcattatagagtcataatggaatatgtacaaatatacatctagtttgttactcatttatttggtagagacaatgatttgaagaaatatatatcatgttctaaagaatttgaatctgatcatataagtagagaataatttttaacaaaatttccattttgatcgattggaactttttgggttacttatttcgatgttacgatctctagtgttccaaacttctgtggtttgtaaaagaatttgaaccggccaatctgttggtttactttgtaattaatttgctggctgatgtttcctaaaaaagattgtttgacgtaaatttggtaaattgtcggttttgtggagaaaaatataaggtttgctcaagtacacatcgactaaaccggagaacaagagcttttttagttacaatcggataaaccgagcaattaaataattatcactgtgaaccaaatcctaaaccgaaccttataagacgtctcgaatagattaaacctgcgacggtaagctcaagagaggctgagtacactgagctgcgatcggcgactgtctcttgtccgggatagtgaaagatgaagctgaaggttgtgtatcgtaaggtctccgattacatctgttacgatctgaaagaaatcgtcttaccttcatcacttcccgatcctcctcacgtcgttaaacgccgcaaattgacttggcacgagcgattcctcgtgagctttccttcactctctcttcctcttttttatttgaattttccggtagttttctattgagaggatctggggaatcaaaattttctttcaaggacaaacaaagttcgcattttttcgtgctctgattttcttgtgctctatttagtttttttgtccaatttagagtgaatgtgttctcgattaggtctttaatcagcagatgtttgagatgatacagaatctggaagtgtgtgatttcatttatgtatattgtggaatatctgaaacacaaatgtgacaattctctagtttgagcaaaaaggttcgtcctttctagaagaagtctgtaattccacgtctcactattttcagagtaattggtgttttcttctctacttgatagtaaatttagtgctaatcactgggtgaaatattcatggttgtgattaggtgttgaaggaagcttcaaggctttatgctgcaagctgggtaagagatataggtcctgaacttcgtccaaatgattacaagaagcaaggggatgctgagcctaaaaaacaagcgaaagaggcagagaacgagccctctgttttggaagatcttggtaagaagctattgcctactttatatgtatctgacttatattctcctttggtgtcaccaaacgtttgctattgatattgacaagtgcttttcccagctaatattcactgcagcatgcattagtttattgacttcatcatgtatgatctatgtctatccttttattcataatcgcttgtttttcattctttgttctgttactcttctatacagcggtagctgcaagaggtggcatggagactttaaggcctgctttacatcgtctttacatgacacgagcttctaattataaagatgctcttacaagctttattaaaggttaccatgagggtctgcagcaagttatgcagaataaagcagagtctgaagccccagcagatgaagctgacaagtccaaaaagactacctgaccttttagttagctccaaaagcaggatttattttgtgaatgcgagtatgtacgtagctagatcttgggttctttgatggtgtaccacaacaatctaaagatttctatcaactacgtagtctttcatgctcaatgtaccctatttgtgaagtaacttctagtaaacaaaaaaatttagcttgacacttgtgcttcatagatttcagttccaattttcgcagcttcttccctgtgaaactgctgcagggaggacttgttacaaaaactgatgtgataaacttaatgatatattgtgatgggtttgattccctttacagcttattcagatttcattctccaggaattttctgagcacaagctggcacattgcacggataccttgtattggtgaaggactcaggtgaatgtttggacatgctgaaacaatagtgtaagcaactgtttgaaatagatgtttagttttttcagaggaaagactttcagttttcttcccatgttaaaagcattgttagtggaattttaatccatgctatctgtaacagtcttccataatgctgttgcagaaaaagttggccggcccctagaagttgttaaaaaagcatagatatcagatagatttcaggggaaaagttgagcagtcgattcagaaactgtactttaagtcttgttatgatcaaaacttttattgcaggacaaacccttaatgcaggaggaggccactgagcatcttaactatagccgaaagcttcaaagactagtgataatggcacatggctgagggtccctctcccacttacagagccactaaaccattgagcggagatcgattggtcttcaagtcaacaggtaagtatcttttctgaatcttcatgggcccttcaaaaatcagctgtggctaagtaagatcgaaatgaaagtagcttaaaaacacattttgcattacctgttgattatcaacctatgctgtcaagtcaacaaatgcacttgccttaaagattagcacttgctactgcactcaaaattggaacatgtgcgcatacaacccgaacatatataggtagtgagtggtcatgataagttagtattgtttccatctctgttatgcaaactttctgtccaatcaagatttagctttactactttggtgccttacgcagatagtttcgacagcttctttttgacaaagcatccacttaaatgattgtagaatggaaatttgcttttctattactctgaagttataaccaagctatagccgtctcactacctatagtacctgagcaatggatcctcttaacccaaaacagcctttagattacacttaagagtcccttatctgactagaaatctctttgatgtagaggaaagagctaagtctatggcgtaagagagtttagtctatgtgtatcaccaaatctgcctaactatttattagctgattagctagagtcgacgattaaagtaagtaggtgattcaacagacttgttgaacatggggaattatgttctgatgtaaaaaggtggtattcaaaagttggggagattctctcttttaattccttggtaaatggatgctgttgcagtaatataggagggttatatcagaaagctggttaaaacccatgtgattatggctgtatgcctgtataacccatgcttagtggttttcaaagagatggagaaatgatgaagaaacaatgtatttatgtatgtgtaaaagatatcattggattggatcataccacaaaactctttttggaagcacatggaggtgggataactgatcccaatgattgaaattttcttttatacatgagagaagagcactaaaagaagcagtacatgaatagacaatcgctttcacaacaggtgattcactgttcatctgaccttagtacatgaaaaaacagcttcttgtaggactcttttttttttttttttatctctctttttgtcaaaatttgtagactctttagtcgtcagagataacttacattgatatatatacttgtgacttgattgatctgatatgaagtgcaccattcccttacatttttggtttctctcccaaaattgaacttgttttacaattgccattgttcaccaaacaagaaaagtgaaactatcaatagaggctagtaaaaaagtgaaaacatgaatatagtaaactccacaataataaacatcatttggttggcccacttttgtttctataattatctcaacaatttccaatttcatctttttcacccaaaaaaaaaatcatcatttgacaagtacaactatacatcatgcatgtatgtgaatacatcatcatcatcatcatatgaattggagaagaaaacctatctttttttagttatgtatgattaaaacaaatttgctcttcgtctctgactttggaagtaataggaaaagactatttccctcaaattcagcgattttttttttcttttccaaattagttacatacagtacggaagctaatgagatattattaaaaatagcatacaattttccagaaaattggcctatgtggctacaaagtctggtcccataaagctttaagtcaattccgaaaatgttgtcacttctttggatctctcatcctcgtcttatctctctgctccttcatcgttctcccgtgaaagctatattctgttttttttttcatttcaaaatataaacacataatattaagaatctctctgtattgtaacatactaacatccataattataccaaatctgaagtatcaaacatcaaatttgtacacatttccttattcatgctaatagtcattttcttctctgaatcattgtacattgcggcgccagtaaaaaaaaaaaaagcaacagtgattactgaggccaacatatatactttaactaaacaatgtagtaatactaaaataaatgaaagtgggctcagacaaaaaacaaatcaaagtcactaacaaagtggccatgtgcgactgctcaaaagtctagtgtctcttaacagattcctgattccttcctctatagtcttcattatatcatttaactatttgctcctaatcaatctcgtttatttaattataatttcaactgtctcgtctcgagaaacagcgtcatccatctgtttttaaatcatgtatctataaataatattatatgatggatgatgtaatgtacctctacctaaactgaatcagatatctttataaaagagttaaaattaccatgttatgaggatgagagtaataatagtacatgttttggccgtagtaaccgtcgggagattcaacggtggtggcaactgcaacagaatcatctccgtcgttttcatccatttgacactccagattcacaccgaaaagcctcaccgtccttgagctcccgacgacggaagacgacggtgtgctgtgagtctcagccgctgttgctacggcggctcctgtaatcaccgacacgtgcgtgtcattaattaattgaaagaaaccaaaacaaaaacataatagtacacaagtgaacaaaaagcacgtttgtcccaggggattggacggtcttcttcacgcgctctttaatgcgcgtgtatagctactctattaagtatgttaactacaactgggagtattaagcaatcgaggttagagaaaagcaaacattaattaatagctgtataatacaatgttacttatctcaggttgttaatacgcaagcataaatcttgtagagaaataattatagtacactattagctaaaggatatctatatttgggtgtaatgttttaatcctcccgacaacattagatagtcgatatacactctaggacacgaacaattcattcgtaggaaaaaataaaaatgtctacccaaaaaaaagataaaagctatttgatgtaaaaaaagaaaagagacgaataatttggttaaaaagagaaatatataccatagtgggaatactctgagtgagagggaggattagagtaattactagtggcgtggatttgatgataagaaagagctcccatagaactcgtattcacggcggagttagtggccgcgacggaggatgaggagccttgtccacgtctgcgccagccaatgaagagtctcctagaatcagaacggtgtcgttggaagaaaacaacgtcgcctggatcgagctgtttgtctttgacaaatctgctccatcctttagtcaagacatagctttgactgctgttccagtaagagtatctgaacctccatgacttgcctgactcgtcttcaaagcttagaagcatccctttctccgaagatgacgtgtcagcagcagcagaggagactaggacggcattgagagggaagtatttctctgcgtgttgttttggtatgacgaggcggttgagtttcccgacgtcgcttggtgtgagagacttctcgaagagtgactcttttaggtcgtcgtggagccatgtggcggtggtggttgtctccgatgtgtcggtggtgtggcggtgttgctgttgctgccacaagagagtgtggtggtggtctgtggagtaatggttgactgacattttttctaggagatagaaagcgaaagagagagagcgaatggagagtatagggagagagggttaggtgaaagagagaggtgggtactcgtagtactaatatagtatgatacgaaggagagagagagagatgaaaaaattggggtttttgagggttaaaaaatttgacgtgaaaactttggcaaactatttgaggagagagcaacacacgacaaccagaagactttctttctttttaaggttttgcgtgatgttttatctttttccatcattattactttttttctacttcttgcagtccgtattctttattgatttacactatttcctttttcttattctatttgcctatatcatattcatgtatgtacgatcggtgatttttttcttaacacacattggattccacgatttgaagcatgacgtacgatatatactttgaaacatttatatgttaattatgtattatggtataattttgtaggggatatgaaaagttatactcaggtgaggttggtgtttaggaggaatatatagacaagaaagaagaactaaaaggtttaaataaatttttttaaaaataaaaaattaggctacacgaaaacccaaagaatcaacctatttagagttagaaggatctgaccatttgaaaagataaatgcaattattgggagaaaacaaatataatggtcaatttgttttttgatgtcatttcttagtaacatcctgaaaaaaataaagttctttgcgtgcttctcgaaatgttaccaaaagaagaaaaacaaaagatatggtccttgttatttcgacgcaattaatagagcatataatacacattttatctgaaaaagttagacgtaattcacagtcaactgtgtgatataaatgatacgtatagttaggccgtgttcgatcttcgatgcactaacgttatcattcgtcatcagtgtgttagtctcaggttcttaaaaagccttttcattggtaagctattttgggggtttgacgaacacaaatttaagtttggcattagcatttcactgatattcaactgctgcatatatagtattaacgaatattgtcataaattaacaaattttgattattctttgaaatcagaatataataattgtgaattaatacgtagttatttattttttaatgaagacgtagtttaagaagatgtagacgttttctttactttcataaacactatcgacatttttgttgcattacctttaccgtctaaggtaaaaatattgttacgtcatggattcaagttacaagatattttcctaactttaagttttacaaaatattttgtgaagataatatactcaaaattgtttgtcttcagcttaagggtatatattctacatttgtttattgggtctgttttaggggaataaaagatgacaaacaattgggaggtctaataggtaggagggtaaacaatagcagtatagctgcagaaaagattataaaaactactgaataaggccgagcatgtttgatcttgagctcctctggaaaagaaaaaaaacgacactttaaatacatatttattttattttatatatataccatccatctaacctaaccctgtccagaccaacatgttgaatagtaaagataaactccaacatacagtattaaataaatataagctccaatatttattaataaaaatacttatgcctgacattgtttgggaaggaaactataccaatctctatttattcttataatctaatagattgagaaaacatatatatccactctagtgtaccagttaagctcttcaaattctataactctgaatgacttaactttttctttgttgagaaacgattgaaagttaattaggaaacaatttggttttttaaaactgaaagttagttcgtaagaaaattagtaaaaattaatacagaagatggcgtaggaacaaagaggatgacggaatgatgatgaaggaagaaagagatccaacggctgagagggcaaaatggtttcacccaaaatagatactttgccctcacgcaacttgtgaagtcatggtgctttgcctttcccacacaccattccatgcatcttcaattctactctcatttattccccccggagattagacttccttagattatatatcttcaacatcatttttatttcggtatacgtcgaatatggagttgctatgctaaaattaatactattaccaattaactaattaatcatttaaaaaatgatttatatattctcataacaaaatcactcaacaaaatttaaaattttcaccatatactttgtaaactacatcaaagtatataatactctattgcatcttaactttataaatattattattactgatcggcattgctatttttcttgattttaatcgttttctatggaaatttttttaactacctgaaaaatccaaaagacatgcaattggacacctacgtggtccgcttctgttttatttgacgactttttttaccaaatgtttttcttactatgactagattttaatccacggaataccgcgggacgatttatttttcaaaagtaatatatattaaaacttgcaaatcttatttttataaaatatttatattttacagtttataattgttactaagtaacactataccacgaattcatgagacaattgttaaaaaactgaagtttttaacccttattaaaacagcatattaataatagtttacaattttataaatattgattcaaatacatccaccatataacccaattccaaataaaacacgttttgtaatttctttatccgtcccgtgatttttttttaaagtagtaatttttaaaatttaagaattatttttcatatataaaagttttgcaaattgtatcattctctaatacatttatattttatagtttaattttatatatagtaacattatacataccacataacatttttggttttatataatcttttctaaattaggatgatttgatatgtttaatattagtggtcttaaaatataataaattaaagatttaacccgtattgaaacggtagattaattatattttacttttttattaatgttgattcaaaaacccgtccctccaaatccgtcttgccaaaaaggtatttattttattaatattaattttattaatgatatgactctgaattataatctaaacattttagctaataacataggagtgcaccatatttatttaatagaggaatgtaccatatgacccgaatgcacttttatccaaatccaccaaaaaaatcttgcaaaaataatatagagataagaaacgatagtcggttttgatagatataagattatcaaatatattagttagcttaaattagttaaagaatacaaattgaaaaggtatattacactttattagaatatagtatcaaaacttatataacacagagatttgataaaaatttaattgttgaatatttttttttgtgctaatttttatgtgattaagatttaattgatttcgtatataaaatattaaattgacttatttgttaataatttggtaacatatagatatttgaatatttagtatattttgcttaagtttaggaaatctttgatgacccgtctttagatccaataagctctataatctagatattaacctgcagtataccgcaagtatgcttatattttagttaaactgaaaacttttattgtaaagatgattaaaaaatatacgatattgttttatttgatttaaatgtatagtaaactgtgagttgtatatgttttgttgatattatttatattgttaagtgtttaagattatacatttgtagtttgattgttaatttaagagtttcacctgtagtataccatcttgtattaatatcgagttaaacccgtcaattctaggattttccagcttgtattaaaaattgaatcacatctaatatgttattaattattctaatatatataaattataaattttcaatataatatgtatgaaattgaatataaatatttcaaattatgacccgttactcagtagaaagttttcttaaatctatttttcaccgttataatatttttttatgtattgaatagtttatatttgtttttaaaaattcaaattatggcatatgccaaaaaactctaatttttttttataatgatgatattatttttccgcaaaaatagaatcatataaagatgagaagtgaactataataattaataaaaaattaatatgttaattaagatatcaaacataatttgttgattttaactgattacttttttggaaattaataatgtattttgtttttctaattaaattaaattaattaaaatttagatatcaaatcttatatgttgattttgattggttattatttttagaaattaataatagatttcgtttttaattaaatttaattaattaaattagtatttgactttttaatctttaaagagataaattaatttattctttaaaattttatttctaatagcatatttatgtaattatttacaaaaattaaggttatatttaaaatgtactttccaaataatatagtaggattatctttcatttgtaaaacaaattatgataaatttgtcacgtgattgctggacaccattattggtgtttagacgtttatatttttcttaatttcaataaaatattattaagatatgaattccacaatttacatagacattctttgattttttatccgtctaacaaaaacaaaaaaacttaaccaaaaaaaggcagaactttaaataatctataattattcatgtgtctatgtatatattctttttcttatgaagctttcgtgaaagaataaaatgaaaattcattgctgactgtgggccaacttcgcttcaagtaaagaggaccatctaaagagattataaatatatatatatatatatatatatatatatataaactcataaaatagcaaatgataaagtataaatagaaagtttgggttttttcaaatacaattatgggataagatttggagtgtaccattggatatgtgtaaacacagagaaaacaacaaagatattatttcctcttgttttcgtgtttcaatcctctcctcacagatctctgtcgttattctaattaaatttcttaagtattccaagttttcaacagaaataccatgggtttttttgttggagttttagaataatgcctagattcctactttttccttttataatgtgtcatatctaatataaaaaatatataatcactgagatttactttaatatttggttagcatgcaaaatttgataaaattaattaatatgtcatgtatcataaatttatgagagatttgtggagtatgacttcccacttcaacttatcaaatcaagagcacttaaaatcacttaaacgcaaaaggaagtagtacatatatcgatcgccactccacgaaagcacaaaatgtgatgatattatgcttgtgtcttgtgacattagtttggatgtcctgctctaatccaatcttaaaaatcaggtacggatgctcattttggtgtttttcttcaccgggtccgggattgtaattatgcttgtgacatagtttcggaatttgttccatagctaagacatgtcttcttcagcaaataatgattgaattagtgttgcaaaaagattgagtaatggacaaaggccacatcatttccaggtcgatttcgagacacctttttcgcatgtacgtctgcatcaattaaacacactttgttattttatttatgtccttttctacaagtaattttaaacttttatgtataagaagttctcttttaaattttcaatatagtaatatcgcacatgttagggtcatttcctctccaatgacagaagaggttcttgggttcttgtatatactgtctttttttttctttcgctatattggtcataaatagtctcatagatgatagaacatgatttcttcttctcatttttttttcctggtctttctaatcctatacaatttgatggaaaaaaaaatatgattcttttgtcacaaatgattgttttggttatgaatttgaaacgaagggaaaaaatgggaggttatatattatttttggcaataaataatgaaggcttaatcatgttatatgctctccaataacctagctaattaagttgatgtattcaagatcaacttttgtatctaaatcctattttatacgaggatatatatccaattcaaaggctgcatgattttttttttgctaaggaaggctgcatgattaagtgaacaaattcaaagatatgtgttttacaatctgtttttgttttgtcgaatttcaacatgttttatattcgtttatattgactatacaaaaacgagtgctcaaaagtcttaacatattagtaacatgttatttttcttttgtcaacatgactgctgcgattaggggcgttgtttcatgattccacattttgaataactttagcgctcttgcaatgaatcctataaatatgcataaaatacataattacggctacatataatcggcgatatgattctaagtttttcaagcaataaattttcttggtggtacgtgaaatgtactaatgaaaccgtatatattattatatgagcaaactgttacacacaaactatattgaatacaaccaaattgttacacacatataaacgtagtacatataaaatgctccctcgaagaaaaataaaaaagggggcaggagcggtatctgcgttgtaaatcgtagagggtttctataatctgcaagtttctttatttaaatgtctcaaaacgacaacctttctttgttatttttggaaagtggtgcgagaagcttcactgagcttcgggtaagttgcaatttttatattcttattattcctatacattcatgatattttctcggttccctagtaaaatagcatcatctctttattttcttcttcaaattgtgttccctcctgttctttgtccacaaattgttcccttttagttgttcgtgatttcgttatgagtgagtactttcgaaatacaataatataaatagaggattcacttgtaattggcttatcattcaagttgaaaccaatggcatatatcttgcgttatacaaataggttataggtacgtcgactgcaatcgaggtaattgatgtactataggtatagtataatattttaagattctatatcctttggtttagatgaagtacttgtactttccaagtgtgtattcttttgtataaatatagataataggtcctttataaagtattaaactatctattttgggtgatagttagttatgtttttgaatatattgggtcagaaattttgaatctagaacatgtaactctatatcatagttctttagcggttgaactgttcacggtgattcaaatcatttcactatcatgatttcaaaatttgaatcacaaatatggt

SEQ ID NO: 1407 - DNA, 84350 bp, Arabidopsis thaliana
tttcaaaaatctgaaaagaggatttagagaagaattctgatcaagataagatcgggtacgagaacaaaaacaaaacaaaacttagtggctaatgggttcttcgttttcaggtttcttctttggttaacgtgtgggtacccaattttgatgaataaagtttcaaaagctactttctggtttagctttcaaaagtctttcttgatgggttttcatcagaatgaaaaaagaaagaaaaaaagtctttgttttttttttgtgttgatgggtcattgctacaataatgtaagatgtgatgataaaactcacacctcaattacagaagacaaaagacactcatgacatgagtaatgattttacccaatcaacccaattttgccagaaggctaaaaacaaaaaaggaagatgttataatggagctttaagaaatataaatctttctggtaagagtcatcaattgatttagcctgtcttgtcttttacaattccagaaacgtgcaatgatgtaagattggtaaagaagcttagctttagctagcttgcaaattcgaattagtcaaaattttctatttaatcatatactttactctgattactttttcgcattacatatgatggttgagaccttgtcagttataccgttccaagcatttgactgattgccataagacctggtgatacatcttatggtgaagaaagcacattcacattggtgtccaaaaaataagatcaccttcacattcagggtctgacataactgatatagaaagaattaacaattttcctaaactatctatacaatcaccaatacaggtgaagctgctctaaatgtcagccacagatgctctgagtccaatgtcgaacgagaatttgatgcatgttaactccttcttctttgcatcaagcatcttcattttcagcaagtatgaaccctgcacaagaaaggtaagattagaatctgttatcttcctgtttttgtaccagattttcgacagtaatatgcaacattaagacattcaacctaagccatcttatatctctcgatacaaaggtaatccttatatatatattggccatccattatgaatgcaacacattccacaaaacaaagcaattatgagaacttacaggaggagtataaccaggaagaacttgagagtgtgcaaccaagaaatctccggtttgtataggacaactagtctcagtgcagaggtcatgagtctcagagtgaacatgccatccaaagtatgaaacttcaatcaccagcttcccaaacgaaatctcacggcctttaaattcccccaaaacaatgaaacaaaagaatcataatcataaacagtgattgttcaactctactacgaatcaagacacatgagtacaaacatcctaagcagaaaccacattgtatcattggtatcaatataagcccaaaatcttaagataaagactggaaacagtaatgaacaaaacctgtgttggcagagatggtgaaagtagctggctcgcctggtgctataggattaggagatatatcaacctctttcactttaacttcatactctgcgttctcttctacaatcaaatcaagcagaatccaaaagcaagtcagacaaaaacaaaatttccctgaaaaaaaatcgaatttttacaccgaccaatatgagccaaaagcaaaaagcatcgaactttagaactcaatttgaattcaaagccatcacgaggagaaacggaggttgaaacacgtaccacagtaatggacatcgatggctacaatcggtgaaacaaggaggagaagaaaaacagcagcgagaggaagaatggcgaagatcctcgacatggtgattgatataaatctctcggaagctataagaggaagatgatgatcaaagcagcagcagagtagagttgcggaatctttggattcatatattcaaggaatgtaggaagagatctggaccgttcttttagctaggtcagagtttctggaaacggacggctcgatttcattgtttggtatgaatgtgatatacacttaaatttatttaggataaacatgcttattaatgttatttattgtagtaattatctcatttttaatcatatttatctcttacattttctatagttttttgcgcaattgttatttgctttgtttaataaagttgactttgatctctgttttgactttagtcttttaccataattaacggattacttattataacgctttgctgaatgagaaattgagaatggttacgttgaggtagaattctttttgcttttttgaaatttcaatagtttggcaccgaaaaatagtaagccttgccaacttcgactctactatttgctatttagtatttatgcagctacatttcttcatttccttttctttataagttttcgcctctttttagaaaatatgaaacgtcatggtcttgctccacctctcctatatattatttaaaatatttttgctatgaagaatataatgcatgtttgtgcagaaccaaataaaaatcgtgaaactttacagcttagatattattatatactatataaaaaaattgtcaacaataatttcttttataaaacgcgactaagtcaaatatccatcattggccggcgggaaaagggaacaacgtcagcgacaggtgtcatcgccggtgatggtaacggagacgtacggcaaacgggacaagtaggatgaagcctgagccaagggtcaacgcaattgtcgtggaacaagtggttacaatcgggcaaaaccctgatcatgtccattttcttgtaatccgcaagacatatagaacaacacgacgtcgtactcgattccttttgtaagctataactcacacgagcctcttcgtacgggagcttaggaaaacccttgatcacctcctcggttagccccaagacttcgaccacaacggtgtcgctttcatcatcttcgaagtcgaaccgttcttggccaggtggtaacgttccattgctctctctttgccggcgtcttgtcctaggagtggtcgtgggagaggcagagatatggcttcgagtgcaatagtaagaagttagggtgattgtggtaattagcataagtataccaatggagactccgatcccgtaagccaatccacccatcctatctgtgttcgttagccagtggccggagtaaggtggcaccaccgtcgcattcattacgacggtcagaattttaattgtagtctgaagaaaaaatgatgagtatacgaggaatgtaatgaatgttttcgttaatgtatatgttttttggtcatcacgatgatgaagcttcggagtcaacgataagatgtaatgtcatatagctttgttttgtttggtatagggtgattttaaatatattaacaaatagttaaccagtggagttgattaagcgcttttacagatattcaaattattgttaagacttaatcgatcatttaaagaggctagtagtcaatcatagattttagtaaaatattaatccactgtaacccattgtttttcaatgttttttttattaattatatatctacgtattacaataaatcatggcatgttgaatgcttgaatgaaatgacgtatttgatcgttttgttggcagcttccgctcaccactttaattaactacgatattgctttatttactactaattaactacgatcgttttgagtggtaactttgttagcttagcttgtgtgcttatcttgagtagatgaactgaaatatgtgtcttatgatatatgattccttagatttataattttgaatgtaatcctaaacatgcacttttcatttttttaataagaaatatctacattttagccaaaaaaagggaaaaaacatgtggtaacaaaatttggtaagaccgtaagagtatcggtgctaaccagaaacatttgatagcagttttgatagtagctagttgaaatgcatgtcgatccatatccaatttgttttttcaactacattctcataaaataattttatcttttcctagctagtatcaagtactaattaattaggattaattataatcctagcattacatatatatcacatagtaattatttataattcactttatccaaatatacatcaccttgaaaatgttttcgtttcaagaaaaaggtacgtaatttttttaaaaattatattgattgtaaacatgtaatttcaaaatttgttgaaaatgatgatgtgtccacattgaacagatagttttgaactaatatacgtataattttgggctttatatatttgggctttgggttatccataaagatatatatgcggaacatatactcgattgtttatcttaaacctaattttatttattttcaatcgccgcttttactctggtttgtatgtgtcttgataatctagagattttgtttttaacgaagctttaatcttgaaatttcttaaatcctttaatggtgagtaattctctcttaaattacagtaatacactattatctaggttcttgatatatcacatgtttaagtgagattcaagttttttttttttttttgctaagaaagattcagtgagattcttaaagcttttttttatataggttcttaaagcttttttttttgtttaagtgagattcaagcttttgtttaagatatttactgtgtatttgggaatgtaaatttgggaaagtggcctaattaagtttgtatgtgcttgttaattagtgcttttttacgaggttgtaatttcatgtaagttatagtagatattgtactgttgtggattgtgttgatgtttgtgtgggcttgttagtgttttatcgtattgacaactagctatgcacaaatctagttgtcagtacatgatttgattgggtagatatctaatatctagtatctgatgaggggaggaggtttagagcatctccagatcagtagaaatttcatttaagagtttttatcaatctatttagttttaagtaataaataagacagaagtaattatacatttaaaatcatgaagaaatagtgaaaactttgttaagaactctgcgatgggagtacttttagggtttggttatcttggtttagttttggtttggggactgcattttgcaattgctttctctagctcatcattatttaccaaattcctcttgttaattgagtcacgtcttcattaaccatgtttttttttctgttggctcagcagtatgcattctaattggatttgaaaggtgaacatagaatcaatatttaaagggggtgcaagcaagtgatcggtaagctgaacctattaaaatctcatatttccttcttaattactgatatcctccattaatacccccgactaatattttcttatgtatccattccattctgtttgcgcgtacgtaaatatcttttttcaatgttttgtcgttcctcctttttacatcttttatcaattttattatattttctacaaatcacaaattaattattaaggttttagtatctcatttcatacgacatatttgttttcacctatatatgcagccatgcaggatcttttaatcgaaagagttcacctcgccacaaaaaaaaagttaatactactatttatttcttaggttgtagccttgtaggtcattgctcttattttaatataattagattaaaaaaatagacatgtcacatgttctctatttcttcaaacatcttgattatgatatctaaattctaaagttttcaattattttgttatctatgttataaatatatacgttaacacaattaagaatatacgaatatttgaaatcatcacgatggatttgtaagattattttatatgtttttacaaaaatgtagcctaatcaatatcttttttctaggtctccatggacactatacgtacactcgagtgctgagggaacaagcaaacacgatggcatcgtctgtgtatcgtacttagaggaaaagctgcatgcatgtattctcttttttttccctcaacagcattttttcacatacaaatagatctatatatatatatatacatatatatcttactatttttttttttatcttactattaaaaaaaaaaagcagaaaattcttaaagaaaagaaagtgctgaatgttgatgatacttaaaatacaattgacatattgtaaaacgaaatgaaaagctacatgaaaatatgataatatatatatatatatatatatatatatatacatttttaacacattttggcaaaaaattcatttggcttatgcatttattgtaattctcttgacattaaatgatttgtgtctgtattatatattttcgaagtccaacaaactacgatttacaaatacttaaaactgttattttccaggtccatatggacttttacatatagatccactactttcgtcattagataagcccaattacaacaaaaacgttggcaacactctcacattactattcttcatttgttttatatatttggtaagacaatcattaatgctttcacaaaattgcaaaattttctgactaaatttattccataaaattcattccaaattcattccagtaaaattgaaatttttaaacaataatattattacaaaaaaatgctgtttaatttcacatgatagagttatatggtagaacggtttggattgatattatggaatatataccacgcgtaaaatcttaaaattaaatataaaaatatatttctataatcctaaactttaaacaatattatattagtccacgattataaatgtttaccaaaattagtactatatcacttttacaataaattattatataaaatacataaaataaaaatattgccccgcggttaaatcctagtagaatagaggagaaacatactattttcccactaattaagttaccaaaaaatctattcaaacatttctcaattggagactacaaccatggaaattctccccgttcaacctcttatcctaggcttttcttatataagaccacacctaggatgcttagttttcacaccacaaagaaaaaaacaattccaagtgatccttagccatggctcggaaaaaagtacgagctgcatggatccgtgacgataggatgaggagggcaagcctcaagaggaggttaacggggcttatcaaaaaagtgaatgaactgtccattctgtgcgatatgcgcgctagtgtggtcgttttcaatcgagaagaagaacaattgacggcgtggccatctcccgaggcagctaattcactcatcgacaacttttattctctaaccgaccatgaaaggaccatgaaggccgttgatccggagtcatacgtccagaccgttatcgaaaagattgagaagaaacgagccgatactcggaaggttatcacggagtttgagatggacgaactcatgttccaagtccaaaatggtcgtgaacttgctgatctctccccaaccgaggctgataaactaataccatatgcggataagaaacttatgtggttgagtaaacggatgggttctacgggggtcgacgccctgagggcttcgaatgttgcgtctgggtcaggtggaaatgggttaaacatgatggaaactggaagaagtttctattatgttgataaatgggtcttcgttgatccacaagtccaaaacccttgtgatgttgagactcatttacccacaatggtcagtggcttagacctaaacatggaaccatctgatgaagacttggggacctataaaggagagagcagcatggccggtggtgctgaagacgatgccgaatgaagctgccgtcaaagttgacatgacaacttgtcttgaagttttcttgaaataattaatgttgttctttttctattattgttgtttttcttgctcgtttcgtatctctagtttttctatgttttggtcaagtttttatcatgtctcttgttatgtgttaaactcttgtatttgcttgtcatgtcaacttaattttaatcgaatgtttgtttctttactattctttgcagttttgaagaactcatccgtatttaacaaatttgtgcaaaatgttagggcatttttttttaacttttcctaatttttctagagcatcgtattttaataagataatcattgtcatgctatgcacgtaaattattagagatattatcattctcatgcatcgtacatagttttgttcatttttggacgcattttgaaacttaaaatgaaacatctatatgctacgttttattatctatttatggtcaacacttatattttccttaatataatcaattcatttgttctcctataacaaattattttaattactatggacttgtatcctattaatttgtgttagtgtttttattgtattattacccattcaacccccaaaattgcaagttgtttgcaagagaaattattctcattttaacgactaagtcgcttggctcatgcaccttaattcaattgcattcaaaaataagaaactttaatgtgaaaaatgtttaaactttagaagctaatgaatatatttacttattattttctttgtttgacctctctttattatcaattaaagtaataagtttgactatctctaaataatgaaatgttatgatatcataaaaggaatgcatgacccaaatgtaggaataagaatttatggggcatgcatatctagttttctatataaaccaatatacatatcataaaaataattaaaaggaaatatcttaattactgtatttaagaagtaaaagaaaagaaatcttggtgtattttttaagaaataaaaggaaagatatcattttattttctttgacagctcatcaggttattttctcaaaagggcagatgataaagttaggataagtgtcaaagaatacttatgttaaatttagaaggaatgatatcatatataggatattttcctcaaattgatgagtgttgaaatgaggttcatttgatgggccgatttaatccgacctaagtaactacccaattgagttgggtatgtagctatgatgggccgattcaaatatggctcagaggcactagcactagtagtagcatagttgttgtagaaaaatagggcttaaaatgggccttcattaatgagcttattatgtcggtccatctgaaaggagtttttttttttttttttttgtgtttcaacttttttctcagaatgttgtcaaccaatcagagtattcaaacggtagaagccatactcataacagagtaaaatatattgtttggctaaagaaacatcggtgaacactcaaatttaatcagaagggaacaaaaaacaaacttgacgacaaagcagtactagtagtactgttacttgatggagatgattatgaatgaagtgggatcattgcagcttgtggagagagcacgtcaagccaacgctacagttaactagagcaataattctgtctcttttatttttatgtcacctactactactaaagaaaacattttctaataaatattataaaacaaaaaatactcgcatgaaagttgaaggtgattggttgatgaagctattgttgtttccattacacttgttcactcatctctttctctctccttctctctgcggatctttgtttctaatttggaaccgacatagctcccaactaataggaatctcaagcttctcactctctcttgtgtaagtttcttctacttatgttttctttactccattttggattcttcttctctttattgtgtcctcgagtatctattgtggatcttgtctagcatttttcacattaatgtttcgtttgacgatttgatttttgggtctacttttatagtttctcccaaattttctttctttagacaacaaagtctgtttcttgactgtgaacttgagatgggttcgtgtgctttgcttttaaaactaaagtctaaaaattctttccttgttaagagtttttacacaactaagagaagtcttttagttgttgacttttttttttagcttgttcaacagatattttgtggctctctttcagttttccattggacttttggaacataagctatgcaaactgaggagcttttgtcgccaccacagactccttggtggaatgcttttggatctcagccgttgactacagagagcctttccggcgaagcttctgattcattcaccggagttaaggcagttactacggaggcagaacaaggtgtggtggataaacaaacttctacaactctcttcactttctcacctggtaaactctctcaactttcatatgtaatgggagctttcggattgttcttactgaattctctaagtgggtatcaattagccttgaaagaagacattacctctctgtttcttgcacattacagagtgaatgcaaatgtttgaaggtgattttatttatgctgtcattgatttaggtggtgaaaagagttcaagagatgtgccaaagcctcatgttgctttcgcgatgcaatcagcttgcttcgagtttggatttgctcagccaatggtagagttctcttgcagtggaacatcacaaagaaaaactttcatttccctttaattgttttcttgagtatttgctgtgttttgttttcattgtagatgtacacaaagcatcctcatgttgaacaatactatggagttgtttcagcatacggatctcagaggtcttcgggccgagtaatgattccactgaagatggagacagaagaagatggtaccatctatgtgaactcaaagcagtaccatggaattatcaggcgacgccagtcccgagcaaaggctgaaaaactgagtagatgccgtaaggtaacttattgaaactatctgatcattttttcagttatgcattcaaaaaatgttgccttatgttatgatgtttcagccatatatgcatcactcacgccatctccatgctatgcgccgtcctagaggatctggcgggcgtttcttgaacaccaagacagctgatgcggctaagcagtctaagccgagtaattctcagagttctgaagtctttcatccggaaaatgagaccataaactcatcgagggaagcaaatgagtcaaatctctcggattctgcagttacaagtatggattactttctaagttcgtcggcttattctcctggtggcatggtcatgcctatcaagtggaatgcagcagcaatggatattggctgctgcaaacttaatatatgatcagcagataggggacaagacatgatttggttcaccagtcttttgtcttgtcccttatctttcagccaaacggaaagagaacttgtgtcttggaaaaaagacattgagtttccttggtttataagattggtccttttaccatccgtttggctgtaaacaggcaaatcatctttggctcatgcttcatcaagttcttatcttcgtctgttttcttctacgcatcttcataagatctctgaactagtgaataacatttcctagcatcatgtttcaactagtgtgtgttgtaagaaactctgccttatttccagatgatgtattgtgtgtaacgtgtttatgaaacaaacgtaagactttcaagttaatgtggtttttatgtaacaaagttaaaagactttatttccattgtctattctcatcctgatactgtgtaagaagaagcttgtggtttatgtaacaaagtaaaagccaaacttcaataaaaaaaaagagctaaagcacatattaaacagatgtttaagattagagagacaaaaacttgcctcagaactagctgccaatccagaacaaacttaaagtcaatttaaagattagtattaaagagaagtttgaaaaccatttccctgcattctcccaccatgcaccttctgtttctcttctatttgtttgctggaatttggatccccccagctgttttatccttcaaacttgccacgttgtccggtaacgactgccctgtgaagtcaatgacttgccattcatcatcgatggtagaggaatcctgaaaatgtatgactgccatgattagatacaagtcaagttgagaaacaaaagactctaagaatcagaacattaaacaattaccggatgttgatcagcaagaacaggtgatgactcgttttttagaggcagtggtagtggaggagacgtttcaggcgtatgtggtggttgcatttgtgttgaaaggtgttgaggttgtgggacgttagcagaatagtctgcatcctccaaacgagcaaaacagtcaagcaaatcaatcatatcaatatccactccctcctctcgcttttccaattgaagacaactgagaaaaccatcaacaacggtcgccgtacaatcatcactcttgctcagcattttggaaggcattaaaacccttgaatacgcaataacaagcccattgtaaaaactgaacctgctattattagttgactccaaaaacttaaactgagggttcccaaccactctcttcctcaaaccctgcacaaaattcatcccgtaccgcgccataaactgtgctgtgagcttaataataccaagctccttgagtgtgatctccttttcagggaattcaaatccaaaaccgaaagatctcagaacattaggttggatatcgtgagctctatcttgattctgagcacggtattctgcaagcttgagctgataaaatgcgtgataagggtcagtgctccacacaaatctgtgtcttgcatcattcatactaagttccatcatctttctttcaatctccaacccatttttggaaacaataagtgcagtgttctcgacacaacttctgatttctggaggtggctcaataggtgccacactcgcaggagctttatttgaattgctttgacccgattgcaaatcattctgtggcctaggaggtgacatcatcctcactggaggagaacatgaaggttgaggaacttgaagttgagtaaactgagatcccagttgaggcataattagcggtggtactgttggcatcattggatggtattgttcaggtcgtggttgcaacacgccaccgtccacgttagcaaaaaactctaaagcatgcaaatcagtcaaagccatctccactgcatctttcttttcaacaacttgatcaagaagcttgagaaaaccaacaacaacttcccccaaaccagcaccattctttctggaacgccttaacactctcgaatacccatcaacaagccgcaagtaaaaagagcacttgctatcagttgacttaaaaaagtcaaatttagggcttataaacactctcttcatcaattctgtccgaaaaagggtcccataaactgccacaaactgtgctgtgagcttaatagtatcaagctcattgcgcgtgaacgttacccctctagtaaggaatgcaaacttgacaggagccggagctcgtaaatcattaatggacatgttagcaaagtattcataagcatgcaaatcagtcatagccatctccacgtcatcctcatcctttacaggcacttgagcaataagcttggagaaaccatcaaaaacttcactcttcgtcttcagcttttgggaaggcattaacacaccctgatacccgagaataatccgcgtgtaaaaactgttcctactgtcagttggtttcaaaaactcaaacagaggactctcaacaactctcgtcgtcagttccctctgaaaatacttcccataaacagccacaaactgcgctgtgagcttgataagctcaagctcctttcgcgtgaaagtgatccctagaggaaggtgtgagaagttgacaggtggagccagcagaggcatatccaaggatggaggccaaagatagtcttgtgcatcatgagtagctggagtgtcaggacttaagctcctgaatcttgaatcattcacaattttggccaagttccttatattaacaagacgcgtgctttctgaatccgccccaacttgatttgaattgttttgcctcgatcgcaaatccttgtgcatcgaagtgtacatattttttttctacaaccagagaaacattaaaaatcagattcagagagaagggacaactactgagtgagagagagagagagattaggaaaaacatataagaggaatcggagagagattagaaacaccgtacctcagcctgtgacttggagacctaaagcttggaaacgaaggaagcgacgaagaagaaatcaactgtgagccctagcccctaggctaccactatttataaccaaactcctttggtggttttctaatgggccttgattgggcttataattgcggttcataataaataattttattataatttctacgatttaatcaatcacaacaaccccagttactcggaagtcagaactaaaaccggaacagctatactaagaataattggattggaatttaagaagatcagatccagccacaaggttcttcttgttaataaactttaaccaattttagattcgaactacaattacaaacttgaacatatatatttatctccaatcaagacatctatcaccatccaatcattatcaaactcacaacacctttgtaattaagcaagaataatcttaggaccaatctcttaatcattgtcaaggattggtcgtgtcaagatcatcaagatctgatgcactctttttatgcttcttctatgttatttgatttcttcgtgtggaaaatgggttatgttacgatcttcatttgccttagagacagatacgcgaggaggcgataaccgaatatcatgacaacgagtgcggctacttcagttagtccgttgtctattctcatcccgttgatggacacagcgaagtcctgatattgtactttaagaagaagcttgtaggtgtggtaattgaaagatagataacgtatccacgatatgaaaaccggcactttctgtgtagacacagaaaaggaaatcagtaaaacaggggaaatcaagaaacaggggaagttaaaaacagaggaaatcaagaaacagaggacttgccttgacgaagaatcctccggcgagcatgaatgtcatgacagttactgaagccaaagtcgtagccttctttaaatccattaaaatggcaccaattgcaagtccgagtccctagcaaaaagaatcaaaatcagcattttgattatactttttctcgttgattagggtttttaataattttaatctgaatatacctgagctgcgatgatgcaaaggaaaactgtgagcatgctcaagaagaagggatatgggctgatccgaagacctgtcatgaaatagacgacaagaaggaagagagaaggtagaataaagtcgagagggagatcactcgtggttcgagctaggaaatatgcgcttaatctgtacatatccgctgctctctccttatttaacatcgctcgctcttgcggaaacgcaaagatcgctgtgaaaacagggaagaatccccaaaaaactgctatgaagaagagcaaaccagcctgcaacaaagaagcataagaatgtagagaatgatattagtatagtgtgcataaaaaaaaagtatatttcaaaaccaaatgataacatacctgatcttgtagtcccattggagtcctaatgtccgactgccaccagagaagacctaaaatgacagctgtggaaagaacttgcgtaacacgcaaccaactgaagtattcgtgtcgccgttctttgagtcctctgcagaatagtatgcaatattgctcccaccagcacgttccccattggcgctttagacgcgtacttttggccttagcttcttcatcgagtggcacaggatccaatagtttcttcttctcctgttctgcaaccctagtctcgtaggcctccactagatactgcttacagtttttccgatatatatatcagaactcaatttggttttaggtaatactgatttactagaaatgttgttgcttctataattacctcatgaacagcagcaggagatggcttgccagtttgagtttctctacctgaattgccaacttgaactctatcatctaactcagaaggtacagagatatcgttgatgttaccgttggcaagatcgagcaagaactctgcaggattcatggcgataagaggagagcatccaatggaagagaagtaatctaaagcttctgatgattttccaaagtagagaagacttcctcttcctagtagaatcagcttgtcaaacctatggaagagcctactcgagggctgatgtatcgttgtgatcacggttttccccgcctgttccgaacatattttcgtcaaagttcagaaaacaatcaaagcaaagatagtaattgtctgaacaaacaaacaaacctcggcgatgtcatggagcatcagaatggttctaagagcagtggtggaatctaaaccagaggttggttcatcaagaagtaatagagaaggattaatgatgatctcgtttccaatagaaactcttttcctctctccacctgatacaccacgcacgaatgctccaccaatcatagtgtcttggcatctgcaaccatccaagttattaaaataaaaaccacatttagtttgttaatgtttggaacctctatacgagccagcatacctctctaaacccaactcttggataacgtctaaagctcgttgcttcttctgctctctcgtaagagtcttgggtaagcgcagacgagcagcataggttagcgtttctttcacggtaagatgaggaaacagaacatcatcttgagtcacaaacccaatcctgccaccaaaccaagaaccaattgttaaatcttatatgtattcattcatataagaaaatgtgagtttaagagccaaaaacactgacttgcttttcaagtatttagagtaaggcttgtcgttgtaagtaacagagcctccagtagaggattgagagattcgaccagcaagtaagctaagaagagttgttttgccactccctgagggtcccatgagagcaagaacttcaccaggattcacactcccacttatcccagttaatatctctttctccacagatgaagtcaatttcttgatcaccactttgtatgtaacatccctgaactgcatcaatttcacaaaaaccactactaagtcttgagattatatatacataactcatgaaaatgaaacctatttaaaaaaataaaaagatcgtattacacattttcgcttcttttccccccttaattagtctaatcttaactatggatatcttaagtcttgtacataaatttcatgtaagatgagattatgtacaagacctgaagctgatgaaaagtagatacacagagatagagacaaatgtgtgatattcttttgatctcctctcagtgcctgtgcaaacagagaagatcagtaccaaagagatcattcccatacacgaaaaccactagctacttactatacttcagtccaatttctaacatttcttttgctcttttattgttttggtttgatataattatttaccttgagaaagatgggcaatgttggttctgcttgaaacttaggcttcttctttcccgcttcaatatcttcggctgaaacagttacgttacactgttgattcatcgttacttaataaaccaaaagaagtcggtgactcagtgaatgaatctttaagtgggtgatttttaacacctaaacactatggtaagtgagcttatgttatacgatgtataaactataagttggccaatctttgtcagccagctaaacgcttttacgtaagatttggactttgaggtacactattgacagattacaacagaccaaacactaaaaactccaaaaatgggacccattattgactaattagtagagatatatttgacttcttctcacctatttttatacctactttagtcataaaaagctgttaaaatgttggtgaatcaatcactacgtgacgttacaaatcactagtttttattttgttgctttttattgaaagattctacctacataagtatatatgcacaaacactaagtgaaggcgaaatgaatcatgaagacttgctactgtgatggactgatggttatcaaataaacaaagagaacaattacgaacgagtttatgaattatgacaaactagtggtgaattattgactttttataacaaatgctcagattgacaaaataccaacatatatataatttataagtaaaaaaaacaaagtactatttaagtggtaggcatgcatctttgacaaaattaattagtatttctttaagcaaattaatgtcataacttttgttaatgtacgatctcttttaaaaacagtatcgggcatttgatagcactttccttatcttttcatcatataagatttaaagaatagtttgcactcgaataaatattaaattacaataatcatttcgaacaactgggattgacaaaaatccatattttatacaacaagtatcgtatgtataattgcaagcaccactgaataagccattgaaaagtgaaaagaaaataaaaaacaacaaaaagaaagtgaatttaaaagaaaaaaagtgaaaagaaaataagtggtgggagtttcagttgcacgagaaagagaacacgtggaacaaattagaaggccaattgttttggtctctattaaataaagtaatttatccaaactctctcatgcaaaaaagcaaagcaacgcacaccaatcatgtatccgttgttatcattattattgtatcatttaattgcatgtcttaatgaccatactaccctctcagtatgggaacatagtaactcaaatgaccaaactacccttggactaaaactagtgactagtgagataaagttcgcacgacttacgtatcatctcgtcgtcgctgaacggtttagagtcggagatttcctccggcggcatagcaaacccggtgaaggaaaatgaaagaccgagcgatgcgctagacgcacggctcaaagctgcgccgctactcacttcctctagctcgagcttaagctgagcgctcctagacttccttatgtgtgttccggcgccgctactcctccccggagacatccccatcaacctccggcttgatttcctcgacaacgttcctcctcctccaacggctgctggagccgtcgcaggcacaccattagcgtccatggagccgtgaggtgaccttatgtctgctgcaaccgtctcatatagctgctccgatcgtgttcgagctaaaccggaggccaaaggtggcttctccattgacattttgaccttttcaaaaactgtcgaccaaaaatcataatctttagccaaaatttataaccaatatatacgttcgagatcatatatagaacttatatgtatgtatatatggaacataaacaaatgaacagacataaaatagaaaagaaaaaaaaacaggaatgactataagaagatgggtatgattttttcttaggatatagaatcgatacctttggggaactaaaagataaaaagtgtttccactgtttgaaagaggtttgtttttatggaagagacgatgttaaagcttgaaacttgtgacaccctttctaagctgcttcatcaaccttctttatatagtagcatttatgagtgcctcaactccatttacgataatatccttatgatcaacttttcatacatctatatatattataatatatatatatatattttttttttaatcattgattagttcatatcttcttatacctagcacaatttacattaccatttggttgacgttaggagtttattctgaattatgaataaaacaccgtaatcgaattgaaactgtttgcacttaattcaaattagaaattgacaaaataatatttggttgaatattggtttgagatagctaggtttgcattgagagtaaaactgatctcaatacttgaattgtgtactgaatgagtgatagattagtggttagcattttgattggttacactgtacatttagtttaacactcttgtattagatgattttgcactttgttttgtttgaatattatcaacgatctagttaaggatctacgatgatgtaaggacttcggtcctgatccttcgatgtcataaaaaatacatttgaagttagtctaaacaaaacagcataattaaaacaagacatcatgattaaatcccgcttccatggcacttcaaactacagtttctaaccattatactagttagctactcactgatcaaccatatattttcaaaatcaagatgaattcacattcgcacacaacttttgagtataacttgacgagtaatagcgatagtttgcggacacgacgtttccagctaagtatgaagcttcctagcatccagaccgtacacgtggtgggacatatgaatattataacatatatacatgttttctcgtatgtgatgaatattaagcagttgtagacttgtagtaatcaaccatcgtctcggatcctcttatagtacgacatagatcgtccatatttttttttttttattttgaactttagaaatctaccaattattaatatcaaatattattttcagattatctcaattaatgtggcactaattatttataatacacaactcatgattagaaatgcaacagttcatattttgaaagcctttgacccaaaaaaaaaacacacatttattttgtgacaaaaatttgtttgtgcaagaacgtgtgtaaagttttttgaattcatcaagtaatcgatataacctaattttggcacacaaaatcttgatttgcgtccatctgcatcagaatttacgaaagaacagtgtgatacctttacgtacaacaccatacgaataaaaatggatgaatgtctacataatatttttttttaaaaggaaaatgctatgccgttcaatttctaaatttcaaaaggactgagacatgcatgttcgattttttctatacaaaatcattgaataatcaaagacgtgtccggccaattcgaattatacaatctactttattatatacatacgtatgtatccatataataattttgttgacattgcagaaaaaaaaaggtgtcaatcaagggtaatatttattttttagactacaaaacttttagcattaaatttcttaaccttattagcttatcagattagccctgacgaaagacagcaaaagaagataaaataaaaaggacagttatgttttatatgttaattttgtgcgtttggaaaatgtacgaaaatattgtgaggctttggttgaatctcatgttacctacgagacagggcacttcctaaaaagctggttttggatgctttcttcctgccaaatatgttttgtactcaaatgcttttattttctttttctttttttggttagttttgagatttatttagctttcgttacggatttttcgtacttattatcgtcacatcttcgtaaatattacgtctctaatggtcatatcggtatatccggcctcatattcttttgattcaatctcccgactaatcacataatcggtttattgaattattctttttgaaaaagcatcacataatcgatgcaatagttaataatttgattgcgaagtataggttaaatatttatttctattttttctgattcttttacttttttttgtatatatcttatgaagcaaacatagtggcctataaagattaattcctgtaaaatttgacgtcatacaaagttctatatataggtactagatccaatgaatggtccttgtatttatctttgttcctttcataatgataaagttgtgaaatactttttttttttttttgttcacaaatagttgtgaaagctaatttgaaaatttgtatgtatgcgatcaatagaatcaaccgttggatctaacaatatcagaacccatgacaaagaagggaaaagaaaaaactaaacctaattatatgattgctagaagccttctctttatgtactaaaatgtaaataggcccgtaaagaatatatatttgtagtgatttgtttttgtcaaaacttatagggaattagtataagaggtgtatattgatttctaaatctgggatggttcaaacccatgattgttttggagaaatatattattttcagtggactttaaattgacttacgcctaccaaatgtactataataaataaattctatgtgaggtcaacactataattgaatgtagaaattggtacgttatgtgtaagtgtttgtactgcctcctcaatgtgtagtcacgtacagtggtgcaagaaagctacggacaggttgtgattttgtcaaagatcgatgtcttaaatcacaaagccaataaatgaagcaggcccaactttttgttttcttcttctccttctttctgaagagataaacggcttcttctactgatgatacctacgttttgtttctttgtcattggatcctgtatgacctaaacgtcttcgattgtttttttgcgtttacatgatagtggttttctcaaaaaaaaaaaaacttcaaaagaatcacattctactaaacaaaattaatttgttattattgtaaacgtaaattgtaaacacaaacagaagaatctatatttgcgtttatattttcgaaaagtaatttatgattttatcagccaactcgggtaacaggataaacacaaagacaaaacgttaattctaccattgttggcgttaatttgtgttgtaaaacgaaactatacgtaaatgatcttatcaaaattacttatgtaataataacaacaaaattacttatgtaataaaaagaaaaaatacttatgttatgtaattcaataaaagtattgtggtatatcctcttttaattgtatcatctatatggagatgcatgttcaatttcttaatccaagaaaaaaatccacgttcaatattattaattcgttactctattcagaacccaatctaatcaatagttttgaggatacatgtctacgtagggacaaagaggaacaaagatgtatccacgtggcaagacaagtgcgaagatgagtcaagactcaaagagccctcttcgttccccacactgtctggtcggtagttgaaacgttagttgtcgacttggcgcgccacctcctctttttttcctaaccgtctataataattaaaacacgacttacgacatagactttgttaaggtacatgtatcatataattaacttagaattcgaactttaaactatagtttgcaagcctctcagtgggagagtttggttgagatatttccaacactcaccaatataataacaatttgctttcatatagtatttcgttaggaaatttttcattcgtattcgtaataaagaaagaggtatgtcttaggcttcgcatttggtgatgggaccaacagaaaagagtctcgtaagtcacgtggcttcttctcctcaaggacggcaccgccctcttctcgtttttatttggattttatttgctaaaagcctaaaattattacactacataaaaagtagtatagtgttagtattagtaatgctattactatttttaacaaaataaaataaatttgcatattgttatagttatcctattactaaactcattataaggttttggaatcagatgatgaaaattctggttctatgcttttcaagaccttttttagtagccttaaagacgtatttattcacctttgcattcaataaaaatcaacattagtcataggtaattttcttgatgtaagaaaataaacgatttactcaaaaacaaaaagaagtttaccatattttactatgtaaacttgtcactgctctaaaataaaaacacaaatcctctacaaaaaatactaaaacagagactgtcaccaataatctctgcaggaacatactccatttctaaaatgatgaaatctgttgcggtctcttacaattaactctctaccataaacctcagagataagctttgttactgtatgacaatcttcacataccctcaagttcttcactatcctaatggttgtaccaggcttagtcttcatcataccatatgcaattgcaagtttctcactatgcatatgaatcgaactctccttctcctcctcgtctacatcgaaaaacgcatcacctgtgttccctttataccctatcaatcttatcttccccaagatctcttcccacttccttctgatcttacccatttcaggatgcttctgatcatctcccattgtgaacttgtttattttcccatcaatctctattaagctccaccctggtggtttcttaacaagcttctccttcatcatgtctctcaagctctctatcttatcccattgtcctgcacacgcgtatatatttgacagtaagacatagtaaccgctatgttctggtttcacctttatcaacatgtttcctactctctctgcaacctcggtgttcttataaatcttacatgctccaagcaatgctcccaatataggagcgtttggcttcacatgcattttaaggataaagttctccgcttcggctaatttcccagcacgaccaagcatatcaacaatgcaaccataatgctcgagtctaggctcgatcccatgatcctttttcatgttctcatatatctctaaccctttttcaactaatccaccgtggctgcaagctgaaagaaccgctgtgaatgtaacatcccttggaataaaccctaaactaatcatttgggagaagtaatgcattgccttgtgagcatgcccatgcactgcaagacctttgattattgaactccagctcaagctatccgtctcaggcaatccctcaaatacatgaattgctttctcgatatccccacacctccaaaacatatccacaagagctgtcccaagaataagattcacagtcatgtgactcttaaccacatactcatatgctctttctccaaactcaagtgcacccaaatgagcacaagacgaaatcacactcaccataaccgtctcattcgcgacaactccttcccttttcatgaattcaaacaagtcaatggctttctcaaaacagttgttcttcgcatacccattaatcataatactccaagtaaacaaatttctgtgaggcatttcatcgaacatctctcgtgcattctcaaccatcccgcatttacaatacccagccaccatagaagtccatgaaacaacatctcgaaaccccatttgcccaaagattctaccagcagcagcgatgaacccacaattagcgtacatatgaacaagcgaattctctacataaacatcattctgaaatccgaatctaacaatctgtgaatgcgtttgctctcccactagaacacactccatctcactagacgccttaatcagaaacggaaacgtgatgttatctggccaaatccgagatttcaacatctgggtatagaacccaaaagccttactaggctctgcaccagtggagaagcagcgaatgagtagattgaagacgaaaagattagggttttgaatctgagagaagattccgtatgcatatcccaagagattggttggtttgttgaaggtggagtcgtcaacgcagagagcgaggagacgactggcaacgaagacgtcggagatgagatgggttcgtaagagaaagccatgtatgatcttgaggtcggaaaaggaagagcaggattggagcaaggcaagcttcgggtgtttgaatcgaagtgtgttgagcacaatgttactcattctctgcaaaaagtacccaaaagttctcaaatttataagaatctgacatataacggtctatttcctctgttttttaagtttgacttttgtaacaaagagcataaaaataagggtaacaattttctgcatctgcatttgtcaaaggatctggaagatcttacaaaattgaaaatttaagatgatgtattgattgtctttagaaagaaaacttgaaagtatcagttttggcagagtcccagaaagaaactctttgttcttcggctctttttgcttcttctgctttcttttctaactcttggatagtccccgggtaagcttcttcaatggctttcttgaatttgtcatgcaaattctctctgtcagttgtcccggagacaagttctttagcatttggtttcttcagaaattctaacacattcaacaaattactcctgcacaagtaatgttactccagttagatcaactcaatacagatacgaaatcacaattctttcatctgatacatatcaccattgatgcaaatgcacaaatagctctcagataaatgctacgtacacagttaatattcttaataacatcagtctactttcttagccactttcaaacttttgtttagctactcaaaagtatctgaaaatgaacttaataatgatgttgttccagtttattgttcttttctattgtcaaactttcatctactaaaatggatatgacaaagagccagtgggaaagaaactaactttacctgctagcataattctgagtaatagcaatcgattcctccaggttaatcaccagatgccaccatccattaggtacaaacatcacctccccggctttgcatatacactcaataggtttcttctcccaatccttagtatcatcataaaagttcatgaaccattctattatggaaacaggacaggccacttctgctccatcaggacttggatgcacacccggaggaaccacatcaggtgggaacaaaacccatttcttcgaccctgtgatcaccgcattccaagctgatgttgagttaggatcaatatggaaagacgatcctgatccggctggaccaattatgatccatctataatcaggtcgctcgtttcctaaaacaccaaacaagtcctctctgaaatagacaggaacatcatactccgaatccaaaaccggaactttctctgcaaactttggatcaaacaagtacaaaggcctttcttccctagctccatcagaatacctaaaatacttctcgagcttcatttccactggacctaccgcgaattcgacatcaccaaccaccttagtcagataatctcttgaccatttctcaatagcaggccaaccatccaaacatccctccaacaaaactggcttattcggctcctcaaactttgtaatgaagtcttcaacagaaatgcctctcacccgtgtgatattatctcttctaagccatttcggtttcatttcaagattcgcacataaccagctctgaaacagataatcagaatagaaatctataatcttcaaattcgattcaccatctccagcaaacttgaatttcggatggtaagcagctacataggtagatctccacgacccattaaacaaaaaatctccttttaactcctctaacacaagatttctccagagaggctcatgattagcaaatatatagaatgacttagttacagtagccaaaacacccaaatgattggcgccaagaagacctagaatatccaaaacgagctcatctgagagtatctggagattacctaatccagtgtttcgcacattgaccgcaccaggattgaaatataggtttcccagaggttgaactccatgctcttgagaaggagctgcaattttcagcttgaagcctccttcatcttcatcttcctcttctacctccttctctggaaacagagactcaggttcatgctgatggagctttagtcttttggatttggatttacgtcgcttcgaggttagcaacagattcttgcactttggcatgtttgacggagatcagccttagcggcgagggttttgggttttatcagttcaccacggtttcattatttaaccagaagatggaattgagaaaatcttggttcgaaccggttcaaccgtaataactactcaagtactgtattacagaatgttgctaatgtagaatcatcattgattgattacacattttgattaatgccttttaaaatttgacaaaaatgatctattgatcggtgatagcctgataggttatagtaaaatattgagaatctgaggatcaagacaatgccaagttccattaaccggaagttctgagagagataaccttttttttgtttgttttctttccagagaaattcaaagaagaatctggaaacattatacacagcttacaatagaaagaacaagacgtgcttttagtgtagcctcaccgagacaaatcatcaaaccccattccaacccaacaacaaatgacatatggcaaatacaccaagcaaagaaagataaaaactgcacattagagaaaaatcatttttctcagtaaaaaccatgaagatggagaaagtaagtactttcacaaagtaattcacattatgcgctgcaaaccaaatttcacacttgtgtgcttgagagacatctccattgccgtattcgaggagtcttttctagaagcatttgcaatcccatgttgttcccttgtaccccgttcatgtatctgcatttacaccatttggccatgaggataagtaaatagttgtttcatcatctttgcaagtctctatacaaggatcttagtcatttataataatactacaaactcaaaactcaggttcgataaaaaggtatgagaagcacaagctaatcagagtttaagactgttcacttacttgcttcgacgagcctttcttctccagaaaacaaaagatgtgatccactgcacaggaataagaagacgaatccgtcaatgaggatgcaaagtaatacagcagaaactttagtacgagttgcttcttatcagtatattaagtgttaaacaaggtcacaatccactgatataagaaacaaaatcaccttaaagacagatatgaagttgaatgctccaataatagatgttttccgcagaggcaatctacgttctgggacaacatcctttgacagatgttgggcaatttctttcaacagaaccatctgtgctttctcagtcctcatcgacataatcgcctgtctcattgattccctgtcagcctctagtgcttgaagtctcatgtaaagtttcgatatttcaggatcaccaagatccggctgattcgatatttctctcggagacattgcataaccatcagcagtgtcattcttaaacttttgctcagcagtaccactatgagatacactgtgatggacagagtcaatggtataaactctatcattcatgtcattatctcctatttccgatgagtcacccttatcccttgcaaaggaattaccagctgcatatgggggatcttccattttcctgaagctaccattgttggaccttggggaatcattagaaaaatcaagccttttttctctagttgttcccaaaagtgaacttgcactaccagtggaaaccctcctgaaatgtctctgatgcctaggactctgaccaaccacgttcttctctgtataatgtctccctccagatacatcaccagtaggctgagtaaagctaggatttctctccatctgacttatccttcgttccaaagtcttcaatgggtgaggtgaatcagccaatgggtacttttcaacatcatcaacatcaatatcagcctccaggggacctgggttctcattcacattgcactttataggagggtaatcagatgtggggagatcatattggtaatcattttcgatcatgctcggattacggctaagcatgttcttctccgtttcaacctcagcctcagtgaacccaaaactcatcattctatgcttataagcctgagcttcaaatgtcaaagcctgaatagtctgctccctcttatatatcaaatcttccagatccaaaagctcttgttgatcatgctccattttctcctcagcaaaccgcttaaactgtctcaattccatttggagttcagctttatccctctgcaacctcaatatcatagacattgcctcacttgcagctgtcgaagcagcattccgctcttcatcaagctcctcatacaaatcttgaatcgactgctgttgactgctaacagtctccctaagcagctccaattcattctcaatttgaactttagcattggaagacaagtccagctccagctccggtatgtgaaacagtttctcattctcaaattcctcgtattttctcttcacagaccgaagcaaagaaccaggagaagcaccattcagagagcaatcacatccacaatcacaacatctaaccacatccctagtaggggaagatacaattgccaaatccataacttgtaacagtatccaaattcacaatcacagactatggcacaaatacatagcaacaatcaccaaaacctatctccgtagtctagatccacgatagccaaaactagcgccaatatagagctcctgtagaaaagtcaattctcaacaacattattcaatgtaaaacgatctcttaaaaaggaagcttctttcattggcagagtaaacataacatctcaaaatcgagaactttaccttcaccgttgaaccaccaagaacacgaaaactaaacccaaaagtcgaatttttccaggaaagctaatgatatctccttctcttattgaatctcaatgataacttccgggaaaataacagacccacctataatttttctcttatcgctttttctggtaaacgaaaagcaaaagaaaaaagagaaagaaaaagaaaaaataatcgtgtttggaatcagagggaaaccaaaaaaaaaaagaggaagagaaagagagagaattggtcttcttcttcgttgtttccctctggttaatttgaaaccctagagctctctctgtttttatctttcagttttgaaatcgagaaaaggctttttttctttccatggaggttcgtctcgtgcccacaatgacgacgacgacgacggctcttaaggttatttttggtaaaaaccgagtttttactaagagagataaataaacggtgaggattaggttatcagatgagatcaacggataagattttggttagatgaggtgtctttttacctgcggaaagtacaggtcagctaatctggaattttatttaaagagttttagatagatattcttattagatttagatgcctcttctatgaaccaattgctatatttgtaaaaattacacgaatttgtaattatctcatcttttcgattagtgtgatctttataataaggtaaaatatatttctgtatatataataatatgataatgttcttttacttgaatattcccaaccaaaaagatggaccatgtttttctttataaacaaacaaattgaaagcattattattcgtatatatcaagttcatacatgctagtatattttaaatgatcactaaatagaaaattataaacagtataattttgctattttttagatcgataattagttctttcgaaatttatatctagctatacgagatttttctcaatgtggaataaagtagagatctattagggtttttttttcacctagattaagtcttcaagaaagatatttgatatagcaaacttaatggtgaaaaatctattggtgatcgtgagtccaaaactattaatggttcattaaatgaaggtaatcagctttgagactagtccaaggctcttgagatcagatagattacgtacgaacagttcagttattaaaatttgaaatgttttaatttagaactagctagtacaattctgacctatttagtgattgttttcattaaggtgattcgtgaatagaacagtcacgttgttaaatgtcaactataaatatatgcagctgaatagatgggcggtcgagttttataaattcatgaacaaagggtttgatctgaaggggattaagtggtaataacttactttgacttaaaatataaaaccgtacgaagattttgtttgggaagacttttcttttgttcaacgtttgggaagactaaatacaatggtttttggatgtttattattattatttttttgggtcagataaaacgataggatgtttccgagtggaggtatttggccgtcgacattgaagctttaccaggtcaacatggcctacttatagtcttatatactttacataaaaatatactctcatttaattttcacaatttgttttctcttttcttcttatttaaaaatttgattatgaaactgtttacttgattaacatcatgagactaactttttattctttggataaacatgctgttttcttctttttctttttggttaaaactatggtcgtttgtttacacttatgttgggatacaaaccaaacgagtggctttacaaaaagttttaagaaacaaaccgaaggggatcctgtttaaatggatataacgagttcatgtatatagaatattgtctacttgatctttgccaaaaaaagtaataaaaacatcggaaaaagaagctgaagaaattcagaaatcttatgcctctattgctttacttatggatcctcgatctagcctaaatcttcagaatgtgttattattgtttccttgtttttattggtttttttggcaaggatcaattgtataggttttcaacttgtaacaccaaactttcattttattctcctagaaaagaaaaaaaaaaaattccatttaagatcggatatgatgaacaaggtataacgaaaccaagaacattttatgtgttttgtgtgctgtgtatatataaatgattcaccaatcaccaagcaaacttaatattattgagatggaatcctaattgaattaaacacttaattaccttcaacaagccaaatgctaaaatacttaagacaagttgttcataaagtctccaatgatacggagaacttgttccgcagcctcggaagatggatagttggagtagaaaccatgctccttgttttcgaattcaatgtaatctaccctttttcctcccatcttctttaatttatatgcatattccttggccctatctctcaagagttctgagccgccgacaatcaccaacattggctctaagctaattgattcgagtgtaggactcgttggtccaaaagggttagccatgtggtgatctcttgttgcaccgtttggtagtgacaatctccaaaaccttcaagaagttaaagtttaattagcacctttttctcactctctcatattaatattaatatattgtaattgactataccaatatttactatacatatagctttatgacaatggccatgaacaagaacaagacaggtcaatcatctcattgttcaaacataaaaggagaaacaatcaattggagagaagacttgaatgatatatatgtgatcccaatgattccacgtgcgttgaaaaacataaatacacacattcaaaaatgctaagtaatacttttataaacatgagacattatattagttgcatttggtttaatctattgtgtacaatgatagtcacgactcaggaggaaacatacgtaaattaagcagagatgaaaaaggaacacgaggataatgcatgacgcactatctccattcctatatatattaaccactgttcttgatatctgattatcggtttattccatcatccactaatccatttttttatgcgtgaacaatgacctaaaaatgaattaaggaaaatcggtctctaacacccatttggagattccacacttaaatcggaagtcattagctcatcacaacttggttaactaattttctagtcgtgatgccaaatttgagatagttactgacaaatcaaggtattttttttagaaaaattatcgaatcgaattacaattcaaacatgttaaacgttcgtgtagttttataattttatagaatttgtgcggtttattttttccgagttcttctaggtttagaccattttcgaagaaaataaataattcatgaattagtacaattatgtagaatcgccaaatggtagggtatctaaatggttgtcatcatgattattttcaagtttcttttagtttttctaattcgattactttccatacaagatactttataaagtttttcttgttttgtttgttaatgaagatactttctaagttgtcgttcatctactggatgtttgtttttcaagacccattcgtgtatccactgtgatggaagaccttaatatttgaaaagccatttttaatgttgaatgatttgagactgactaatcaaatagtggagtattagtagattaagcatattgactagtttttatgacgtaatattataactatcatgtgatgggctaaaatcattcgtcttaaccgattaaaatcaatcaaaatgaatattatttttcactttgaatttatcaaaagagagaaagatatttatgaaaatatatcactatatacatatatatcatctgtcgaccgttggttagttggtgaatggttctaatcaaaataaatgtttcataggtacgaaaagtcgttttctttagaaagttcgtgtttctttttgtgtcatagaatattgctactcctttgaactagttgagaattcgattataatatttgtatacaatatattattgataaaacgttgtaaaaatatctttaggtttatgaaaagttatttttttcattaatgagaagaatactcgactatttttatatcatgttattaggagaaacttatcttcacgtatacatattcgactatatgagtacatgcaatttaaaatatcaattagtctgtataagatttgttaagttttggaaaaaaggacatgtatacacatctgtgtgttcatgaagaggcactgtggctgtagctgtctctgtcatgcgactcggcaattcactccaacgtttaaattggcattactcggatgagaagataatatgaattaaagtaaccgaaaacgacatctatgcatatattatatttgaataaaatagttaatagttaattagggttataaacaataaagtcatgcataactagtaattcaatgaacttgtatatatttaatgtttaaatattcggtggtacgtctaaagaaaattaaaatatagaaagtgttgtgttagcttacttgtcaagcaaatccaagctgagcaaagcttcagaggggccattctcggagttagtcctctcttccccgccaaaaaacggtcccataagaacgtaaccgcgtacccgaaccggtgtcaactcgattgaaccggatccgaaccggacagcgagttgatgagctatgttcccaccggatgaatcaccaacaacaaaaaccctgtcaaagtcaacgtctgttccatcttcaaaccagtggttcacaccatcggaaacagcttggtcccagagccatgtaagcaccgcctcagcatcctcaaaggcagccgggaggcggtgttcgggtgctaaccggtagtcaggtgagacgacaagggcgttaagggacgatgcaagagttagacagaagttgtgaaagtgaggccaagaacgtgacccgaagcagaagcccccgccgtggaagaagaccacgacagggagagcggtacggttggaggcggaaatgggtttgtagagacggaggtgaaggttgttaggtttgtgatagattgagtctttgaagagaacggtttggttgtttttgaatgggatttgttgggtaataaggtcaatgctctcggatctcaaaacggtaccgttgcttaggagttgaagcaaacccatgcagtcttctgctacttgtggttcttctcctagtgaccccattcttagtctctcccttttggttttggatatatgtatcagtgtcatgtgacataaatatatagaggggggaagtaacaaagggtactttggtcatttcaagtcgggagatagatattgtaataaatctcaaaatcttttgagggagcccacgtttttaattgttttgcggctgattcgtctcatgtgacttggtcattcctatcgacctcttatgggtttgtcaaaactagcagatgcacttagatatggtcatatgagtcggtgcttgaagatacataacacgtccctatctttccttatattaccacatcctcaaaagtaaacggatgcaattgcttgcatcagctgttttgtacttaaaggtaacttttcggttttaacaaaacaaaagagaaacagtatgaggccaaacgatacaacagtgttacacacacaacatacagaaacgttaaacgaagaaacacaagcaattttagaaacatacatgaggaggaattaactttcccgggttcatgatatcgtttgggtccaacgttttcttgattctcttcatagtttgcagtgcttctattcccagttccttctccagatacttccataacataaccaaaaaacccgttcaaatcacaaatggacattcatatcaattgaacagaagacatgatatgaataggagaagctataccttcatttttcctgttccaacaccgtgttctccagtacatgttcctgacgacaaagttcagaaccaagtggcatcattacaatcatgttttctaaatccgggaacaagcatatacacgttctaattaatagccagaggtatacactagtggaagagaggagagtaaggaagttgcaaatataatgtcaacttaaatctaacaagcactactctgttaaaggtagtaaaccaaatgctaggcctcacttgtatgtacaagtttagcaatctaacctatttgttgatgatgttcacctaaatggacataaaatttggctcctgccaatctttaatacttttgctttttcagttttgctcagagaatatgttaaagaccttcacatctattatagtcttgcacttttgcaaacacacaaagaatggatagggcatttaccatccatggacagtgcactgtgaaccataaagtggttcagtctttctgcttctcttctctgctcttcactgcttggatcaaacataatacatgtgtgaaagtttccatctccggcatgagcaataacggtactgaaagtagaacaacaatagtcagcatacactttataggacgttaaagcttagtatgtcatgatgttgagtgcaggatagtaatataccacaacaacgatgatgcatcaagctcttttttggatcttgatatgagttctgcaaggtgagataaagggacacagacatcctgtagaagaaatatttacagatgattctttgatgttcgaccttaaaattttaaatcaaaaaagtaaacaacaaaaagatctatggcatatatttgaggtttctgattgtagttggaaagttcatctacaaccaaagtgtatcgaaggaaagcaacatactgtaatcattgcttcatgacctggcgccatagcatagcaagcccacagcgcctcttttcttatctgcatggagtcaggaaagaaaatcttttggtaactcaatcttgttagaagcaaacgaaagtgtaactaatgtagagttacatcttcagcatagcctcattctctacagtgaaaatctccagaaatgtttatttcacgtttggtatcatatcataaccaggatggtcaaaaaatttaaaaaacggactatcacgaaacattaccactggcgagagtctactgagcaagaatacactacaccaacaacaagtacatattttcccttcttttctgcttctcattttatgctggaaggttgcagggtacggggaaagtgttgggagtgggacaaagaattaccttccagagttctttttttgcttcaggttcttctgcgaacataaagtctgatccattgtgtttggaagcaatttgctgaacaatttgcgtctgctcacgtgtatatgcctctaagagatagagaaaaggaaaaaaatgatttagggtattagaaggcaacaattctcactttctgtgtctagtggcaacactgagcatgagaatcctgtaaccgaataaaatagaggatacaggggagtgaatatgatttctgtaatatctacagatattgcttacaaagagtaaactgctacaagagatgtataatcttagatagcttgaaatatcacttggaaagtacaagaaatatgatgcagcatcacctgttcctataaactcgaacatcagagttggagcttcagtcaaatttttcccgtttgccatattaatagctctgatttgaacctcgtcaaggagttccactcttgacacctgatgggggttaaggtgcggttgagaagattcaaaaaaaaaatttaaatcatataattcaaaagcagaggtctaacctgtattccagacatcatagtggcaatggccacgtctgcagcatccttaactgtagggaaattgcaaactgccacctaaaattatataataaattcgtctgacactgaatcgtaaggaaattttgctaaccattgcaaatgatgacaaaaggtgttatgtaatgtattttacactcttgaaagtcaaaatgatgtaaaatccatacacatgatcaagaaccatcctaagtccatactagagcaggaaagtctttcaaaacaaaagcaaggcaaacaagggtccacacagcacataactaggagtgaaagagttgagatataaaaaataagcaaagagataaattaagccaaagcagagatatttggaactttaataagtatgtatgatttgtttggcaagggatgaaaactaaaaatgaatttgtttgcagaaaaatattgaactcaatttcgaccttcaaaggaggaactaaaatcacatagaaaatgagcatctttctgctaggcagaaacctgaacaagaactcaaaaatagatgaacgaaatctactataaaggaagaggtcaatataccactgaatgctgtgggattttctgaagtcggagagtaatctcagtaatgactcctaaagtaccctcactcccaattatcaagcgagtcaaatcgtatctgcgacatcagttcgacaagtctcaagcattaattcaaatgatacgtaatcaaacaactagaaacataccattcaattttttttatatagtttatatctccgagagaaaaggaaatgcaaacaaagaacaagaaaatagtagaagactgaagacaaacccagcagcactctttctggcacgtgaagctgtcttcacaacatctccattaggaagaaccacctgagatgagcatagcataaataaaaatgaattgtacaatggagtatgaatcagtggaagaaacaacaaaccttgaggcttataacattgtcacgcatagttccatacctacaagctagtagcagaattatcatagccaaccggattaaagcaaccccacaattattcgaaagatgggaatagtaacagtgcagaataactaccttacagctaaagagccagagcaacgcgtagcacacatgcctcctatggaggcaccaggtcctgcaccaaattatttttatcaaattgctgaatgctgcctaggcacgtggaaattgaacttcgagagtcaattgaacacaacgctaaaggtgttgaatgatgcagtaacaaccaaaaaaatatcttttaagggtaattgattttcacataaaataagatcagttaatctaaaaatgtgtgagttccaaataaaagcttaaatatgaaagctatgatctgagagataaggtactatctcaatgttggctaacctggatcaagaggaaagaatagaccatactcttccaaatattcattaagctccagccaaccaattccaggctcaacaataacatccatatcctccacatgtaatgctttcaccctctaaggtttgaagaagtgtgagcaggagtgagaaatttcaataacctttgtatgaggactataagtgatgcacattctttctatttcctgattttatgatattatttaggatacatttttttattaacttttcatagaatgtttctaagtttacgttttcttatgtaaacaaggcggaggttggatatgcatgccaaagaaaacagagttacatcatttcaaattgtcttcctatacaaacgtagcaggttcatggaatgaaacgccaagtttgttatttgcatgacaccaaaaagacatgtttaaaatgaaaatcaaggacgctgatgtcagatagcacataccttcattaatgacatgtcaatgcacacacctccttttggagcaagggtatgaccctcgatcgatgttgccccaccatatggtacaataggaacctaattaaaaagcaaatgatatatcaatccacgaggaagctacatatatgccaagtaacatagcatgttggccaagactagattgaaaaagacttgagcactaaatcttcttacaaaccttatattcattgcaggatttaagaatcttggagacttcttcttcggacctaaacatattttaagagaggctcaagatcaatgcattctttttggcttataatttcaacgaggagccaaaaaagaagaacaaggcactaagttgccagagtcttacaacccgaaccactctcaacaagtgattgatataaatgtagttggcaatatagtagagtctcacctagggaaaacaacgacatcaggaatgttgactgccttgtgaaaactgttctggggcttcccatggaagtacctctcatcgtagtcagttgtcaagttatccttaaaacacaaggaaacagaatttgatgatcaatataagttgtgtacagcatcaagaaaaatttcgacggatttgttcaaattttgcagcacctcgaggatagttttcaattgagaaataagctccttagggacttgtttgtattctcctttaacaacagcttcagtgctatcttttccaccaacagttatatctctgcagataattgaaaacgaagcaatcaaacaattctggatactttaaaagcattcatttttatattaaaaaataagacgaaccttgaatccaaagccgatgatgattcactgatagaaggattcgacagattcaggtaagcgaaagaagtggcggaggcagctatcgccaatgggaacagagagctcgaccagcaagttggaagtctccggcgtcccttcaccggagaaagtacggtcacgtcaccggttgacttgggcgtcgagtggagctgacgacaaggccggagaaaagagagaatagttttagaacgagcgaattttgaagcgaaagccatggaattgtggatttcacaacgtaggagattgagaatggacaagacttgattacttttatttcttcttcatctctaagaaattacatttctgttaaatcgattatgtctccggttaacaaatatcaaacacactggttcaacataatgatgttaaaccgggaaattttaattcccgccgaaaacaaagtcggagacaaaaagtgggaagagagatcaatctaaagacgaaaactttagaaatggaggaagagctcaagagcttgagcaaaagcttaggaggattctgcaatcatcttcaaagtagctgtgatgctttcaatcactctctccagcgtcgccctattcctctcggtctctttttctctctctctttttccccatttctcctccgatttttgtcataaaccctaaaaattgaatttttcgattttggcagattcggcttcatcgacgttcatcaagggtctcaatcgtcgaatctccaccgcagcttccgagctcagttttctggaatctatgtcttttggtacagtctccttcgaagagcttctgggtcactgtagtcagatctacaagaataatcaaaaagatcttttgcatctccaggaccgcctcacagatttcggctatgttcctggtactcttttttgtcgactttaagttgacatttgctcgtatgttactgtctaatcatttcagagtttattgttcgtggacctagaaattgagattgatgaaggtagagatgaagaatctgtctttggagcatttggtcatgaagcttcaaagcattcggatgatgatttggagtctcattcattgcaatgttcaatcaaaaaaggattagacgaggacaatctgtatcctttttcaaccttagtgaaaaattaggatttttctggtagttgcttattagccagacaataagcagctttaaatcatgtttttatttcgtcttcctaatcaaatcataacgttttgttagcacactgtgtgaagtaaggaatgttgttctggatgatttttccttaatgttttcttagtctagataattcactaaatttgaagaaccttggcctttcagatgcttgtcttgcttatttagctacaggaggtaatgcatcaacatttttgtccactgttgatatgatttactgtaattggttaggatgtactggatggttttccttctctgatcatgttcttaatgtttcttgcgtttccaacctcttgccagttaatgataatgtgaaggatcctgatacgtctttgaaagaatcagtgaagtaagtttaatgacttagacataaataaaatcttatgtgttttcctcttagtcatacatcatcaagttttcttctgttacaggggtaaatcatttgacacaagggctctacctgccccaaatgcgtcagagctttccaatggttatttccaatcctttactagtgtgattttgattgtcggtgagtttcattagtctctggtatttgatgttagactttggtgcatgcagaagatgagtatgcaacactagagatggataaaacttcagggcctacattaacattgataaaagaagaatatgatagtcttccctctttcatgaagtctctagcatcgtgggaggtatgaaaattatctaaattctcgtattatgttaaatgttcttcttcttagctaacattttagaacatatcctagcagcgtattaagaattgaaccaataaatctttaactggagagccatgaaaatttcatctttcctatagactatagtgccaactttttgaataccctgccatcaaattcattacctgtgacaaactgagaaattgctatcccctgcaagtcttgataatctctatgcccaacgggttgaacgttttgtttatttatagtaattaaacgcataaaggttcccttaatatttttctaaatatggttaattcctgcttgtgtttccaggatctgctaagtgccgtgcagaaattcaactcggtcctcgatagcaagaaagaaataaacgggtcctactacttccgtgcagatgagattccgactctaggacttggtaggttcatatcttcctcgtcacatctgcctgtagtagcatcattaggttgatcatcttcagattcacagaaaaaatatatgatgatggtttgtattgcaggccacaaggagaaagcgtatacgttgctcctgacacggatgaagagacttgtggttgagacaacggacggagttatatcttatagagttgcatagagctgagagtaatccaatatacattaatgttgtatgagatctttgtgttttggaatcttcacatcccaacagcttttctattaatttgtgtatgatttctctgtctgagcaaatcctcaccagaaaaagtagcattagagtatttcttaaggattatgataagtcctcgaaacgttacacaaatccatttcctaaaacagtctgttattgttgcatccaccaagtactctgtttcaggagagcatagttttctgtatgaattggcaatctccccagaatgtgggacccacgatcactccctctcttacgttgctgacatgaaaatctaatgtcatatgatttaggcagatgacgaataatttgaaaatgcaaaaagaatacaaatctcctcagtcaaaaatcttcttaaaccacaatctctaaaattacaaatgtttcggtattctataaactctgaaagccaaaccgcgctcccgaatccaagcgaagggcttccatattctttttttggaaaataaaaattgcatgtgcaatggtcttcacacattccagatattaacacaaagtattgaagcacgaaataaaataaggatagattgaaaagaaaaaaatagaaaacacaccactatcaatgcgcaacccaaaaccctatcagaccagattctctacaacatcctacggtcatcatcacaccctcacactcgccctttcccttcttattcgatgcattggtccaatcaatgccttggtccaacgttgctgccacaatgtctcctgacatttgtgttcatgttttggggctaattgtatatttttaccggcttctcgtaagcatggcggttctacaaggacaacgcaaaaaaaaaaaaaaaaaaagtaaataacaaaagaaggactttgattaagaatctaataactagaagaaaaaacttgtacctggtttgcagcataagccctcttaggagtagtgtcagcatgctccaacccgaggtactgctcaaaagcaccatagacatctcttctctgttttaccattttcagtccgaagacagaaagttagatctcagataattagtatgagtttttctagaaaattagaggagaagaagtagaacctggaagcgattataaacaacatctgtgtcctgcaagtactctggacgccccattgacatgaacgcaaacttccactatataatgaatcaagtattaagaattgtaccagttctgccaaacagagatttagcttagatcattactcagtcgtgcataccttggcaaaatcttcatcagatacatgaagcttcttttggatacggttcttgatttcttcaagagtttcaccttcatggattaccaagaagaagggctcgccaaagttttgcacttgctgaggaacaagcaaacatgatactgataagacactttgccacttcaagactctacaacactcatataacggtaaaaataacaaaagctagatagctaattttcacctggttttgtccagtctccttggcaaaatggtacacaagaattaagcgatcatttggaccaatattcttctcttcttccggaatctgcgattaaggaaaacataagtcaacatctctgaatgatggagcccagggacaacttaagatattcaaacaattggctactttatgtacattgtattgattccagacacaaatactgtccgtctcaagcattctaatctaatctgctaagattgtaactcatccatggaataacttcacgtctctttagtttaatatctgactttaaaaactaaattgcattctcagagcacatggaaacagaggtacaaatatactttgaaaaacagaaataactaatgaacagcaagaccactaagaattagaagataccaaaaatgctgtgatgtgagatctaagaaaaatacaaggtgcagcctagtaatatacctcctcagctcgtaaagtccagtactggtcatttatattctcaattctttcagttgatgggaaaatctgcaaggcataccagcacattggattaattggtcattatacttcaaagggttgcaagaatttcatcaggagatacggtatcaagaagccatcatcttaggaccatgaaaagattgactataatgtaaaagataagaagttgcttgttaccttgtagatcttgtggtaaaacacctcgagcaatctcagttctgcatctggatgcgaaagctccacctgattcaggcatagaccttagatttacttgcataacatcgaatgcataactttattgagaatccattagaatccaaaacccacctttgttttaagttcattaataacatctccgaccgtgctttgtttaggtagtctgatattgtggattaccacctgtggagatggtcaaaaggcttgaaagttaatcaaatatacaaaagaagaaaactatgaatcataaacaaaaatctacacatacttcttccttcgtggcatgatggaaagcaacttttaaggttttaagaccttgtaattctggaagagggatgtccagaacttcataatacaaaatgtcagacgtctgaaaaaaaaaaaaaaccaataagcagacatgtattatatttatatagcaagacaaataagtaaagtatgctgaacttcacgtcaattacctgattgtaatgaactaacatatctgacaaatggtctactccacggtacttgataggctgaggcttgggttgctgggaatagcaattgtgagatgtaagcctaagtttggatggatcgtcaagaccaagcttctcagccactttctccacaacatcgtcataagtgtgctgcttcgacctaagagataaaagatttatgaaatcactgaaatcagcttgaaacaaattcgtccagaggtacttacaactccagaacaaactcatcttctttaggtttttccagagcacgaaaccggaccagctacaaaattacaagtcgaaaatagttaatcgcttaccgaatcatgccaactagagacaattttacagagactcctcaactttgctatgaaaacatgaacgctcaagagtaaggaatacttgcacaatatcagtatacatttcgcgctgataaaatattatgccaggtgaagttaagaccactctaccaatgcagcctaaatgattaaacactcattgccacttcaaaaaagcttatcattagagccattcttagtctaactctaccaagcttaactctaggaaacagtgcttagtagaattacctgtctattctggacatattcaagaaacgaaggcacagctgggtagaggcattcaatctccttgttaacaagaggtttctgaaagcaaatgatatctccatcttcaatctgcaagcaagaaacaaaatgtcaccaaagagaaacgcgacaggaagattcaatagataaaagtgaaatattacttgacacaatctgaatgaagttttcttatccaagtgttcgcacataacacaaggttcaaacttgatttcctgtaaataagcccaaaaactgttaaataacataatcaataaccatataagcataataaaaaggttaagaggcaccagcagctgcaaacctcaaaaagttctatttcttcatcaggagcaaagccaaccatttcattcagttttccagttatatccataggcttactggaacttttcaccatcagcctgccagcatagctggtagcacaagaaaaaaaaaattacaaaagaaaacaacgtatagtggataaaacacaagggacaaaagaagacaaacaaatagaagtgtttttctcacaaaaaagcaaagaaagacctcgttcttgtggaatatttgttacttaagtagtggtagaccaatttatataaaagccagagggaataaataagagggaacacaatactaccttaatactgccttctcggggtcataaagcttgaagaaaagaagaatatcttcttttgatttttcaggaggaggaataggacgtaaatcctgtaataatcaagaattagtaaaaaaaaacaagttagctcaccttctctgtaactagcttctgttttcctttcaatgataagggtcttaacaattaaactttgcaaccacgcgttcttaccaggtgctctacttccaaaaaaagcttgagttctgcagtgtttgccttattagatgcttcccttatttgtccaacctacaaaacccattttccaaaatacatgacgcacataaagttattagtacgggactcttacataattctcaacattataaaaatatcttttcctaataaacaaggcaaattcatttcaaaacagagagaaataaaaggctccaaccaatttgattgagaaaacttaaaaccgaataatcagatgtagagattctagtataacaaataaaaaggtagcagattatcagattctataatagttttagtattgcttctatataaactcgcatatccagaagaaagaggcaaaaggattaaattacttctatatatgtgcatgaatagcattcaaaaggattaagttaccggttgtaattcctcttgaggcgtaagggggcgattgggacgataggtatggttttgtctctttgcccaaatccagaacctctgtaactgaacaggtacaccaaattcttttgctacctcctcctatatcagcataaaattgaaggtcaacgattgcttaaattgtacataaagaacttttttagtcagcagaattttgaaggtttctcatgaaatccagatcaattgttaccagaaagaccgttttcacatacactaatttatttcctttttggaaaaaataaatcaaagatacgcaggcaagtaccttaaactgttgaaatggtgtctgtttctggatacggaaactgcgaactttgtcatgatccacaagatcaaaatatatatccttcccaatttgttccttaaggtcttcatctcttgcaacctttcatgttaacaaagattatgttagtaacgacagtatcaaaataacactctggaacagttcaaaagatattatcaggcccaattaaataggataaacaaaccttaattatggtatataagtgagcttgtgccttgtatcttcttttatcttccttttcttcttgctctttctttagcctcacctgtcaaaatgtaatgaacgatcaggtaaaaccaagacgcaaataaactactaagaaaatgcccgaaaatattttacccttaaatgttctgctatgtctttctcatcaacgttgcagattattttatctttgtcactttctcggatatatacaagcatgtaagcattcgagtactttgtgaatttgaaaggagggttattattgaaaccaggattagtctgtggtagctgaaaagacacgaaagcaaatatgtcaggctagaggaattaggattggggttcaaatcatggaaaatggagcaagaaaataaaacctcttcttcaccaccatattgctcctccaaagcccttttcaaatcttccttggttactcgttcatcatcaaatttatacctgaaaaggagaagtttgaacgagttaatgagaaaaaatgcacaaaacatgatttggacaaattgcaaaaacgtgtgaccttgtgaataacatcagcgtaagattgctaaattaatatcaaattcaaatactccgtagctcccgaaatgtaaaaattatttgagcataaaaaaccatgaatgttatattgataatagaaagatgcataccactgatctgagagcgtaggccttataaaagcataatagtgcccaccatgtactcctccactatgaactaaaacactgcagacaaataacagctagtatgtcaagctggaaatataacagacaccaaatgaaatgataacattttcatgtcttccactcataaaataccaattaactgtgcatgtacaggtgtaatatttaagctacataaagcagattccttgagaagaactagcagacaatcgaataaatactaaatcgccagacggcataccacataataaagggaaactaatctttgaatgcaagctcctgaggaattcactaaatatgaatcgaaagagaaaatttatatacctgtgaagagtataaaggttgcggacactcctgtcagcatcaggcgacagatactttccatcttctctatcaagatccagttcaagcggaaactcataccgatcatttatctatcaataaaagctacatcagcactcacaaatcaaggcaccaccaaacgcataccacatattcacttcctatgtacatgtgacttcaaatactaaccttcaccatggtgtccctcataaagtcatattcaaacctcttgagctggagttgaagaaccggtggaaagtcaatgaaaagaacacctttttttgcatcctgaaacaatagaaatcaagttcccccagattaagactagataaggggactgcatttgtaataataacagttaggtcggtggttaattaacttggcttagaagacgatactagtaaacaaagtttcacaagatctcctagtttaggttgctctgtaaaactctcaagttatgaactatccgcagtttttagtatgcgaaatactaaaggtgagaaaagagttgctagatacccaaatagccctgttcacaaccatccccaaaataaaagagtggggacaaccgacctgtaaaccatgtccttctgcatgatatttgttgtctccttcaagacgttcaacttcaacatacttgtcaaaagaagcataaacatccttgcagcctttaacatccagctgaaggtctgccataagattagaacatgacaataaagttggtgtgatagaataagacaacagagtgcaattgtataaatagaataagacaaccgagtgcaaatgtagaaatagaataagacaaagagtgataatgtatattactataccgtaaaatgattctttccgtgtagatttaaaatctacatttatgcactcaatgtaattcatatggtggccctcaaaaagttgttgtattgttccctccacaacagttccctacagaaaaacgaagaaaaaagagctcaaaaacaagaaacaccaactgagtagtaaatcatggcctgacaacaaaagaaaaattaccttcattttgtcctcaagcttttcgcagagaacccgattgagttcttgcacatcatgctgcatgaaggaatcatatgtatcccaaccaaacgactttgtcagctcttttgttgcaacactagtgtcattgtattggagcttgtaaaacaaactttggagagccaacggtatacttgctgtgggtgcatcattctcagttgttggcatgtggtatacagcctacaagcaacatgcaaaattcagttgtccggtcaaggattcaatgagaacccatggaatttaacaaactgaaggaaaaaacaagaatatatcttacctttctgaagtaaggtatgtggtatagtgtctgtaggagagaattcatgtagcatgttgcaccttggttcttgagtccaacaaaaccagtctcttttttagagtcatatgaccagtaatcaagaaccttacgtacagcgacttcagcttcaaccaaaacagtatcattcactaaatatcctctactaggatcataaagttcgctaagtggcatgaatgatgtaaatccccaatcgctttctctagcattgaattgatgttgcgtctctgcaacacagttaggaatcataatgtcagtgacctgtatcaccaaggtcacttacagctaggttctgataataccaagttcgccagaaaccaggtaaatattacagtctgataaagtagaaaagggtgcgttgcaggcgttcaggtaaagcttaagacagtaataacatgattatattccaataagttcaactaatccccttcttccagcccaacatttaaactaacgcaaaacatatttatgtgtgcacagccattatatgcacatgaatgcactgagaattcagggtctaataaacatcattaataaattacaggtaccttttctaacggtatatctggtgtggatttgattgactacagccagactgaactgagcatatctgctccaaccgtacggcaaactcgcagcatcagaaacatccaagtacatggacaaatgatcaacattgttccctttcgggaaaattaatatgcgcctgcataagcaaatccaaaaaggtgtcaaccaatcaaaatgcatactggacaaacaatggcaagaaaaaagtacactagagataggtatacactactattaccatttgtaacctccaacgacaaatacatcggagtaatgcttcctggtgttttgcctagagaaattagggatagtccacgtgaatttcagagtaggaggatcctcagctggctggttctccacagtactcgcagcagtctcgggttgggtaactataaatgcatcaacaattaatgaaaaataaacaacaagacaaatgacaaaaccctaagcacttcaaaaccatcaatccaactctcaaacactgcagcctgatatccacaagctctatctcatccattccaattccatcgaaaccacaaaggatacgagaaattgaagcagtgaatcaaattgaatcaaaccaaaaaagtcttaccttccatgggctgagcaggaccgtcgaccaaatctgaattcggcacaagcatctcctcatcttctggctgctgcaaaacataaacaaaaactaagaatatatacccaaaaaaaaaccctaatctcgcactacggtgatcaaaacgaacagaaaaatagaaaccacaatcactaaaactaacacaccgaaaacaaaaatcgctgcatctgcaagatgattcaaccgcttaaaattcaaatcaaatccaaaagaaaaaaaacccgaaacgatcaactaaacgaacaatcagaagcagattcaagcgccaatacacgaatggatacacatggaattgacaaaaggcagagaggatgaagaatcggagattacatcaacgggaggcggagtcatcatagtcattggccggagaaggattagacggtgggatcgagaaacgcaaaagagagaccgacgatacagagaaaaatcaaagacaaaggcaaagtgactcttagggagaaatacaatcgctcattcttactctttctcggcttcgatatattgattattctgatattttcgagaatttaaagggtcattaatgtaatttcacagtatacgggctcagatttataatttctccgaggttgggtctatcaagcgagacagaccaatgagaaagcggcacgtataagacttacgatgctactgtcatacaaaaactactagacgtggctgcttggaagattagatatcacctgacgtcgtgggtcttctttgctctttgtttttttttcgttgcttttagattttttttttaatgacggtagtgaatcttgaggtttcttttattacatttacaatattgttagattgtatttgtattaattctgctgatttactatgtttttttttgccataaaaaaccaaataaattaactgagaaacatgttgttattaataattaataaatgttgctgattaacaaaaaaaaaaacatgttttgttttccttaaagtttaattatctcttttctaacttgggcctagccaaaactgggcttttttagaaagatatctataagtcattatcttgtcttaaatcttaacaatccacaaagtccaaagagaagagtgagagtgtgtaaagagcaagggccaaatttaatgaaaatggacaggaattagtgagacgttttggtttagaaacttggttttcgtttaaagttttggtttagggctgaggtctttgattttaggggaaaccaagatcttgatcaaaacggttattgcgatttgacagtccattcgagatttcctctgaaaccaaggccttaagtgtatgtaccctattctcaaaatcaaggatgtaagaccggtgatgggtgtggcactggtgatgataactttagtttatgacaagaaaagttattcttgctatatatatatatatacagaatatgaaaagaaaagaaaaaaaatcaatattgtatttagtaatctgaaatttgagaacttgaatgaaattacatattatgattatttatttgattctccatataatcaaactcaattttatgggtttatttgtttctttatcttctctacataatcatcatcaaacttggaactaaataagattaggttaaacttgcgtcgtcatcaatcaacttgatttatccaagttatctgttgtttttttgtctcaattgtgagatgaccgtggaacaatatattataaatttctaagactcaaatgaatctaaatggacgaaaatgttagagactacactacacggataaaacgacgtagacaagtcacctcgtcttgcgtcccttttactttcatacctgaccaaactttcaacttcaatagcatgtttcataacatatgaataaacttttgttcaagcgttacactttatcaattcagcgaaatttaaattggatcacatcacacctatagaggacacttgttgaaactaaggtcacatttgttgacttagatcgtgtaagtaagaactatcatatatttagtaatattaaatttgtttgtaattttacaactttttcagatgtaaataaagttcctaggaaatttaaaaaaaaaaaaaaaaaaaacatgacttggtttgcagttttcttacaattttgatgtactaaataacaaagttttagcttgggtaggtagaaagacttatcattgggtaaattaggagatcgagatacaagtctttccaataagatttcaatctcccacatgttccggtgattagtataggtttcagtactagatattcgacctattaaaaaaggatttcaaaacatgaaaaagctcaaaagaggttagagagaagaaaaagtatagtgacgacctatgccaatataacttttccacaaagagagagagagagaaaaataacaataattaacaaacaaagaaaacgaaaggcgaacaaaacgcactaaggctataagctgcgtaagcacaaagtgagagaaagaaagaacccaaaagaaagaaagagagagagagagaatgcagagattagctccattgatggaagaaccaatagatgaagaagatcaagaagaagaaagaggaggaagaaaaggatcaacaagatccaaatcatggaagaaatggataaagacacaattgcagttcatcgtcttccccaagaaaccagacatgaagcttcttcttagtgttatgggatgtcctctcttccctgtccctcctctctccaaaatctctcttcaacaggtacttatacgccgtacatgtatgtgtatatttatacgtatatgaaactcatctatttcaacgactatttctaaaactaaggaaaatattttggtgggtcgcattaaattgaattagtttatgatcgtttcgtttttcattttttttttttgcatttcaaatattagtagtagtattttttattgttggcgtcatttttggtattaattacatcaaacgtttcggacatgctcttaatggtgagtactattaacctgacatataagtttttatccatcacttgacgacagttgacaacttatataatggtttgtggtatattatttcttagtgggaaacctttataaaaaaaacatgacatatgcaaacctttatactattatatttaaaaggaaaattttcggatatatttctaatagttcagaaaatatctatacttatctttaccctttttcatatatgattttttaagaagataaatactatttcgaagatttattggcttacaaaattatttataattttaaaataatcccttttcaaactcctctttagtaaattactaggtggattcctatgaaaggctagctatattatctatatatataatatttcactttttatattcaaatgatttcacggtagatgtgagttttgccaaaaatttgtggacaaataggtcagtgtcacgtaacaagattcaacttcttatcaccaaaaaaaaaaatattcatgttctttagcgtattaatataagcgagccagaaatataacttgcacaataataaatcagtgaaggaaaagagagaaagaataagcgtagtgaatgcaagagtctatcacaagatccataaattattcctggagaccttaaattattcttctggttttcagatctgaatatactttttgttattttattatattttatatccagtcaaaaacaaatgatttgtactagcaagaggaaaaaccagactaaattgatattattgtaatattcaaacttcagaaacccaaatttggattgaaaatacataccatagtacatagtttcaaatcaaatgtttatatatttcaaaagcttactacatatagaaaaaaatatatacacgtttccgtagtttaatataatttcaatatgatcaacatactgatagtgaaaataaacggttcagatccatgcttataatatcaaatatgtgcatttaaatcatactaatccataattattatgatctttaaggtatcatcatcagcacaatacataatacaacagtttgccgcagcaaccggatgcaagaaacttgcgggcgaaatcaaaaacactttcgtgaccggaaaaatcacaatgactatggtgagtgatattaatagctcaaccgcggtcagtagtgcctcgtctgtgtctcataagggatgctttgtcatgtggcaaatgctacctgaaaaatggcttatcgagttggttggtggcggccataaggtttcagccggtagtgatggagaaattacttggcgttatacaccatggctcggtgatcatgcagctaaaggtgccataaggcctttgcgacgtgctctacaagtaagtacatatgatcgtttagtttttatttatttgacatcaatcatgttgattaagcatatttttgttaaccagacagtctagaccaattaattaagtaatccctcaaaaagtaagattctttataatctataaaactcttgaagaaagacttgtaactttgtaagggtagatttccaagatttgaagtgtagcaaatgcatctagtgaaagctgaagacacataattgtatattgattaatttactataggcaaaagatcaaggtgttggatctgacattccactttgggggatgcttttttagctttctcatgagagttttccttttgccttagtcacgtgctactaattgactttatcatacgcttaaaaaaatggattaaaaggttggaacttggaagagagattcaaagttgagatattagttaatcccaactttatacaattataagatttttgggataaaaacattatgtgttaattagtacgtaaatggtccccttttgtggtacattgatcactagttaacaataattgtttataacgagttaaaactagacctcacttatcggtcttaaattgaaaatagtatttacactaaacaaggttcatgtttgctcttattcatgtattgtcatccatgtggggtatttttctattctgtttcttttggctgtggtccagaactttgtctgaaagggtaacatgattacaaatctaaaatctaaatccgagtttaaaagtatgtacttaattatctcaataatccctgcaaaacagtgtttgaattttcagaaaatgagatatgatgtactaaatatatcttctaagcagccgccaagaataaacgtacaaacatacacttccaccagttttggggaattcaaaccaaccaaaagcatatatttcttgtaattaaactactcttgtgattgttggtcgctgtatggtcaaaactatgcatccaatgaaaaatagacctgctagtgaaatggaaccaatccttgctagttagtatcaaatgatgatttgtcaggatcaattatatttatggaattgctagttattgatcatagtttaaagtattggcacttttaatctatataaggagatagaacgtggattgctaatgataaatatacttctactaatggagattgtctatgtgcatgaacacgaaatcaggggttggatcctctaaccatttcatcagttttctcatcggcacaattcgttggagagaaagaaatcaatgggaaggattgtttcattctcaagttatcaaccgaccaaatcgatttatcaaaacgcagtgactctaccgctgagatgatcaaacacgtcgcattcggttacttcagccaaaaaagtggcctcttaatttgccttgaagactcttccttaaccaggtacataacaataactgatttaatttaactttggtttagttagggtttatgttaaccaaagtcaaaacctaaattacttcggttagaagtcacacttgtatatgtaaattttggtttgtgatatacaggattcagataccaggaactgtgccaacatattgggagacctcaatgtcgtcgtggatggaagactaccgagcaatagaaggtagtgaagtggtaatagcacactcaggtaagacagatgtgttaatctcaagatttggagaaactctcaaaggaggaatctctgtgactcgaatggaagagaaatggactatagacgatgttgcattcgacgtgcctggtctctccgttgattgttttattcctcctaaagagatgaagatggattttcaccaccaagatgctcaaaaacatttaccaaactacaatacatgatcgaggcaaaactgtaaaattagaaaaatgtaacagagtggggtgtttttgactcaatttaaaagttgtggggttattttaaaactatatatatagttctaccacaactactttgttccttcttcgttgtgaaagcaaataacagagagcaacaaaaaaatgtcgcgattggctttaaatcgttatagccgttgtttttcgcggcttaagacattgacgacgcctctgtttttctcttcctctgctgcgtcgaatcgagatggtgactatcagataggaccgcccccgatccgagtcggactcactgagtcagcgggtcgggctgtttttgcaacgcgtaaaattggtgccggagatcttatacacacggcaaagcccgtcgtagcttgcccttctcttttaaagctcgactctgtttgctatctttgcctaaagaaactcatgggttctgctaaatttgaagatcgtggagtttcttattgcagtcaagagtgtcaagagaattcaaaggtcgtgattttttggtctttgatgtatgattctcttataattctattggtaatgtattatccctgcttacaaggtgttcgacgaaatgcttcaatggaaaaaacacatcactttcttttttttattcatctagagataaatcattaccctatatgtgtacttttgagttcatgatatatatgttttgatgatttacaggggtttttggatgtcgaaacaagagcagattggtcaagttttgatgattattgtaggtatgacactcaagttttacatattagcgcatatacttttactttatatatcagcttcaatattttcttttccatatgtgaacactatcaatattttcttacataatctagtcatttctgtttctatagtagttttagtggaataaggaaaacttaaggaagtcataacttgagatatctgttagtttgtcttgcttatgtgaaaggctataatatggtctctcaaatattttctcttgtaatttagaaaaagagatagacattactattaagatctttgtattggcactgaaaatgtctacattcgattatctttttgtaaggacgcataacttcaagtacccgcttatggtcaagaggttgtgttgtatgataatatcaggtgcccggcccgctgactgtcttgacatacttcaaccagctgttttatcttctgagatgatttcaaaggtgagttattgaagatgacaaataaatacattagtaactgattttgaaacgtttgagtcaaaatacactgggctgatctcatacatgacaagttatgcaaactttgaattacgtccccggagtttcttgtattcaatttgattgttcatgcattacaccatgtgaagctcaccttgttatgatgaattcattggctccactgagttgattggtcgtatagtcactggctttttaatgtttcagatagaagacgggtatggtttattatggaatgccttcaggaaggcaaatttcaaggatgacgatgttgcttgtatccttagagctatattttacatcaaatccattttatctccaacgttctgttttctgttatctctttgctatttacagttcttaacatccagaagttctgacaaaacaatggtatacggctatactcgctcggattcgtatcaatgcatttcgtattgacctggttggaggctcatgtggcgaagaccttctttcactagctgcagcctctgttgaaggtgaaggtgcagttggtcatgccgtttatatgctaccatccttctacaatcatgactgtggtaataatattcactttttgatcttttttaatatgtcgggttttcgtgaagaaattctttaatgtaccaacatcataagccaaatagtcttataaatctttttcgttagacaattagcaaattttttgaagtaattgcaaggtaagagaaaagaataggagtagaagattataacagaggtttgtatagaaggagagttatactgttagggtaaagaacatgatcagataaagttttactgagaaactagcaaagtatttttttttacttagaaactagatagttcaaatccatgtgagtctttacctgaattgtttttgtaaactgttgagttcatctattatgcgggtacgacatctattacgccacaaaaatcttcatctatttatgaaaaagaaagtgatgactagtttgaatgtccacagatcccaacgcgcacataatttggttgcataatgcagatgcaaggttgaacactctacgcgatgtcgaagaaggtttggtcttttatacttataacaaagatttttaattagcatttcacttcaatcttgtgtgcatttcacttgattggtaacactacatgcatattttcaggtgaagagcttcggatatgttatatagatgcaagcatgggatatgaagcgcgacaaacaatactctctcaagggtttgggttcctctgcaactgtttacgctgccagtccactgactaactgattaactcttcctctcctagtcatcttcaattttcgtgtatcttatataatatatgtgagaaaacgaggaatcaagaaaataacaaaataaactatatataaattcttaatggttttctaaaactatatatcttaaccaaattattttcaatcattagatagtgaaacacatataatatatatattaagcaaaaataggaacaaaaaagtgcatttaaaaagatagccaaattttattacataaaaaaagcttaacaagataaatcaacaaagaacaaaatcagaagaataaaaaaaaccaatcataaaaagaaattattgcactcatgcttcttcttaaagaaacaattcaaaatcaataataaggcgtcttgtagacatatggtggtggtggagacttgtaagtgactttaggagaaggagagtagtatggaggaggtggggagctgtagacgtatggtggtggtggagacttgtagtgaaccttaggagaaggagagtaatagggtggtggtggggagctgtagacgtatggtggaggtggggacttgtagtgaactttaggagaaggagagtagtatggtggtggtggggaactgtagacgtacggtggtggtggggacttgtagtatacatttggagatggtgagtagtacggtgggggtggggagctgtagacgtacggtggtggtggggacttgtagtaaacctttggagaaggagagtagtacggtggtggtggggaactgtagacgtacggtggtggtggggacttgtagtataccttaggagaaggagagtagtacggtggtggtggggagctgtagacgtatggtggaggtggagacttatagtaaacctttggagaaggagagtagtacggtggtggtggagaactgtagacgtacggtggtggtggggacttgtagtatacctttggagatggagagtagtacggtgggggtggggagctgtagacgtatggtggaggtggggacttgtagtaaacctttggagaaggagagtagtacggtggtggtggagaactgtagacgtacggtggtggtggggacttgtagtatacctttggagatggagagtagtacggtgggggtggggagctgtagacgtatggtggaggtggggacttgtagtaaacctttggagaaggagagtagtacggtggtggtggggaactgtagacgtatggtggtggtggggacttgtagtaaacctttggtgaaggagagtagtacagtggtggtggggaactgtagacgtacggtggtggtggggacttgtagtataccttaggagaaggagagtagtacggtggtggtggggagctgtaaacgtatggtggaggtggggacttgtagtaaacctttggagaaggagagtagtacggtggaggtggagaattatagacgtatggtggtggtggagatttatagtttacctttggtgatggagtatagtatggtggtggtggagaactgtaaacatatggtttcggatgtggtgcgtactttgggcctttgtgttcatagctgggagaatcgtaagctggggtatgaggagatgagtaagggtatgatgtcactgtagccgcaatagcacttaggaccacaacataaaccatgcaattcattaatcccattgttcttgaggatctcatcacactcttttatttctttgtttttggttatgttagacttgaacatgaacaccctttatatagtcttactttgtgttctcaacttgcgttcgtgtgtggcacttctaagtacattagaggacgtgctaagttgtttgtttgaaaattcgtgattcgtgaagaatatgtaataatactagattcttgagcaaccctcaatttttaaggattataagttaaaaaagaattatatggtacaagctggttcttctttggttaaggcaagtggatgcgaatcgatcgtgtgagcaacatttgattcacaacatttcctcatgggcgaccacgttcatccaaaaaaaaaaaaaaaaaaaaaagctaagcatctatttacattagagttgcttatgctgtttcttacttttttttttatctttttttttattggcaatagccattattcttctagtaacgtcatttgacggagcaaaataaatacatatatcatccatttgagccgcatttagaccaattagtgtttttttttctttgtttgataaaagattagaccaataaagtttgtatcgcaaaactagcaatttcatgctttttttttgctcttacgttgtgtgatcaactgatcattaattatcgcacagtataacattagcaaaagcttcgttcattctttgtagtgaatcaaaagaaaacaaatatgactatgataaactaacagaatctatcgtcaatcttgcactttgtcatggaaagcagcactaatgacatttttttaaacaagagcgtacttctagacggaaaaacaaaatccaaactaaaaagaagaatcgtgctgatgaggaaacaaagaaattaggggagaaggtaactttagggatccacctgaaaacttgtactaaatgctgttaaaaaaaaaaacagaagagaagtaacatttttctacacaaagttgaagactcttgaaagcatcaacgatttgaccaaaaaaaaaaatggaaagcatcaacgacaataacaaagaagaaattaaagattcaagtgccactattgtttcaagaacttccctacttcacaagccctagctaggtggccatcaaaacgctcaatagagaacgtcaacgaaccaaacgcttcaacgtccattcaaacacagtcgctttttccacccccaacattggtgcttgcctgcttctaggtgcaacgaggatcgctttagctttgaagctgctcaaatcaaccacacgagattaggattatgtcgtagctataactaatccgaccgttcatcttataatagatatatgccttggcgttcatcggtgatcaccagactagaccgacgtatgtcgggtggtggtagcagcagcataagtctattttacgattccaagacgaatgtatccttcttttaatacctctaattctttctttttttcctttagttttcctctagtttgttttgttttaattcacttatgatggttagtccccgtgacaccgtataaacttcacagttaaacaagttcaagcagatgaatagaaaactctcaacggcgagcttgtatgtcttaaatagaactagaccttgttgaaaaatttatgtgatacactcttcttctcctataaatcttgacttttgatgtattttatgtaatatacgtcataagttagagaaaaaaataaaaataaaaagagacgcaagtgagaatactaggaataagaaaataacgaaatagctaatatatgtactatatacaaattttaacggttcgatctaaatctatcatatccataaccttaccaaaattgctttttaaccttttttcaatggatagcaaaacggatatattagaaatttggagccaattcgaacaaataccaagggatttttaaatatagccaaatattattggtaaaataaaaagctcaacaagataaaggaacaaattaaaagaacaaaatcagaagattcaagagaaaaaaatcataaaaacaaattattgcaatcacgtttccttttaatgaaacaattcaaaatcaatagtaaggcgccttgtagacatatgggggtggtggagacttgtaagtgacctttggagaaggagaatagtatggtggaggtggagagttatacacgtatggtggtggtggagatttgtaatgaacctttggagaaggagagtaatatagtgggggtggggagctgtaaacgtatggtagtggtggagacttgtagtcaacctttggagaaggagaataatatggtaggggtgggaagctatagacgtatggtgggggggtagacttgtagtcaaccataggagaaggagagtagtatggtgggggcggagaactgtaaacgtatggtggtgggggagacttgtagttaaccttaggcgaaggagagtagtatggtgggggtggggagctgtagacgtatggtggtggtggagatttgtagtttaccttaggcgaaggagagtagtatggtgggggatgggagctgtagacgtatggtggtggtggagatttgtagtttaccttaggcgaaggagagtggtatggtgggggaggggaactgtagacgtatggtggtggtggagacttgtactcaacctttggtgaaggagagtagtaaggtgggggaggggagctgtagacgtatggtggtgggggagacttgtactcaacctttggtgaaggagagtagtaaggtggaggaggggagctgtagacgtatggtggtgggggagacttgtaatcaaccttaggtgaaggagagtagtatggtgggggcggggagctgtagacgtatggtggtgggggagacttgtacgcaacctttggtgaaggagagtagtaaggtgggggcggagagctgtagacgtatggtggtgggggagacttgtacgcaacctttggcgaaggagagtagtattgtgggggcggggagctgtagacgtatggtggtgggggagacttgtagtcaaccttaggcgaaggagagtagtatggtgggggtggagagctgtaaacatacggtggtggtggggacttgtagtcaacctttggagatggagagtagtatggtgggggtggggagctgtagacgtatggtggtggtggggacttgtagtaaacttttggagatggtgagtagtacggtgggggtggagagctgtagacatatggtggtggtggggacttgtactctaccttaggagaaggagagtagtatggtggaggtggagaattgtagacgtacggtggtgggggagacttgtattcaacctttggcgaaggagagaagtatggtgggggtggggaactgtagacgtacggtggtgggggagatttgtagtcaacctttggcgaaggagagtagtatggtgggggtggggagttgtagacgtacggtggtggtggggacttgtagtcaacctttggagatggagagtagtacggtgggggtggagaactgtagacatatggtggtggtggggacttgtactctatcttaggagaaggagagtagtatggtggaggtggagaattgtagacgtacggtggtggtggagacttgtattcaacctttggcgaaggagaatagtatggtgggggtggggagctgtagacgtatggtggtggaggagacttatagtcaaccttcggagaaggagaatagtatggtggaggtggggaactgtagacgtaaggtggtggtggagacttataatcaacctttggtgaaggagaatagtatggtggaggtggagagttgtagacgtttggtggtggtggagacttatagtttacttttggagaaggagaatagtatgatggaggtggtggagaaatataaacgtatggttttggatgtggcgcgtacttagggcttttgtgttcatggctgggagaattgtaatgtggggtttgaggggatgagtaaggagaggagtaagggtatgatgtcactgtagccgcaatggcacttaggaccacaacgtaaaccatgcaatgccctaaccccatcgttcttgaggatctcatcatacccatctctttatttttatttatttgttttggttttatgttatacttgaacatgaataccatttatatagtctttttttgtgtgtgtaaatattatactatcttctcaagttggcttcgtgtgtggcacttccaattacattagaggacgtgcaatgttgtttgtttgaaataaagtagcaattcgatcgtggagaatatgaaattttattagatcctcaatttttgaaatatttgttcgttttcttttgtttgaactttgtcaactcaaataattagaagaacaaaagactattaatgattattttagctattgagaaaatttttgtttcataaattttatgtgacaagggaaaaaatattttatttctcttatgatgaattaaaaggctgtgtattaactactgcttttgtttctaaaggattattgaagaattttagggtatattagagttgcttaagctgttcttcttctgttaaagcaactgcatgcgaatcgatcgtgtgagcaacgtttggttcacgaccatgttctttcctcatgggcgaccactttcatgatccattataataaaacaaatatgacgaagacaaattaacataatatatcgtcactgttgcagtttgttatggagagtaacattaatgaatctgtttttaacaagatcgtacttcgagacgaaaagcaaaatccaaacacaaaaaaaagtaatcgcgcagatgaggaaacaaagatgtgacaccacgcagtttaccatctaactacattaatttgagggatccacctgaaaacttgtactatatgttaattcatatgcatggttgttttattttactttttggtcttgtggttagtattacctactcaaaaatgaggatttgattagatgaggcaacatacaatttgattaactactcaaaaacatggttgttctaaaactgaccataaggaagaaaaaaatgtatatatatcacgacagagatttgaagttttggactaaagcctcacacatagccatcagtgttatatactgtatataagctgtcactattaaacatagaaacaggaaccttaaagatacaactatatactatcttgacatcaaatacgtgtactaaaaccttttcataaaagatgcattgacatgacatatcaatgatggtagttcgacgggtagaaatcatcaaggcaaatccgcatttgaattgaatgctcactagattatctacaaggagacaaaccaattagctcactagtttagttcaattcttgtctggctaatcctatctacatatacaagactataatatagcaaaattagaaagaatatagctagaaacgggtaaatatatactacttaccaaaaactaaatgtgcctgaataggtctattatagttaatagttattcagtgtaaattatctatgtacataccccatcgggaattaaatgcaagaaacatagaggagaccgtacttcgaagttgcaaatttaacactaagttgaagaatctagaaatagaaagccaaaatcttcctttacttcaactctacaatttcaatcttttctctgtacttagccatccagagtcataaccaccactatattaaaatgaagacttatgatttcatgaacgtcaactctttctctcctaaggaaagacccattcgcctctttggcttcgagtttggagcttctcatgaagaatctgagtccaaagacaattacaacgagaacaatgaaagcatcaaagacgataacaaagaaaaaagattcaagtgccactattgtttccggaacttccctacttcacaagccctaggcggccatcaaaacgctcacaagagagaacgtcaacaaactaaacgcttcaacctccattcaaacgcagccgctttcttccaccgccaacaaaaccacattgctgcttctaggctctacgaggatcgctatagccttgaagctgttcaaatcaacgacgcgagattagggttatgtcgtatgtataactcatctgcgagttttaatcgtgaccgttcatcttattataatagatatattccttggttcatcggtgatcaccagactagaccaacgtatgtcggtggtggtagcagcagccatggtctgttttacgagtccaagaagaatgtaccggaccacgtgagtttggatctacgcctctagttccattcttttagtatctctctctagctagttcttaaaaaaaaaaaaagagagactagttttttttccttctttcaaatactttttattttattttagtctacttgattaattatgaatttatgatagtgtatccccgtagatatcatgttatattaacagttaaacaattttatggagatgaactttaacttcagatagtttctttctgagatttaaagtcttaaatattatcgacgcattccaatctcagaataggtttatatctcacattataagtatagaattgagaatggaccttaacccatgaaacttaacaaaaacaaaattaacatatgctaaaatcttcggattgtattttaaaatcgctacttgaaacttcaacttgtatctaaaaaggtaaaattattaattgaataatatagtgtttagaagcgaaacattcgtcaatcacatctaacgacggttaaagtatgtgattaattgggaatatttaaatgatcgatttgataatcagcaagacagcaaccataaaagtggacactttaattttcgtaaaaaacaatttgaccttttattttctaaaaaaaatattcaaatatcaaaaaatacgaatttatttgtaacatttttttcgatttttgttttttaatattgttatttttttcatttgacacatcgttattttcatattacttaccataaacccatttatcaccaatagaaattatcctcgaaccttcttttcaaccacaccagtttatttatttaacattctctttagaaactttaaagcatagcttaaagtagtacgaaaccgaaaacttaactaacacatttgttagctcaactctctcttttttaaaaaaaatcgtcaattattttgcatttcttttttgacaacatatatttggtttcgaaagaccgtttgattggttatgaaatgtccacgccaataacattaactctcaaatctaaatcgaatcagtaaagggtcccaagggatacatcaccactaagtttaaacttgaaaatgtttacatttttctttcaagtttttttgcctccacctaaagacaaaccaaataaatgtttaaatttattcgaattgtgatgtaaataacgcctgaatgcagcatttaataactcagtttctgacaagaaatacacatccgcctaaataattccgttagccttaatgtttatacagatggattaacgtatggactcaagatagacacatatcgttgagaacaatgtactagatgacctttgatgaacgaatgaaaggtaaagtatccatagagagcaacattgagatatatgaagaagaggaaaatcgtttttagaagttaataagtatagtttatttagttggaattggataaaagtaatgttcaaagagtacatagtgccttgaacgtctatgtgattctaagtgcacactacgagataggcttataaaatatataaaaatacatattatttagatgatgtttatttatattaataataataaataataagatacacaaatacgattttgttattttaatcaaaattacaaatacactatatagaatataataaaagctagctagaaaataacatattttcaattctagttgcgtatgaactgagaagtgaacaagaattaatctatggaacctaaacatcagatcctagttgatatgcaaaacaataattgatgtgtgatacgagaagagaccgtggtgggtacatgtatagttctataacaaatttaatttcaatctaactttgtgttagtacaaagtacaaaggaaacgtttaatcataaatagacaaaatctcatgtcccacacacattcaaaaccacccctacaaattaaatgggaatgaagaaaacgaaaatgataccaaaatcatgttaactaaatatagccagagaaaaggatgactcacttcagattttatttggctcacgtttttccaaatctacttttgggtgtaacttaaatcaagtgctcacattccatgtactatatgtataacgagaaaattattatgtagttgtaagtttgatataaggacgaaaatttctctattttgtcttttcaggacatctgatcattctattaatttaatgagaaaaatgaatgttttgtcttgtttaacatttgttttgtttggtttgtcaaacatgtgtggatgatgcatcaacaacactaacacgaaccactacaataaaggctcaaccactgaaacgaaatgtaaacaacaattccgcctctaaaaacattcctgataaaattaagccttgaaccaaaatgaaagaaaatacaacaatataattaagccagaaaatgaagttcataaccaaaaataaataaataaacgtaatctataaccgaccttacaaaaaaacacaaaatcttgatctactattttattccaaacctcaaaaaaatatctcaaaatcgacaaatctcaaaccctagaaattttgagaaaaatcatttgtttaaaagggaatttaaaatggatgtcaaaacgacgtcaaacacacatgttatgccgtttattaattaactcagtattaccattatgagtgggcgtttttaatcattgggcccttttatttctcttacattggtttaaactatgttcattttgtggccttgtgggcttttattaaagtttgaccctttttgttgatatttgactttcttttgtatgataaattctcaatcaaatctctgagctttcagatatactctgatagagaagaagaagaagaagaagagatcagctgagcaacaatggccaccgcgatacctctcttcgcctctttcaagtatgccgatagtctcaccgtcgttggaatctctttctgcacggcgttggtctgcgaagcaatctcatggatcctaatctatcgcacaagctcttacaaatcgttgaaatcttccattgacaaagcctctaagaagcttgagacgatgaagacagataatccttcctcgaagctaacaaacaagaaatcgaagacgaagaagatagatcgcgttgaatccagcttaaaggaatcgagcagagatctatcactcttcaagtttaaatctggtgccgttgtggctttggttctctttgtcgtgtttggattgttgaattcgcttttcgaagggaaagtggtagcgaagcttccgtttcatccgattacgattgtgaggaagatgagtcatagaggattgaaaggcgatgattccactgattgttccatggcttttctttatctgctttgttctattagtataaggactaatctgcagaagttcttgggtttctctccacctagaggagctgctggtgctggtggtttgttcccaatgcctgatccaaagaccaattgatcaggtttgatctgatgatgaattggattctggattcttagctcgttgttactctgaaattttcatagataacttcaatgctctgatgtagtggtgttgttttcagttcgtttgatgagaaacactttcaaagtttcgagttttgagttttcttctagtatgaggtttggatttggatcccttaacatgatctactccttttcaaattcagtcttgattattgtgtgttcaagtccttttcatatgctttgacatctttctaatcatttgtacaccaaaaggcttgagttttcatgcgtatggattgtttggagactgaaatgagaggttagtgaaagatgtaggtaataagagtacacatggatagggttttgtcaagtgtaatgggtaagttacagagaggctcaggtcatatcctcagcaatgtaagacttgttagttattgaatatttgcatcgtagtacttgtctatgcttataactagtgattggcaatggtaatctgatcagctggaaagtcctaaatggtgtaaagataccataatcaaaagatatgcagggttcctccagctaagctcccatgttgaacttggttagccttttgtgtatattgattacagaacataaaatatttgcttagcgaatcgcaagttagaggattcaaagaactactttgcacaaaagattttccttgaggatactgccaaagtattatcaacaagcaaaaaaatcaagcccaagaaggaaatgagaatttacaaactcaaaatcacgaatgtcaaatcataacttaagtcccaaaatgctcgattcttgtctctgatactgaatcagacaaacctgaattagcagctccttgggatctcaacttggcaacaagaccccacatattagcaagttcattctctagatacgcttccctttgtttcgactcttctactgttctttgtagctcggcttccctctgaattttttcaatgagagcagcttcgaatgaaacttcacgttccttgctcacagtcagttctctcttcagttccatcaacgagttttcttgctctttcctctttgaaacactctcccttcttccattcctcaggtttcctgtctttccctgtggtgttgtaacagagctcttctgcactgctgccagatcagctgctagtctctcgttgtgattcataagtcttgctatttcctcagacaatgccttgagctcaatagcagccgctgaagcaagctctttcgcatatgaactctcttcagctagtttcttgtttcggatttctagttgttcattcagttcacttagttctgcagctttcagtttaagctcttcaatctcaaatgcctggtatgtctcattcaggtagtgaataaaatgttcagattttcatataatcaaagtataaggggaaaatcttcacaataacatgttgtgaagtatatgtgaattttcacctgtgcttctatgactttttcttcatttttgtttggcgattgagaagattgttgcatgtgacatgtgaccgagttgatatctcccagttccagggcgtcagagagctgctgctttaggtttgcaacctcttcttgcaaatcttcacagaaacttgtctgcagaaaagagttgatcagttagataattctctgaaatgtctgcgcactagcttcaaaggttcctaaatacgctggaactgcggaaagagacggtgtattatctgaaccttttcggtgagttgttcctgaatgatacgattatctgcagctttaacctgtaaattaaatgaatactgagtaaaaagagtcctaatccttaacagatcatatcgagctaaataagatatatagttgcaggtaggttatatagcaaagccatctaggtgcagtatcaattaagagctgaagtattgtgtaaagagagagagtttcagcagcacctcgagttcaaaacatttctcatttagttgagccctcatttcagaaacagcctgaagataagagcgactcacatgagagaaaatccaacctcaaacaaatgtcagaacaagaagcacaaggctactgtgtgatgtttgaaaaagataatcgacctgcacgatatcagatttatccaattcatcatgtgatgctataacaaaatccagtatttgtttccccaacgtagcaatctggtcgttctttgccttgatgtcgccattgaggtttataatctctgcctgcataaaaccaaagacaaccaggaaagtaaatatctgcagaatttgatccaaaatatgataaagatcataaacagatcgcaaagattactttaatttcttcattttgaggggctttggcagcctcttctgacaacagtttaaaagaccttgattgttgtgccatctcctctgataaagtcttttgctgttccctcagtatttccatctggtcgatcatttttattctagtctgggaacaagtacacaatgccttaaaatcgtacatcacttgttcaaaagaaagctcaagaactgtgaaaaaatctcaatgtacctcaggtgtctcaatctcatgaaaactgtcttcatgagcttctctattctccatagtctctataatttgatctgccaatgcggagccttctgaaagtctagattctgtatgaaaatcactgccttctccttgaggagttgacggtgtactgttggacttgactgcactcgacttgtcactgaggcttgatccccccaaactgctgtcttttttctgatagtaaacagtaatgagagtaaaggtggcaaaagagagacccccaaaaaagaaaaaagaaaatctaactaagaggaaatgaagctgtgtgataaggagcataatttttataaagcacatacgaatgctagatatatgatgcgcaggagactgtatacaacagtatagtaaacagtaatgagaataatgagagtaaaggctatgatgttgaggaaaatgctccgatttaaacaagagaagccaacggtaaaagtttatcaaagcatataaattctacaatcaaatgtgtaccttaattttcaaccagttcagtaggccatgcttccttgtcttcttttcttctataaacgcatcatctataatctcaggagtcccttcacgagaaacatacaattcaaggttctcatcatctgtcaagtcgcgcctcttatgcggtaggtaagcaagctggccatgcattatcaactaagatcagccaaaaaaatagtaattggcagacatgattttgggaaatgaagagttatgttttatattgttttgtaaaataggtctaggctagaaaagtgattctacctcctcttctccgaatgagtgtctcctccgaggatcagcacgataagaaaaccgcgatgtttgtggagttttattagacacgagaattagttttgtcagcctttggattcgactcaagagagctgctttagcatcttcctcttcttctagcttttataatcacatcaaaagaaaatcatgcaaagcagatttcaagtctccacaaactgaagcttggtacagtaaaagtatcattggtttgttgaaaacatttaaacaggggtcaatgcagaaaaacatactttctgcttcaggagaacaatgtcgatatcatctccactgatatcctttagctgagaaactggtttaattccttgtttaagctgttccagctcctccttgagttggcgaatctcgtattggtacttcttgatcaatgatttctcatcaattatctgtagttttataaggttagaaatccagaatgaatcttcagtacagacatgcactaagctaaaaggatagatgtaaactaagaccttgttctgtgcggcttgaatctcaatatgctttgcacgatgagcaaacttcaatgtgttgtgtgtttcttcagagttgcttgatgcaggtgtcactgtacatatgagctatcatattccagatggaacaatcaatcagttaaatcgatcataacaattgttttctgctgcctatgttcatgttgtgtgtgtcattaattggaacaagaagctaaaacagatctctgacaacacttacagatacacgtccatgaccactcagtgaggactcaagcagtctggttaatttagagtccctatatggtacatgactagcccttctatctgtaagctttgatattacctacaaaattgcaaaagaacgtaccaacttcagcttttgggagattacttaacataatgactggaaggcaaaaaaaaccaaccaagcttttcagctgtaaaggaggtggaaaaagccaaagaagttcttaaatttcaactaaattcgaaaaactattgttgcttgggaaaaacagtgagaaccaagaactcacggtccctaaagttagcaaacttttatttatataagacccttccttgcgccttaaaccgctggtttcagcttttgagctctcagaacctgccaggtcaatgaggttctgcagatataagtgaaattatgagcagttaatcagttgttcacctttaagtgttcaaagagtgcaacaataaacagtttatatagttgattatgctccagagttgaagaaaaagtaagctataaccgaacataaaattacaggataagaacaaagatgttataccagctgcgagaggtgtactgctccaccttcattattgtcacccaagggactactctctatagtctgcaaccaaaccagttataacatctttcaaaaactttactgatagatatgaaaagacagccaaactgtatacttacattactaaacaggggaaagcaaaatcaaataaataaatctatctatgctttgaaagagaaaaataaacataccagggtaaacattgtatggcttcggctgctgagcaaattaaaacttgtggatccaatatgtcggtgctctgtcatcaaacgaaaatttaatcaagatgacttgcatgataaacataagaatgaagaaaaaaagtagtagatttaagagaaggattaagaatgaagtgaaaatactagaatcaagaaagagatgctagtcttcagaattgctatctcatatcacataaaataccccaactggtaaaggaaacactttctgacaaagaaatcttatgaaaatttacatggaaatgcctaccttctccagctgctatgagagaaagcacatgagcaggggacagaacaacctcttctttaatcccttcaatataggttccctataatcagcaataaagagagaatcagtgcagaatttaagagggaaagacacttaatgcaatagaggtagtcatgtttattctaaaattcttagcccaaccaatagtcaacaggtacaaatctagtatacttgaataaaaaatgtgatccagaacattcaaatatagatagataatcatgccactttgcacattatttgcaggatctcagagaatttcatttatattaaaatggaacaagtactttcatgcatctagccgagaaaagatgtatcctctaattaaacaaaaatggtgtgctaggatttaggattctataatgaatatagtcccaacaaagatattatgagacagtgaaatccgcgctaagcatgttaccaacagaaagtaaataagaggatcaaatgctgaaacaagtacctgctcatcttctctgatcctcaaattttgtcctgctggattcaacaaatcattgacaacctgaagcaaaatgaaccctagggatattaagaaaaatcaaaaccagaatctgactatcaatcaacaccactggtaaagttgacgggagggaagaaaagcaggcagtgagtagcacctcgttataaatttcaaagtaggaaacacgtaggagaaattctcgccttggtgtctgcgagaaaaatgaaaagtgtgatttaactagcacttaggccaggacattcgactaatcaacatcctaagaagtacctcttgtataatgctgaaagcatctttcacggctaatggtattataccaggagatctttggttcccctgacatttgaaccaaacaaaactttcttcatgagataaaatagttcttatttcatgcacatctttaaaggtaaacatggactctacaatgaagtgtgtaagatcatccggcattagggcagggccatgtattgatcatggctgtcataagtgaaaaattatagaaggttgcaaagtgtaaagcaaagaactaacttaaagagtgcagccatatgctaaatttagtaaaagaaaaggctttctagggtcaacaaagaaaccctaactagaaggaatagccaaatatctaatataaacgatatatcttaggattcaaacatcgagttctattgctaatcattatggctactaaaggagagaaactttgttcctgaactactcagtgatttagccagaaaagaaggaagaggtaaatgactctctgacagataagcattgtctgggatgacacattgaagtacattgtacaaggtagtaacctaatacgttctattataataagatgaaaagcaagaaataacatgattagtgaatcttacatgcattgtatgagttttcccactgcttgtcactccatatgcgaaaatggtccctgtggttgaattaacactcaaagtcactacaataaaatcaaattggcaagaaaatctaacttaaagttgttctagagactagaacaagcactagatagagtttggcaactcaaagatctcattttctaaatgaatggtcatgcaactgttcatggtactgtagctcgggtaagcttgatactaaaaatatctttttctcttctaagaataaagtcttaactagagagggcaataataagtgtttagtccataccattgacccccgccatagcaccattaacgacatgctgagcagcaacatcatagacattgcgtgtagtcgtagtaggcccgaaaacacgatctgcaagaaaggacaacagaaatttcaagaaaaaatatggcagattggaccttgatatctagtttaatttaggtcttgattcatgatgcatgaaacttcaatccattccacagaacaagatttatgatggttacagaaactcatgaagtcatgaacactagtcaaactgttaagactaaccataggcataagctattgattgattattctcattccgcactatcgtttccccatctgcataccatgcaatctcctctcctttccggatttcccttggactaagtgaagcataaaccaatgtcaacaatccacagaacaaacatataaaactaaagtgtttgaatcctacacaaaagaaatcaacatattcacctgagtggacgaaaacgcacagtgacagtgacattttctttggactgcaaaggcttaggtggtaactgaggcttgcttcgaaccgatgaagaagtaggggagctatggctatctacagacgcctcttgataaagttttgaagacgaggttgttgaagatgcagaggactcaacagtctttaacttgctaaatccaccatttctagtctttgatacttgtttagatcccatcacaaaaccaaattcaaacttcgagtgactgaaaaaatgaagaaagtacaaaactttatcaagtacagactgaaaccaagctaacggaattatgctcgactgtgtaatgagctaaagattcctttttttttgtcaaactgagctaaagattccaaattgtcatagagcaacttgcaaattgacaggaaagcaatgaaattgggagtttacaaagctcaatcggtaagcgagtgagagaatcacaatgagaggaataagagaattacggaaatgccacgagcttcgaacacttgggttaggtcgaaaattgcaataaaagagaagaagagaggcaagtgggtactaactcaatgtagcatcaccgccgctaaaagccgaatcgcatgcaaaggattatgatgatgcaagagagagtgagtgattacgtagaagaagaagaagaagaggaacttaaagaagagaaaagcataatcatcattaaaagagtaattagttagatgattgcgattgttgtgtaaaagagtgtttactttttaataataatctctcgcttgcctttgaagtttgaagtgataatacccgagtttcaattgtttattcgttcttctcttaaactgtaatcaccaaaacatcattaagagataaagataagagaagaatcgtatacgtacacatgtacaattgtacgtatttgccttcacggatttttctatgtcataaatagctataaacttctaaacttttgttgttgaatcaattatgattagataaggaagtaaattggtgtgaaaaagataaagatatggaaatgatagtaaagtagtgtatatatataaatggtgtgcaatctgtaacaaacagaatatagagaaattaattagtgaaaaaagtagaaagtgattgttacagggaatatttttccacatacgtaaaaataggtctaatatttttactttttaattccgatcttgtacttttctttttacaattgattaaagtggaaataagcttcctttattttcatcttcattgatgaaaataatgagtagagaaacattttactacctaaaatgagtagagaaatcattcctctattcagagaacaaatgtctaaaatgaactgtttttattattttgctcaataaatacataaatttggtagataaaaccaaataatcttttttaaatgctagttaattttttaaaaaagtatacatttttattggtaccttttattgtgaattaaatattatgaggttttttcatatttatatatttctttattaattttaaaatggaaaattctcaaaattccattaaacaaaaaaattctacgtaacatatcaattaacttgtgaacttttttttaattcaaacattatttttctccgttgtttcaaataatatatttgaaataaaacttataacaaaaaaaatgagaagatattttgcataatgtttttttattccaatgtttttggatttcaacatatgtattcaattgcccgccgaggaaaaataattacatagctctaaagtccaaaagaagcccaatctttttttattcgttcactcactactctcttcactcgcccaaactctgcaaaacctctttcgatttcaaaaatcaaattcaccaaaaaaacttcgaagaacaaaaaaaatccaaaaaaaggtgaaatcgaagaagaagaaaaaaaaggcaaaagcttgaattgattatggaagacgacgatcagcagaaggctgcagatctagtacaagagcttgttcttcgtctcgtctcacaaaaccctcaaacccctaatctcgatcccaattctcccgccttcctcaaaacccttcgttacgcttttcgtatcctctctagtcgtcttactccttccgtcctccctgacgccaccgctatcgctgagtctctcaaacgccgtctcgctactcagggtaagtcctccgacgcactcgcttttgccgatctctacactaagttcgcttccaaaactggacctggcagtgtcaataacaaatgggctcttgtttatttgcttaaaattgtttctgacgatcgtaaatcggctataaatggtcttgattcctcggttttgttacctaatttggggattggtgatactggtaatggggttttgagccgtggagaggctaagaagaaggattggagtaatggggttttgttggttagtaaagatcctgagaatttgagggatattgcgtttagagagtatgccattttggttaaggaagagaatgaagtgacggaggaggttctagtgagggatgttttgtatgctagccaaggaattgatgggaaatatgtcaaatttaacagtgaaatcgacggttatgccgtgcaggagtctgttaaggtgcctcgagctacgaggattatggttcgtatgctctctgagcttggttggttgtttagaaaggttaagacttttataactgagagtatggatcggtttccagctgaggatgtgggaactgttgggcaagcgttttgtgcggcgttgcaagatgagctttctgattattataagttgttagctgtgctagaagcgcaggccatgaatcctattcctttggtttctgaatcagcaagctcaaacaattacctttctttgaggaggttgtcggtatggtttgcggagcctatggtgaaaatgagactgatggctgttttggttgacaagtgtaaggttttgagaggtggggcgatggctggggctatccatttgcacgcacagcatggtgatccgcttgttcatgattttatgatgagtttgcttcgatgtgtgtgttctccgctatttgaaatggtgagaagttgggttctagaaggggagttggaagatacttttggtgaattctttgtcgtaggtcagccggttaaagtcgatttgctttggagagaaggctataagctccacccagcaatgcttccatcttttatttcaccaagtctagctcagagaattctgagaactgggaaatctataaactttcttcgtgtttgctgtgatgaccacgggtgggctgatgcagcttcagaagcagcagctgcctctgggacaacaactaggcgaggaggtctcgggtatggtgaaacagatgcacttgaacatcttgtaaccgaggcagcaaagagaatcgacaagcatctgttggatgttctatataagagatataaatttaaggagcattgtcttgcgattaagcgttatttactacttggtcaaggtgattttgtccagtacttgatggatattgtaggacccaagctttctgagccagccaataatattagttcatttgagctagctgggtttcttgaggctgcaatacgagcatcaaatgcacagtatgatgaccgtgacatgctagacagattgagagtgaagatgatgcctcatggcagtggagacagaggctgggatgtattctcattggaatacgaggcaagggttccattagataccgtgtttactgagtctgttttgtctaaatacctgagagtgttcaattttctctggaagttgaaacgggtagagcatgctcttatcggaatttggaagaccatgaaaccaaattgcatcacttcgaactcatttgttaagcttcaaagttcggtgaagttgcaattactctcagccctgaggcggtgccaggtcctttggaatgaaatgaaccattttgttactaactttcagtattacatcatgtttgaggtattggaggtatcatggtctaatttctcaaaagagatggaagctgctaaagacctcgatgatctcttggcagcgcatgagaagtacctcaacgccattgttggaaaatctcttctgggtgaacagtcacagaccatccgcgaatcacttttcgtcctgtttgagcttatattacggttcaggagtcatgcagatcgtttgtatgaaggaattcacgagttgcaaataaggtgtgttttgtcttttatattcaaacaaaagtagaccttaaactattgctcaaacattttcctctgattttagggtcacaatttgatctctaatatcaccgatttcctgcagatctaaagaatcaggacgagaaaaaaacaaatcgcaagagcccggttcatggatcagtgagggtaggaagggcttaacacagcgtgctggagaatttctacaaagcatgagtcaagatatggacagtattgcaaaggaatacacatcgtcacttgatggattcctatctctcttgcctctgcaacaatctgtagatctcaagtttctctttttccggcttgacttcactgagttctacagccgattgcattccaaaggataagaaagttgaaagagtatcaggtttagttgaaaagcatattgcacaatcgcaagagaagaagacattatctacgtctttcactaaccgctgactgcagcatgggctctcctgaaccagggatgcagaggttcttttcttaaaatctaggtgcgtgggagaatctgtttcttatttagagactgcctcatagattttctgtcttttgcatagattgttttttcaatggcttgtttcaaagtttaggattgggaaacagattctttgtgttggtaaattggggaaggtttgtgtttgagtttgtgctataagtctgatgatctccagctttagttttttttcttcttctgtggttcactgatttgtatgatttgttttatg

SEQ ID NO: 1408 - DNA, 81277 bp, Arabidopsis thaliana
gatcgcaaagattactttaatttcttcattttgaggggctttggcagcctcttctgacaacagtttaaaagaccttgattgttgtgccatctcctctgataaagtcttttgctgttccctcagtatttccatctggtcgatcatttttattctagtctgggaacaagtacacaatgccttaaaatcgtacatcacttgttcaaaagaaagctcaagaactgtgaaaaaatctcaatgtacctcaggtgtctcaatctcatgaaaactgtcttcatgagcttctctattctccatagtctctataatttgatctgccaatgcggagccttctgaaagtctagattctgtatgaaaatcactgccttctccttgaggagttgacggtgtactgttggacttgactgcactcgacttgtcactgaggcttgatccccccaaactgctgtcttttttctgatagtaaacagtaatgagagtaaaggtggcaaaagagagacccccaaaaaagaaaaaagaaaatctaactaagaggaaatgaagctgtgtgataaggagcataatttttataaagcacatacgaatgctagatatatgatgcgcaggagactgtatacaacagtatagtaaacagtaatgagaataatgagagtaaaggctatgatgttgaggaaaatgctccgatttaaacaagagaagccaacggtaaaagtttatcaaagcatataaattctacaatcaaatgtgtaccttaattttcaaccagttcagtaggccatgcttccttgtcttcttttcttctataaacgcatcatctataatctcaggagtcccttcacgagaaacatacaattcaaggttctcatcatctgtcaagtcgcgcctcttatgcggtaggtaagcaagctggccatgcattatcaactaagatcagccaaaaaaatagtaattggcagacatgattttgggaaatgaagagttatgttttatattgttttgtaaaataggtctaggctagaaaagtgattctacctcctcttctccgaatgagtgtctcctccgaggatcagcacgataagaaaaccgcgatgtttgtggagttttattagacacgagaattagttttgtcagcctttggattcgactcaagagagctgctttagcatcttcctcttcttctagcttttataatcacatcaaaagaaaatcatgcaaagcagatttcaagtctccacaaactgaagcttggtacagtaaaagtatcattggtttgttgaaaacatttaaacaggggtcaatgcagaaaaacatactttctgcttcaggagaacaatgtcgatatcatctccactgatatcctttagctgagaaactggtttaattccttgtttaagctgttccagctcctccttgagttggcgaatctcgtattggtacttcttgatcaatgatttctcatcaattatctgtagttttataaggttagaaatccagaatgaatcttcagtacagacatgcactaagctaaaaggatagatgtaaactaagaccttgttctgtgcggcttgaatctcaatatgctttgcacgatgagcaaacttcaatgtgttgtgtgtttcttcagagttgcttgatgcaggtgtcactgtacatatgagctatcatattccagatggaacaatcaatcagttaaatcgatcataacaattgttttctgctgcctatgttcatgttgtgtgtgtcattaattggaacaagaagctaaaacagatctctgacaacacttacagatacacgtccatgaccactcagtgaggactcaagcagtctggttaatttagagtccctatatggtacatgactagcccttctatctgtaagctttgatattacctacaaaattgcaaaagaacgtaccaacttcagcttttgggagattacttaacataatgactggaaggcaaaaaaaaccaaccaagcttttcagctgtaaaggaggtggaaaaagccaaagaagttcttaaatttcaactaaattcgaaaaactattgttgcttgggaaaaacagtgagaaccaagaactcacggtccctaaagttagcaaacttttatttatataagacccttccttgcgccttaaaccgctggtttcagcttttgagctctcagaacctgccaggtcaatgaggttctgcagatataagtgaaattatgagcagttaatcagttgttcacctttaagtgttcaaagagtgcaacaataaacagtttatatagttgattatgctccagagttgaagaaaaagtaagctataaccgaacataaaattacaggataagaacaaagatgttataccagctgcgagaggtgtactgctccaccttcattattgtcacccaagggactactctctatagtctgcaaccaaaccagttataacatctttcaaaaactttactgatagatatgaaaagacagccaaactgtatacttacattactaaacaggggaaagcaaaatcaaataaataaatctatctatgctttgaaagagaaaaataaacataccagggtaaacattgtatggcttcggctgctgagcaaattaaaacttgtggatccaatatgtcggtgctctgtcatcaaacgaaaatttaatcaagatgacttgcatgataaacataagaatgaagaaaaaaagtagtagatttaagagaaggattaagaatgaagtgaaaatactagaatcaagaaagagatgctagtcttcagaattgctatctcatatcacataaaataccccaactggtaaaggaaacactttctgacaaagaaatcttatgaaaatttacatggaaatgcctaccttctccagctgctatgagagaaagcacatgagcaggggacagaacaacctcttctttaatcccttcaatataggttccctataatcagcaataaagagagaatcagtgcagaatttaagagggaaagacacttaatgcaatagaggtagtcatgtttattctaaaattcttagcccaaccaatagtcaacaggtacaaatctagtatacttgaataaaaaatgtgatccagaacattcaaatatagatagataatcatgccactttgcacattatttgcaggatctcagagaatttcatttatattaaaatggaacaagtactttcatgcatctagccgagaaaagatgtatcctctaattaaacaaaaatggtgtgctaggatttaggattctataatgaatatagtcccaacaaagatattatgagacagtgaaatccgcgctaagcatgttaccaacagaaagtaaataagaggatcaaatgctgaaacaagtacctgctcatcttctctgatcctcaaattttgtcctgctggattcaacaaatcattgacaacctgaagcaaaatgaaccctagggatattaagaaaaatcaaaaccagaatctgactatcaatcaacaccactggtaaagttgacgggagggaagaaaagcaggcagtgagtagcacctcgttataaatttcaaagtaggaaacacgtaggagaaattctcgccttggtgtctgcgagaaaaatgaaaagtgtgatttaactagcacttaggccaggacattcgactaatcaacatcctaagaagtacctcttgtataatgctgaaagcatctttcacggctaatggtattataccaggagatctttggttcccctgacatttgaaccaaacaaaactttcttcatgagataaaatagttcttatttcatgcacatctttaaaggtaaacatggactctacaatgaagtgtgtaagatcatccggcattagggcagggccatgtattgatcatggctgtcataagtgaaaaattatagaaggttgcaaagtgtaaagcaaagaactaacttaaagagtgcagccatatgctaaatttagtaaaagaaaaggctttctagggtcaacaaagaaaccctaactagaaggaatagccaaatatctaatataaacgatatatcttaggattcaaacatcgagttctattgctaatcattatggctactaaaggagagaaactttgttcctgaactactcagtgatttagccagaaaagaaggaagaggtaaatgactctctgacagataagcattgtctgggatgacacattgaagtacattgtacaaggtagtaacctaatacgttctattataataagatgaaaagcaagaaataacatgattagtgaatcttacatgcattgtatgagttttcccactgcttgtcactccatatgcgaaaatggtccctgtggttgaattaacactcaaagtcactacaataaaatcaaattggcaagaaaatctaacttaaagttgttctagagactagaacaagcactagatagagtttggcaactcaaagatctcattttctaaatgaatggtcatgcaactgttcatggtactgtagctcgggtaagcttgatactaaaaatatctttttctcttctaagaataaagtcttaactagagagggcaataataagtgtttagtccataccattgacccccgccatagcaccattaacgacatgctgagcagcaacatcatagacattgcgtgtagtcgtagtaggcccgaaaacacgatctgcaagaaaggacaacagaaatttcaagaaaaaatatggcagattggaccttgatatctagtttaatttaggtcttgattcatgatgcatgaaacttcaatccattccacagaacaagatttatgatggttacagaaactcatgaagtcatgaacactagtcaaactgttaagactaaccataggcataagctattgattgattattctcattccgcactatcgtttccccatctgcataccatgcaatctcctctcctttccggatttcccttggactaagtgaagcataaaccaatgtcaacaatccacagaacaaacatataaaactaaagtgtttgaatcctacacaaaagaaatcaacatattcacctgagtggacgaaaacgcacagtgacagtgacattttctttggactgcaaaggcttaggtggtaactgaggcttgcttcgaaccgatgaagaagtaggggagctatggctatctacagacgcctcttgataaagttttgaagacgaggttgttgaagatgcagaggactcaacagtctttaacttgctaaatccaccatttctagtctttgatacttgtttagatcccatcacaaaaccaaattcaaacttcgagtgactgaaaaaatgaagaaagtacaaaactttatcaagtacagactgaaaccaagctaacggaattatgctcgactgtgtaatgagctaaagattcctttttttttgtcaaactgagctaaagattccaaattgtcatagagcaacttgcaaattgacaggaaagcaatgaaattgggagtttacaaagctcaatcggtaagcgagtgagagaatcacaatgagaggaataagagaattacggaaatgccacgagcttcgaacacttgggttaggtcgaaaattgcaataaaagagaagaagagaggcaagtgggtactaactcaatgtagcatcaccgccgctaaaagccgaatcgcatgcaaaggattatgatgatgcaagagagagtgagtgattacgtagaagaagaagaagaagaggaacttaaagaagagaaaagcataatcatcattaaaagagtaattagttagatgattgcgattgttgtgtaaaagagtgtttactttttaataataatctctcgcttgcctttgaagtttgaagtgataatacccgagtttcaattgtttattcgttcttctcttaaactgtaatcaccaaaacatcattaagagataaagataagagaagaatcgtatacgtacacatgtacaattgtacgtatttgccttcacggatttttctatgtcataaatagctataaacttctaaacttttgttgttgaatcaattatgattagataaggaagtaaattggtgtgaaaaagataaagatatggaaatgatagtaaagtagtgtatatatataaatggtgtgcaatctgtaacaaacagaatatagagaaattaattagtgaaaaaagtagaaagtgattgttacagggaatatttttccacatacgtaaaaataggtctaatatttttactttttaattccgatcttgtacttttctttttacaattgattaaagtggaaataagcttcctttattttcatcttcattgatgaaaataatgagtagagaaacattttactacctaaaatgagtagagaaatcattcctctattcagagaacaaatgtctaaaatgaactgtttttattattttgctcaataaatacataaatttggtagataaaaccaaataatcttttttaaatgctagttaattttttaaaaaagtatacatttttattggtaccttttattgtgaattaaatattatgaggttttttcatatttatatatttctttattaattttaaaatggaaaattctcaaaattccattaaacaaaaaaattctacgtaacatatcaattaacttgtgaacttttttttaattcaaacattatttttctccgttgtttcaaataatatatttgaaataaaacttataacaaaaaaaatgagaagatattttgcataatgtttttttattccaatgtttttggatttcaacatatgtattcaattgcccgccgaggaaaaataattacatagctctaaagtccaaaagaagcccaatctttttttattcgttcactcactactctcttcactcgcccaaactctgcaaaacctctttcgatttcaaaaatcaaattcaccaaaaaaacttcgaagaacaaaaaaaatccaaaaaaaggtgaaatcgaagaagaagaaaaaaaaggcaaaagcttgaattgattatggaagacgacgatcagcagaaggctgcagatctagtacaagagcttgttcttcgtctcgtctcacaaaaccctcaaacccctaatctcgatcccaattctcccgccttcctcaaaacccttcgttacgcttttcgtatcctctctagtcgtcttactccttccgtcctccctgacgccaccgctatcgctgagtctctcaaacgccgtctcgctactcagggtaagtcctccgacgcactcgcttttgccgatctctacactaagttcgcttccaaaactggacctggcagtgtcaataacaaatgggctcttgtttatttgcttaaaattgtttctgacgatcgtaaatcggctataaatggtcttgattcctcggttttgttacctaatttggggattggtgatactggtaatggggttttgagccgtggagaggctaagaagaaggattggagtaatggggttttgttggttagtaaagatcctgagaatttgagggatattgcgtttagagagtatgccattttggttaaggaagagaatgaagtgacggaggaggttctagtgagggatgttttgtatgctagccaaggaattgatgggaaatatgtcaaatttaacagtgaaatcgacggttatgccgtgcaggagtctgttaaggtgcctcgagctacgaggattatggttcgtatgctctctgagcttggttggttgtttagaaaggttaagacttttataactgagagtatggatcggtttccagctgaggatgtgggaactgttgggcaagcgttttgtgcggcgttgcaagatgagctttctgattattataagttgttagctgtgctagaagcgcaggccatgaatcctattcctttggtttctgaatcagcaagctcaaacaattacctttctttgaggaggttgtcggtatggtttgcggagcctatggtgaaaatgagactgatggctgttttggttgacaagtgtaaggttttgagaggtggggcgatggctggggctatccatttgcacgcacagcatggtgatccgcttgttcatgattttatgatgagtttgcttcgatgtgtgtgttctccgctatttgaaatggtgagaagttgggttctagaaggggagttggaagatacttttggtgaattctttgtcgtaggtcagccggttaaagtcgatttgctttggagagaaggctataagctccacccagcaatgcttccatcttttatttcaccaagtctagctcagagaattctgagaactgggaaatctataaactttcttcgtgtttgctgtgatgaccacgggtgggctgatgcagcttcagaagcagcagctgcctctgggacaacaactaggcgaggaggtctcgggtatggtgaaacagatgcacttgaacatcttgtaaccgaggcagcaaagagaatcgacaagcatctgttggatgttctatataagagatataaatttaaggagcattgtcttgcgattaagcgttatttactacttggtcaaggtgattttgtccagtacttgatggatattgtaggacccaagctttctgagccagccaataatattagttcatttgagctagctgggtttcttgaggctgcaatacgagcatcaaatgcacagtatgatgaccgtgacatgctagacagattgagagtgaagatgatgcctcatggcagtggagacagaggctgggatgtattctcattggaatacgaggcaagggttccattagataccgtgtttactgagtctgttttgtctaaatacctgagagtgttcaattttctctggaagttgaaacgggtagagcatgctcttatcggaatttggaagaccatgaaaccaaattgcatcacttcgaactcatttgttaagcttcaaagttcggtgaagttgcaattactctcagccctgaggcggtgccaggtcctttggaatgaaatgaaccattttgttactaactttcagtattacatcatgtttgaggtattggaggtatcatggtctaatttctcaaaagagatggaagctgctaaagacctcgatgatctcttggcagcgcatgagaagtacctcaacgccattgttggaaaatctcttctgggtgaacagtcacagaccatccgcgaatcacttttcgtcctgtttgagcttatattacggttcaggagtcatgcagatcgtttgtatgaaggaattcacgagttgcaaataaggtgtgttttgtcttttatattcaaacaaaagtagaccttaaactattgctcaaacattttcctctgattttagggtcacaatttgatctctaatatcaccgatttcctgcagatctaaagaatcaggacgagaaaaaaacaaatcgcaagagcccggttcatggatcagtgagggtaggaagggcttaacacagcgtgctggagaatttctacaaagcatgagtcaagatatggacagtattgcaaaggaatacacatcgtcacttgatggattcctatctctcttgcctctgcaacaatctgtagatctcaagtttctctttttccggcttgacttcactgagttctacagccgattgcattccaaaggataagaaagttgaaagagtatcaggtttagttgaaaagcatattgcacaatcgcaagagaagaagacattatctacgtctttcactaaccgctgactgcagcatgggctctcctgaaccagggatgcagaggttcttttcttaaaatctaggtgcgtgggagaatctgtttcttatttagagactgcctcatagattttctgtcttttgcatagattgttttttcaatggcttgtttcaaagtttaggattgggaaacagattctttgtgttggtaaattggggaaggtttgtgtttgagtttgtgctataagtctgatgatctccagctttagttttttttcttcttctgtggttcactgatttgtatgatttgttttatgacttggttgatataagaaggaatcagttgcttcttcataatgtgtatctccatagtgtaaaaggctccaaactctgaatttttcactatctagaagcttctgtagccacggcctgagattgagcacaagcattagctcacagtgattttaatccgcaagcctttctcttgcaattaagaagaacctttgtgatactcttcctctcatccacattgatctatctctgtgtgaatgaagcatatgaacaacaaaaaacaagtagcttttggcaagagttacagtctcaaaatctaaagcaatcgtgtccaatttaaaagaaaaaacaattcacggttgtcgattaatttgcaagtgcaggccaaactggaggttaacatataaggaaaaaaaaaaggtgaaaaaattcgtcgcctgagagattcgaactctcgcggggaaaccccatttacttagcaggcaaacgccttaaccactcggccaaagcgacgatgatgctcaattaatgaattgattaatttaatcgttaattgaaattattagtataaaatagaaatcaaaatgtgaaatttcttccaaaacattagcttttcattcactcgtagaacttgtaatagagtagctcatttacttgccaaacatggttgtcttcaatgtaactactactctgattatgcttgtcctcctaattgaatggttgaacaattgtaccttgactttagccattcttaattaacaaagctcaatctcgacgaaaagaaaaaaaaatgtgaaatttcttgattatcaaaaaaaggagtttttaagtttgaaattgtataaagaaagaaaataagaaaactgactgtacatattaattttttttaaaagaaaaaaaaaaggtaggaaatgaaaaaaaagagagaactagacaaatttgttgatcaattctctaacttcttcgatgacaagccatcctttgtgacctccaatcacctcctctttcatctcatcttccttccataactgcattcaccactcatttttctcattattatgttaatttactttttcactattactttattgtcaaatgcgtatcaagaaactcaaaatactgatgttgtattagatgaaagtaagcatacctgaatagtaggcattttctgcataacacacgaatatggaagtaattggttcagatttggcacataccacatcagaaaagaaggacaaaattatgtttaagcattttaccgaaatgtttccacgtttcaccaaggtttgagggaccttgtttacatccacatagtaaaactttgctctgttgtaagaaaaatcatttttgttcacaatataatcaacctttgcaataacatccatgtaaattgttgattcttttgttagcttaccggttattatattctgccgctaatttctccaacttaggcttcaagtaaatacattttcgacaccaagaagccatcctgcccaaatatttctcacaattcttcataaccaaacatatataaaggctttgattggtgtgtggttgagttgtcaaaaataaagtaaaaatccggcaaaatgatcttgcgacttgcgagaaaaatataacctagcaagaaaactacaaaaaatattgaactcctttgatatccatcattataacaaaagagagttcaacaaaccaatcggagccgggataaaaaaaaaacttgaacgcatttttgtatgattttttagttaacctaatttttccgtaagtgttgaccatgctctggactagctttcctatagagaaccaaatctaatttggattgtggagattggataagatatgattttggtgtgtttaccattcgatgatgataggctgagagagttggcgtgcgtgagagagaacagcatcgagttcttcaacgttgttaatgggttccatctccaaagtcgtaggctgagctatgtttgaccaaaaggcttttagtctccactctttctccatatgtgacctcccaagcttttcattactgtaaacgctcacacaaaacccacacttcttctccaaatttaaactctctttcctccacaattgttccttcttgttaccgtgagcttgtctagttagcatttgggggtttgatgccaaagctgccattatttttttcgctttcagtaaattttttgtcgatgaagatatgtgacgagatatttttaagttttcaaatgccataattaagatattttttttgtttttgaaagttttgggaagagatgtgaggagatggatagagagcttatccggaagatgagttggacaatgccaacgatgtgctactggtgggggctacctttctctcattgtctttataatttgttttaaaaatgtatattcttaaaatgttaatagtgactttattagttttctctatgaaaaaggtaaaccctgaacttataaactctaggaaaattattttggctgttcatatttatataaaattgtgttttttttttcctttctaattaaacctcgtctaaatgttaaatcaatctaatttgttttattttctcaaatttggtcgctcggttccacaaaaaaaaaaaaaaatcgttccgttcacattcctaataatattgaacataaaatacttggaacagaaaaaatcactgcctcaaatggattagaaacgttcaaaactatttaaaactttgtgttaatcagaaaaccaaataaagaatagccaaacttgtgacggtgcattgatctgaatatgatgccttgggaattccccacactatttcgttaattttcttgtcttcaattaattatccttcatagtttatatactctcggacttattacgtataattatgtgtttactataaataatcattcgaagacatagctatatataaactaatatagaaatcacatacttatgcttgtcggttataatcgatctctctaatagagttggtgaagtacgtttgaaagaaaataaaggccgacgtttagagagtcgaaattaaacaagtagagtccacacgctaaggactttaataaacgcgaattagaattttgtattttgtcaagtactatcctaccatacatttttgatttcctctttacccaaacctgccaccttacttacctacaaaattaatatttactcatcagaaatagtaaacataagatacaagataaaagtctttgttgatataaagttttaacattaaaccaaaaaacaaagataaaagacttgagtcacagatatatatatgattcaatctatagttatatacgattttgcgtttgaaaatgtctttaatcgagtaatatattccctttttattttcaaatctcgactaaaatatactataaatagattgtgatatcctaatatgtatcgtgattttatttcaaccgcattatttccggataatttagttagatagatcatacaaattacacctttcaaggacattagcaacgaacaattagtaacacaaccactaaccactaatccttcattaacataaataaacattaaacattaacgataataaaagtgtgattaaagtgagatatatatagataggggcaaaagacagtaattaaaattcgaatctcgaacacaccgacacgcttctttgaagtggcattttaagtaaataactccaaaaacgaggggtattttaatttgaaactcatcactttaagtcatccccttaacaatgtcgtctaaacaaatggtccgttaacgaaacacctttctccattgttcttaaaaagtcatcttcttttttttttttcttcatacatctctctctctctcaaccctaaaaccactcgtcacgcgccacgaactctacaccacattccccactactagtgaccatccacctctccgtctatggcgtcagacgccgttaagtatatgccaatccacggcggaggaacaacagcaacaaccgccgccgacatcaagagcttcttctccgctctaaaacccaaaaaaacctcaactttcgcttacgctttcgtcataacctttgtctcattcactctcttctttgcttttagtccttctccaaactcatcttctccttggttctctaacatcttcacttcctcctccacaaccacaacttcagacaacacttccggatctcagttctcttcaattttctcatatattcttcccaatgtcacttcaaccaaacccaccaatagatccagtgacgccacagattctctctctgttaacgccacttctccacctctcaattcgaattccaaaaacggaactttacaaacaccggcgccggaaactcacactccggttgctaaaaacacaacctttgagtctccgatcgtaaacggaaccaacccagatgcaaagaacaacacttcatctcatcctctgctttcagacaaatcttcaacgacgggatcgaataatcagtcacggaccaccgccgatactgaaaccgtgaatagaaaccaaacaacatctccggcgccgtcgaaagcacccgtgtcggtagatctgaagaccaattccagttccaattcatcaactgcttcgtctacaccgaaaaagcagactaaaaccgttgatttggtttcgtcggtgaagcaagagatcgagaaatggagtgaatctttgaagaattgtgagttcttcgacggtgaatggatcaaagatgattcgtatccgctttataaacctggttcgtgtaatcttatcgatgaacagttcaattgtattaccaacggaagaccagacaaagatttccagaaattgaagtggaaacctaagaaatgtagtttaccaaggttagttttggtcggaacagttctcaaaatttaatatttagccttaaggctctgaaatctaataatagatcaatatgtgaaggttaaatggagctatattgttggagatgcttagaggaagaagacttgtctttgtgggtgattcactaaataggaacatgtgggaatctctggtttgtattctcaaaggatcagtgaaagatgagactaaagtctatgaggctagaggaagacatcatttccgtggggaggctgagtactcattcgtcttccaagtaaggcttttcttcttaatttgcttatagcccaattggttctttatacttttatattaaaagttttcaatttgattgataggattataactgcacggtggagttctttgtttcacccttcttggttcaagagtgggaaattgtagacaagaaaggaacaaagaaggagactttaaggttggatttggttgggaagtcctctgagcagtacaaaggagctgatgttattgtctttaataccggacattggtggactcatgagaaaacatccaaagggtactaaaatctctctcaatctactggaatatttgctctgtctttgtttgtgttgtataatgtagaactgattttggagtttgtttcatagggaggattattatcaagaaggaagtaatgtttatcatgaactcgctgttcttgaagcttttcgtaaagctttgactacatggggtcgatgggttgagaagaatgtgaatccggcaaagtccctcgttttctttcggggctattccgcatcccatttcaggtaaacgcagaccgtctttaaatctgcttatgtagagtctcaatcatttaggtctagtctaaatcttgacacttttggaattgttttgcagtggtgggcaatggaactcaggaggagcatgcgatagcgaaacagaaccgatcaagaacgatacatacctaaccccgtacccgtctaaaatgaaagtgcttgagaaagtgttaagaggtatgaaaacacctgtcacttatctaaacatcacgagattaacggactacaggaaggacggtcacccgtcagtataccggaaacagagcttatcggaaaaagagaaaaagtcgccattgctgtaccaagactgcagccattggtgcctccccggggttccagactcttggaatgaaatcctctacgctgagctgatcgtcaaactcaatcagctcagccaaacacaacgaaaaacttaaggttcttccacccccaatacttgtttgatctcaacacttttactttctattttgatggtaattgttgattatagaatgtgtagagtaaaaaagaaagatggaatataatggatcactcgatatctttgttactattggtttgtaaatgcttttgtcacgacgaatacaatatttagctccaaagagaggttacatattcatatttcttataatggaattgattccacttatcgttactctctaaatatttgatgatctaattagagcttggttttgctttgtgctttcgattgttttaatgtctataatgtgaacgcaagaatttgcatttggaaccatcgatgtgagagtttggtgtggaatttgtggatcaccgacaattccgacaattaaatgataaagaatttgtccatttgggggaaataataggagtcgaagataacgggtttggtcagaactcagaactcagaagacgtttcacatgggatgtttggactttttgactatgaaggactttaaaaaaagtcagttaggtcaaatgcttttatgagttaagaattgcaattagatccaacctggtgcagttgttcgtcacgtggcgcacttgtttacctattaaagtctgttacaatcccaagtatagtacaggatatagtattgatttaaagagtcatacatgtgactatttggttggagaatgggaaaaacacaagtgtttatgtttgtgtataaagtaagattacagatgcttaaattgtcaaattgatgaaaaactggaaatatctgaagaaactcacccgtacacatttactcttttatgaaaaaaggccatagcgtaagcaccaaaatatacaaaattagtagtactacattttaagcatccaacaatttgtgacctccaatggtgatcattccaagaaacttctttaggaatagtttttataaccacagcaaattaaactactaacacctccttaagttatttgataagcgcaataacagtgcatggtacatttgattataacatgagttcatcaaagtcttcattcctaatgagaagttaatgacttaagacttgggaaagttatgagaaatttgcgattttctgacggaaatgaatgaaatccgtcccaaataataaacttataaggatctgcaacaaaaacaacttcattccagttttctcattgaaaatcaactttcactccaaagccgctgtaaattttgcaactgttttgcaaaaaaaagttatgtaatgaaaatttgcatagaaattttgcaactgactgaagactttaattttgtgatttattatagagaaacatgtatcaaattttgtaactgaccaaaaccaaaaaatattgcaattttccaagacaaaagaaaaacctagatcaagctgttttcaatggctttaatcccggtttaaattgattgcatggggataccaatcttatcctagtgtgtctttacaaacgcaatatgcattaagattatattcgctttaatcctaaatacgacccactatctaaacatgttgatattatcttgccatacaaaatgataggatctaaaactcacaaatcattgatccggttcacatgcaacccatatatgctatatgaaacctgaggtatgaatataagtaatacaataattgcaaaattgcagttttagaaataagagttttgtttaaaaacacatgttcctcttctagctattcatatcatgatcagtcgacgccacccaacaaaagacatcatctcaatggggcttatacatcaatcaaactttgttttgtgtgaagtagaggacgaaacaagatagtagatacaacttgcttttctcgtgttcttctacatgcaggaacagtctggcgcatgttcaaaagagaattaatcgcctaaacagtacatcattaatgatacaatcttgtgactgttctcgtcttgtgttaaaggttctctattgtttctccctacgatgtatgcatgctctgattaacgaacgttgacatgaaaaaaccggtttgttaattatcttcatatttcttgtaaaaacgctgttttgtttaaattaaaatgtatcaacctatatataacattaaagaaaaaaaggaagaaaaataagtttaataaatttaaaacacgataattaaacgtatctagtgaagattttttgcacgacaaacccttttgctttaatcacaaataaaagtctataagatcaaaccaaatattttccccttttccttttgtcttcttctatattcctctatcattcaataaaacatgtcaacccttttgctccatctgttttttatccggtcctatctaagaaaaacaaaacactaaccggataatcaatctattcgtctttcaaaatagcggtctctaataaaatatgaaaagtaaaataaatatatacacaagaagacaacttttaaaaccactctagctcgaccgtttgctcaaactgtatttcgcaggtgctttcatgaaacttgtttggccggccgaggcttaaccggaatcaatgatgacgtggacaaacagaggttgtgggcagctgacgtggagggctgtgctgctgaagtggcaacacgttcacaagaagggcacatagtgagagtagtggccggaagttgcatgtaaaagggtgtggaagtcttcaaggttctcaattctttaacctctttttgaagcctccggttttcttcggttagtgactcacagcatctctttaggtattcacagtccacttccgtttgcttcagctttgtcctattatcatttatcaatcacataacccccaccaacaatatgagactttgtttttgtaaagattaaagaagacgtttttttttgggttcaaattatataaagaaggattatgaatttttttctttttgtgaataagtcactataagcaattatatatggaaatgatgagcggaagtgatatactacttttgcacgaaaaatgacaaggatagacatgcgacaatttgttattattactcgtgatgcatttttcgtcctcatccctcttttcagaaattaatcatagcaaaaaaatatacttccaatgaagaaaataaaccgtttacacaggaagaaaatgaagataaataattaatgatataagctaacctggctcgtctgttttgaaaccagacttcaacctgacgaggacgaagattcaactgcttcgccaatgcaatcttctgtttctgcaatgttttagaaagaaaaaaaaaagcattaaggctaaaatttggtactaaaaaaatagaataaattcaagaaagacaaattttaaataaataaaaactgtaaagaatgggacacgaacaggattaagggtactgtgttctttgaagctgtcttcaagaaaagcagattggtctttggagagtctaagtttcttcctagtggatccattctcgtcatcgttgtcttcgttgctggctcttgaagctgatctctccacttcatcatcaatatctctcttattgcttcttctctcataaccataacttttaatcccaaagtccaattgaaacgacgacgttacactatccggcggcgatactgacatactaggcaccgcttcctcctcctcctcttcctcctccacaaccgtagctgctcctaagggcattcttcctccttgtcgacctgtaaatttggtttattaaattagtatattgtttctattgtaatcctgagcgaatattcaaactgatatgtgaaaagttaggtattcttgttaatcaaatacatccacaatagatattttttttctttggatttaaataatactttaattaaaagatggttcttctttcttgtcacaaatcagtcaaaacatttttggaaaatgatttcaacatcccatcgacacatttaagccaaatcggactctctctatatatatatccagaaaagatattaatattcttatagtcgtaagaaaaaaaacatgtaagccaaattagggattctaatataagaaatcgaatgttatgaataacatcgactttcttttgtttcttttgtgtctagtgtgtacgtatataatcacaccatttaagtaagagaaattatagccctatgcccattttttattttaaaatataaaaaataaaataagaacctttactgttctcagggagccaattagggaagtgaagctgaagctgtaatggtggatctacagaagacgaaaccctaaattcgtcagatttttttgctctgggcgccggtttcttcttctcatcctctaccgacggagacgaagaggatgacaacgatctgtgaccaccaaaagcaacatctaaagccatgcagaacccaagatccttctcggaagtagatgtcgacgagacagagggattattaatcttcgagttcttctccataaaagagaactgtttcttagtattgtcgcctagagacaacgctagttccatctcttacgaagaaaataagagttttagagagagagattgagagagaggaacaagaagatctgttgtggccttatggagtggtgacatgaaagtgaaaccccacttatttatttcctatgttcaatgtatttaaataatattatttatgtatatgaacaaatattggatcttcatcctataaattccttaagacatgtgatttaagtcatcattctttttagtggtatatgaatagggcatgtatttatgtaattatatattttttaatatatgtgaacaatgtttcaaatttttttttgtggaaagagtatatctctaaccggtcaaatgataatcaactttatatgccaaagagaatataagaaaaaaaattatatcaaaaaatgaagaaaacatgagatattttcctttttttaatttcttgtcaataccgagaaatgtagtgtattttggggttgatatggatttgggagattgaccgacaaccgccattcacatacgcacgtgaatacatataaatgtataccacattcttacacgagactggcgccttgtgtgtttgttattaacccctctctatattttccttatgtttgtttttattctacaaggaatcagtttgttttcatgacaatcaaaatttcgtatgcaatacttccatttcaagatacttccaaattttatggaaaaaaaatctcagatagagtgaaaattgaatttataaagataaatacatatctgagcatgcaaaaagcaactatttctataaagcttatgattttcggagactcgtttaattagtccatcgatcacaatgcagccattgaagaagatcggctaaaaaacagtttcatctactttttatttttgctacatttttagtactccacatattgaagaaaccaattaaggaatcgtgatttttcttgaagatgtgagactgtgtttgttgaacattattgaagaccataattagtttgaccggccagcgtaattcttggtcacacgttaataatgggaactttgattttcttaagttttaagagatttaaacgaaagtggaagtggttggaaaaagaattagggtatataataattggaagtaaaaaaagggacatagtgacggtttgacatcgtagttaccgtttaatgctgtagctaaatttctaaatcaatggtcggtgaaaaggaaaattaaagctaaagtgcaacattttaatgtttgtagagtactaacgttttgattcacataactaaggcccgtttgtttctccatccaaatgaattatctagatagagataaaaaatgatgtttgtttttcacaatttaacatattatttggatgaatcactaggatgatccatctgaatgactttgtaaatttagacaaatttttaaaactcatttagatggacatagttgaccatttggatggagatgatttagttaaaaagaataaatgacaaatataacgtttgtaataatactaattttcaataaagtttttttattttttaaaattacatattgcacccaaaaaaaaaaaaaaattaggaaatcacggactattattttacgtcaaaattgtattcatttttccgccaaaaccgcaaaatcatattttcccgccaaaacttcaaaatcatgtttttctgttaaaactttaaaatcatgttttcccgccaaaaccgtaagaccatgttttcccgccaaaacttcaaaatcatgtttttctgttaaaacttcaaaatcatgttttcccgccaaaaccgtaaaatcatgttttcccgccaaaacttcaaaatcatgttttctcgccaaaacttcaaaatcatatttttccgccaaaaccgtaatatcatgttttcccgccaaaactgtaaaatatttttttcaccaaaaccgtaaattcatgttttcccgccaaaacttcaaaatcatgtttttccgccaaaaccgtaatatcatattttcccgtcaaaacggtaaaatcatgttttcccgtcaaaacggtaaaatcatgttttcccgccaaaaccgtaatatcatgttttcccggcaaaaccgcaaaatcatgttttcccgccaaagccataatatcatgttttcccactaaaaccataaaatatttttttcgccaaaaccgtaaaattatttttacctactaaaatgtggatgaactacaaaataatcaaacaaataaagatccatttaaatgcattatttagattaaatatcaaatgattaaacaaacactagaaacatcattcaaatgcatcatttaaatgaatcatgtaaatgaatcatgtaaatgaaaatgctaaatgatgaaacaaacaggacctaacttaatgactaggtaattgttgatattggactgatgaaaatgtttttgtaataagtttatttttgtttaatattgtaatattaaaaatgatcacgaaattattaatgaattcgctaaaccctataagatatgttatattagcagaggcagacccgaaaacataccaatcaacatgacattgtagtttaaactgaatttcataaatttatatgttttattatttttagtagttattaattataatgaatcaagtgataattttaatacagagttttgcataaaatattttttgtttacaataaatttaattattcaagatttataaaatcatatttgaaacaagacgaaatttccagattaagttaaattttacttttaagtcgtgactatgtactgttcgtttcctaactatatatggagttctgtgattttggattttgttatttggaatcagcaaaccaaggaaaataatatgatatgatgactctcgtctaatttctctagcggcggagaaacaaatgacctatatatcttgtttctttatagaaacgagacagattagtcattagcgtgactaattacataactacaaggtcatgattaagttgaattactcaattaaagggaatagaaacattatgatctgattatttacccaataaaaaggtagaataagacataatgattaacgatgatacgaagaagaagcaaaatgtgataacgatgacccatcaaacggtcacgaaaacactcaatcagtttttttctttcttttttatgagtttgaccaaaatcgttattggcccaaaactttattcatcacagttattgtcctaaaaaaaacttgattaatgtgttcttacccaacatcatcaaaaataaaataaaaaacttcgacaaaaaaaaatgaaaaagaaaaacccaacatcatcaatacattttccattaattataacttcttttttaacttattgcaagttgctttcaagaaaagttctggacattaaatagctacattattatgtgtatgaatggtaacatgtcatagatatgatagttggtttcacattagtacgttgtcattaattacaaaaaaaagtagggtctgattgataatttcatggaatagtcgaaaaattatgtaattctacgattttgttattttactgatcatgatgacattcgacaaatttgctatttacaacctaaggacaaaaatagaataaagtatatcattctgagttttccagccacacgaatttcccctctaataatttaaccttctatgtatcacataaagtatatatttctatcactttcataatcttgtactttgataatcaaaaccgtaattttgtatattttcattaacacatttcccatttcttcttataaaactcgaaacatacattttcaaaaatttaacttcataatttggactttaaaacaatgtgggatttgtcaaagtatgaattatgtttctaatgatatatatatagcagaatgtcatgagtcggccaatagctacaaaatagagttttaacatttggttatcagtcgccagattggcaccagaccagtagaaacaaaatccaagtaacattataagccgcttatttcaaatctgtcactatatagggaaaaaatttctctgattccttctacgcatatgatatagaccacatatgatatgatgatttaagttttttcatttgggagttgagttatggttaaaacataaaaagagtgtgcaaggacccacacgcgtgggacgcggatgatatcctcaactaaatattgctgtgtgtcatgcttttaggctccttgcaataattgaagtcatgcatactcttatcattgtgattattagtatttactatctcaagtttttttggcatctcaatctttctctcaattatttctctcctctctgtcctactacattcattattgcacattctgttttctttttgtttagatattacttatatgaatatgcaccatatatttttgaattccaatatgttgtgtgtgcagtgtgtatacacaattaaacaccggccggccgatgttgttcaatagatttatggcattcttagagtatcctatgtacatatcattaaatagtcttgactaaacattaaccgcttatatttatgtaacagatacgttattttgtggatagtataaattccttcactttaaaaccaaatttaggattcatacatcatattctataatatgtgtattaatatattttcccatgcaaagcatgtaccttaatactagaattaataatataaaccttttcaatttttccaatttaagagattgttgtaagcgacctaatttgaccaacccgcatcaaatccgatcgtgatttagtcagaacctaatttgaacatacaagttacatgctaacgttgattaatggcttgcctaaccgaatctaacgttgattttaaacaagatacgaactagtctatgtaccaaactattgaaggcaaaactggttgtcacagtcttgctccacggctataaatagaggccagcttatctaggcggcggctaacgaagggtgtgggcggtctagaactcaatagtataaaatagctacaatataagaatttgaagaatagtcaaaatatgtttacctaaaaattaaaagaaaataaaaaataaagaaagagaagaataaaccaaaatatacaaattaaaataacctgactaccttttcttttgtcaatgaataaaataatcttatatatctaatttcattaacggaatcttgaaaaaaacttccgctaaaactttttgtttacagaataaggtattgttctttaggttttattcatttatttttttaatttttttttggacaacgaattttattccttatgaatatgaaaacccatgttagaaaaaaagagtttgataactttttttggtagttgttgccatttacttttgacttaaggttcaaacatccatttaccaaaaggacgttgaagaggagaaagtcacgtgacaacgtgcctgatgaagtaattatggtattattgaattgatgaacgagtggggttccactttgtcttgcttgagaagaggcaaatctccacacaggcaatcatttgttcatgggacctttttttcctttcttaaacctcaagtttccgtaaaatgttattctatatttgtgcatttcttctttgttcatcttttattcttatctttgtgggcaaatcttactgttatactctgaagtgttaaaagttactattaactaaatcttcgaactaattaactatactagagagagttcaaagactagttaagatactttttactttttagctttatgtagtcaactttgtgcatcttgaagaaattaattactacattcgactaacaaaaactatgattggcgtaaaactttaacattttattttcagtacttcctctgacttttctgaaacactgaagatgactttagattaataccgtgctcttatgatttattttgtgttgctcaattttaatggatttgattcaaaactttttcaacactaagtttgtcacaaatcgttattatcgtctggtttagttaattatctcagtttttgttttaaattttcctatgacacttgtggcaacactcctaatcgtttgtaatcgacactataataccaccggtagtaacccatatgaagaattgaaccattgaaattctgactcaaagcgtacctatcacacaaaacagatcacttatccaatattaattttatttgtaagaactttgctttctatcgtattctaaagttgtagatagaaacaagtcaacaacttcacattcaattttgtcttcttttaaccctttttagtaatgttttaaaaagaagatgtttgaggcgtttaaattgtggtaggacttccgtcccaataataactccacattcattatatataataaattaacgaattcagagaactgcgtatttttttccgctggtaactcaatatatatatgagagtatatttacatttttattgctttatttatatgtaggtaatagaggcgatgatgatacctaaataataaacatataaatatagatcatgactttcatccgtatatatgtatgtctctgtgtgtgtgagaagataagaaaaatataacctaatttctatacctattttttttttaaattggtattcttgaacaaatttatttttgtcaacattttttgagataattattaagttcttattttttattttactttataaaatagaataatattatttgtcattaatgaattaatatttacatttacagccgaaaattcatagttcctgtcaaaaaataaaatcaatagtactctagaggaaaattagagaatcaagcactctcgtcttcggcagtttggcgtggaaagggaccgctttattttgaccgcaaaatcagcctaccgaattattttatgtctcccctaaatttcaaatgaaattttttatttgtcggcgaaatcattccacaaggactgtaatgatggttgatagataattcgattaacatgttggacggttttttttttttttttgttatcgttattgattggtgattcgtaaaataatttgtcaatgataattctctgttggagcccacaaaataaagttgttcttattactaaagtgaaaactttcaattttctgcattcttctctgtgaatgcaaagataaagagaatgttccattaataatagtaaaactgttaaatattttgctgattttctgttgttttgatttaatttcatttatcataaatttgcttagaatgatttaagtgcaatacagatttgatgtgattatgataacaaaaattattcaaccaaagcttgccaatgttttttcaaagaaaatgagctttaaggaaatcaacttccattaaccttcttacagtctaacctaatctctccattactcccagtcaagggactaatattccccatattgatcatggactgtgcaaaggcctgaaaaaacagagtctggttacttgcgaacgaagtaacaatcgcgatggtggatgaaccggtggtagagaacagctcttggtctgactgaagaagtccatcgttgctctgaaggttggcgaagtaattgttatcgaacgcatctggtgtgctcaaatcaagattggtgatcgttgatgcgctaccgttttgaggacatagctgttgaagagtgctcagaagcgttgagtttagagttggatcgggatttcctgtcccgctgaagttaaatagtctgttgttgaatactccacatcgagcacgcccgaacgtatgcgcacctacgtcgatccacaagagttggcgttagggtttgtttcaacttgagacgcaagtaactaaacatttagatgaacttaccagataaggctaccagatcgtttgtattaagcccgacagccgaaaatttaaatgtgatgttgcttaggctttcgatgggagaaggaatggacgaatttgcaccggcgaggttggccgtgagactatctcttcttcctaataatacagtccatgatggccctcctgcctgaagatgatcaaacgtatcttaacaataactaaatagaattataccacagtaatttttagttatgttttgtttcatatgtccacaaagaacgtgtagagttaccaaagacacagaagcctcagaggcaagggctaaaacgtcagagcaagagacaacaccagggcaagcgttttcgagggcagtcttgatattatcaacaacgttgaatcctctagctgagtttacattcggaccagcgttcttctcgctctggatgcttccagtgtcgtcaagcaagatcgatgcatcacatcccttcagaatatataataaagaaggcaaagtaggtttagggcgaaaattacaacatggcttaattgatgttaaacagttgcgtcgaaaatattagtatacattaacaaaacagtcatgaaaatgaaggcggatgaggctggctccgattcttgtatcggattgaagagcttgctgaatagtgctgcgtacgatggcagaggcgttgggacaagtcccagagtaaaatgttgcgtttagttgcgcagatgatgtcccaaatattgaagaaacgatgacaataagactgataatgaacaaaccatcacaagtaggaagatttgttacagccattaattaggttttgaaaacgatgatacagagttttgattagttatttccactgattggtgcggaacttatgactatgtttgatcattttgaaagaattgtatatatagagagaaaaagtcgattaaacgcgtatttcttgactgatcatgaaagtgaaagattttgaaattaagccaataactatagattaacgtgtgtgtttgtctacatagtccaaaagatgggaaaagaaagctggtgcttctacattttgtttagttaaaagtaatttgtctttaggttatactatctccatcaattgcattattgtaatcctcccacgcggttggtaaatgaagttatatatagtttttataatttatacaggattttgcgtgagacgaaatcggtggtcaagaaaatcaagattttttttttttgtttctttcttttataaaatgaatacactaaaacatgatatggccacatttcaatctcaaaattaaatttataagccaacatctataatgattaatgcatttagattcccacgtttaatcaagggaaatttcatatatatgagattgtgaaaggagttctcaattgtcacaaggaatacgcaaaatttttagataagttttttaaatgttagtctaaagttttagttataagtcacaattctgtgaatgataactaatatttgaaagaactgctgccttcaatagttgttggagctttacagctgtactttcagaaaaccagaaaaggattcataatcaagccttttataatgagttgttattacttcactgattttgatgaagaatctgcaaaagtcttacttacgatcacttttggagatgttcctttgacattaactcatagaataataaacaatcaaaatgcgcaagtaacttaaggattatgaatcttataatattatgaaatctattaatagattttgcttcccatttttcaaaatatgaacctatgtttcaaatcactttgccgtacttctatttatttctcatgaattataattttttccattgattgacactaaaaacattagatttgataaatcatgacatgaatctagttttttattttattcttttaaattttgtcgttgtgacacaatttagattcaaatccacaaaatgtatcaaaacgatagacgttatacatgcatgcatgtatttaggcataataatgttttagaatattaaaattttcaaaagtgtaaaacacaaccctaccactcacttattttctcctcaaccaaacttatttttttcacaaaaatgattcggcctaggagttattattcatatatgataaacaaacggtgaaactgatctcatcgttgttcacatatctgctacactcactggtccgtcagattgtaactgaatgtcccctgcttcagtggctgatgactgtccattaaccaccttacagtcttgtctaatctctccactactcccagtcaagggactaatgttccccatcttgatcatagactgaacaaacgcctcaaaaaacagggtctggttacttgcaaaggaattaacaatcgggacggtggctgaaccggtgtttgagaacagttcctggtctgactggagaagcccattgttactctgaaggttcgtgaagtaattgttatcgaacgcatcaggtgtgctcagatcgagattggtgatccctgtattgctgccgttttgaggacatagctgttgaagactgctgagaagtgttgagttcagagtcgggtcggggtttcctgtcccgttgaagttgaatagtctattgttgaacgttacgcattgaccacgcccaaacgtatgcgctcctatgcatattgaacaacaacagagttgtcattaattagggttttgtttgaagtgagctgcaagtaattaaacatgtctgatgatttaccagacaaggatactacatcggttgtctttagcccgacagctacaaattttgatgtgatgttgttaaggccttcgaagggagagggaagagacgaattggctccagacaagtttgcggtgagaccatctcttcttcctaataacacagtccatgaaggtcctcctgcctgaagaagataattaaacatgcttattaggtaatattaggtatttttcactggcggcccagcccatagataggtccacagagctcaaggtcggcctttaggtatcgtaatttcttttgtttgattatgttttatgaagaaagtgttatgtattaccaaagacacagaggcctctgaggcaagagctaaaatgtcagagcaagaaacaatgcccggacaagcattctcgagggctgtcttgatactatcgacaacattgaatcctctagttgagtttgcattggcaggagcgttcttctcgctctggatgcttgaagtgtcgtcaagcaagagcgacccatcgcaacccttttccgatgtaaaaaagcaaagtagcggtttagtgtaacaaaatttagaaggatttatgataaaatataaaaaccaagaagcttattatacattaacaaaacagtcgtgaaaatgaaggcggattaggctgcctccgattcttgcatcggattgaagagcttgctgaatagtgctgcgaacgatggcagaggcgttagggcatgtgcctgagtaaaacgttgcgtttaactgcgcagatgatgtcccaaacaatgaagaaacgataacaataaggctgatgatgaagaaaccatcacaagtagaagaagagcttgttacagccattgatcagttgttgcaaataattaaagagttttggattagcttttcgttttactgattgattctgaacttatgattaatctaattagtcattatatagaggataaaagctgaataaatcttacctgatcaggaatgtaacagattttaacttaagctaataattactagtcaaggtgcgtgttgttttaccaagtcaaaaagtgagaaaagatggcgcttctagatttttatgtagtgcgtgttttaattagtcattaacgttagaaaaattgagtctacaagattcgtgtcatatagtcacgttccacgaaaagtaaataacgtgaaagagttgttagttgttagggcactttacaactgtatatgtttttttaacttacagatgtttttttaattttacaatatctttataatcctttttagatcttcaactaaacacaaactgaaaaaatgatcaacgtacactaacaaataattggtcgcaacgtaaattgaaaaaaaaaaaaaaactaacgtacaagtttaccagcacatcaaaacatattaataagattatatataactcgaaaaaatctatagaaatttaatattaggaaaatttcaagtatactaacaaattaatctttacgtataagaatatccaattgatgatacaaaaatttggatattcagtgaaggccatatatagcaaacgaaataatggaacttgcttcgatcggaaattaaaaagtccataaaaccagtctcaaatagatgatgaacagatttgattaaaaaaaaactaacgaactctccactgcgatctgagcgcttctgtgatatttttcgatcgtaaaaaattaggttaaaatgactgacttagccaccttggtcacaccactaactttttttattcacggtaaaaaaaaaaaaaaatcatgcatataacacaatatgcttagttcattagtcctaagtaaaatacataccgcctttattcttccttgttttttgtttttctttttttgataaacatttattcttccttgttgcttgaaattatagttcttcatcttcctcactggacatatctcaattttactttatatgtaaagtttcaaaaacttccccaatattattctttttctatccttggtcaagcgtctacactgctttagccgatcggatccaaatattcgaaatcttttcagctcattctatttggtttgcacttcagaatgtcatcaccaactctccatgtgcgtttaaatccaatcattcattatgcttctggaccatccaaactcttcttaatatcatcattacttcttcgttaagaatttatccatatactactataaacttaacagactgtaatagttattcaagcatatcttttgtcgaaaaacttgcaagaattaatgttcattgataattttccttacatctataaattatttgttcattattttactcttatacaaatagctttgtctttcatgtctgattgtgtcaagcatgtttaaaaatttcattcaaaagaaataaaaaattgtgcagtacacgtctattgtgatgtaacatagttcaccattaatttttttttttttaaacgtgtagaagttaacaaagcagggtctaaatatcttatcttatacagttatatcagtcgtatgttgaatttgagaattcaaaggaaaatgataataaaaatgttgttgccgagagcctccccaagcgaatatgaatatctgatagaagtcactataaaatagaacaagttgtagctttatatgaattttcacatgttagctacctcattccaaagttagttttatatatattatagtaattaataacaaactgatgatagctgctcaagattgactaaaagttgtagacattgttattttcattcatactcgggtttgattaattacattaaaacctcttgaacattaattagttacatagaaatatcttgggtattttaaaaattctgaagatgttttgaccaaaaaaaattctcaagatttcaatatgagttttcaaatacagaggttacatctaacttctaagatttgtttatgaatatatgtttcaattaacaaagcccttgagaatttatcaaatcttcagaatattttttaaacaagtactagatttcaacttatatttacatatacatttacacataacgtcaacgtttaaataacacacaatcataatacataattttgacaaattagcttagataagacttatccaacaacctgttaaaattagtgacaggtcaactcttcgttgttgaataaaagaagatgtaaaaccaaatatccaatgtagaaacagtcgtattatgaccagaatctccgagtaaaactttaatctcgacgacgaagccatttttaatatattccaaacccataaagaaaaccatataagataatttattgtatgtgcagaaccaaaaaacacaaaagaaaaaaaagaatgagattttctcttgcgtggaagctcctgttcttgatactaacttgtaagatcgagacacaagtgaagtgcttaaagttcgatttccctgggtttaatgtgagcaatgaactggaattgatccgagataactcatacattgtctttggagcaatccaagtgactcctgatgttactggtggacctggtggcactatcgcaaaccaagcaggcagagcactctacaaaaagcctttcaggctatggagcaaacacaagagtgctactttcaacaccactttcgttattaacatctctaacaaaaccgatcccggaggcgaaggcttagctttcgttctcacacccgaggagactgctcctcagaacagctcaggtatgtggctcggtatggtcaacgaaagaacaaataggaataatgagtcgaggatcgtttcggttgagttcgacacaaggaagagtcattcggatgatcttgatggaaaccatgtggctctaaatgtgaacaacatcaattcggttgttcaagaatccttgagcggtcgagggatcaagatcgattccggacttgacttaaccgcacatgtgcggtatgatggtaagaatctatcggtttatgtctcaagaaacttggatgtgtttgaacagaggaacttagtgttttctagggctatagatctctcagcctatcttccggagacagtttatgttggatttacagcttcaacaagcaatttcacggagctgaattgtgtgagatcatggagttttgaaggtttaaagatcgatggcgatggaaacatgttatggctctggatcactatccctatagtgtttattgttggtataggagctttcttaggagcattgtacttgagatctaggtcaaaggcaggggaaacaaatccggatatagaagctgagctagataattgcgctgcaaatccgcagaagttcaagctgagagagctaaagagagcaacaggaaacttcggcgcggagaataaactagggcaaggcgggtttgggatggtgtttaaagggaaatggcagggtagagacatagctgtgaaacgagtttccgagaaatcgcatcaagggaagcaagagtttatagccgagatcacaactattggtaatctgaatcataggaacctggtgaagttattgggatggtgctacgagaggaaggagtatcttctggtttatgagtatatgcctaacggaagcttggacaaatatcttttcttggaagacaagtcaagatcaaacctaacatgggagacaaggaagaacattataacagggctatctcaagctttggagtatcttcacaatggatgtgagaagaggatacttcacagagacataaaagcaagcaacgtaatgctggactccgacttcaacgcaaagctcggcgacttcgggcttgcgaggatgattcagcaaagcgaaatgacacatcattcgaccaaggagatcgctggaacaccgggatacatggctcctgagacttttctcaacgggagagccacagttgaaacagatgtgtatgcgttcggagttctaatgcttgaagtagtctcggggaagaaaccaagctatgtcttggtcaaagacaaccagaacaattacaacaatagcattgtgaattggctatgggagctatacagaaatggaaccatcacggatgctgccgatccgggaatgggaaatttgttcgataaagaagaaatgaaaagcgttttgctcttaggactagcttgctgccacccgaatccgaaccaaagaccgtccatgaaaacagtgttgaaggtcttgacgggtgagactagcccaccggatgttcctacagagagaccagctttcgtgtggccagcgatgcctccatctttcagtgacattgactactctcttacagggagtcagatcaattcacttacggagcttactggcagatgacattaatctttatttgtgtgttcttcaaaaagtatttgagaattgagtttgtttcgttatatactacttataactatctttctgttttttgtatcttcctctgttcctaatgaaatccagagataggtaagattctgcttttggatttttggatgtctgttaatgtagaatgcaaaggaaaacattaggatacattttgattattggaattacaaatgagcagttcaaggattattaacctacaattttgtatctaaactcaaacgtgttggtacaaaatcgatccgtgttcatttttatcatatttgtgaagactgtgatagtaaagtaaagaaatgtaacaaaaatgtctaagagaggaagatactgaacttggaaggtccaacggtatgagaaaaacctttaatggacaattcaggaacagtagctttctccaccataagaagctcattgtctatgaatatcacaaccactgttatatcatcatgaaagaatctcctcactcctctctccactttcttcaaatcatcgtaattcatctctctctttttcgcagctatggttatcgctcttctcaccagccttctcgctattccctgtgtttgtttcatacatatatacaacatcagtgaaagcagaaaaaacctgagaattaacttttagcaatcttaggtggtggcacgtacaggacgggggtgtttattcactatctctacagcttgctggttggtcatttgttcccagagtccatctgatgcgaatatcacaaacttgtcacttgtttgtaagactcttgtgtagacacaaggctctgctgataaaacaggtctttgtagttcttcagcgagatggaaccgcggaaatgaagggtcaagtgagaactctgggcgctttaaatatgcatcccctattgatctagatacctgcacaaatgaaacacaatattgacttatagtttgataagccaagatgacacaaagggtctgtctacttgtgcaaagagctaatcattaatcaagtctctcttgtttagtgaattggaaccataataatagcagtttcatagctttgttcttatcatagtgtcacaggcatttaaatatgtgattagagagctttgcaaacctgaatgatgcctttgatgcgccacacaccatgtttaaggacaacgatatgtgaatcatcaggatgcaacgacctaagctcttgtctaacttcttccaaagcagcattgtgatcactagtcagttgctcagctacaatcttgtttgacctattattattactacccatggaaccaagcacagcacgagaatcaccaacattagcgataagcaaagtccctttccaaataactccaaccaaacaacaagatccaacagctgcaatcaacggtttcaacccgcaagtccttcgcacaagcgtgagaaacccttcctcagtagcagaaaatgcagctcttaaagcctcctctgaaatacaactcctttctctcgaaactcctaaaagatcaaaactttaatcaataagcagctaatgaaaaccattgtaatccacaaaaggaacaagacaaagctacaaaaatccagaaacgaacaaacagagagacacacaagacaaagataacctgccaaaaagtaggtagctcaccaaaaaatgataaagaaaaagtcaagattcacttcactgttcatcagatgcataaagatttcaactttctacaaaaattatccgatcatcaaaaccaaatcaagaagaagaaacacacacagacacagaatatcaaagtggacttagtgtttgacttgaagaacacaaaaagagattttgtttgacttgaagaagacaaaaagagattaaaaaaaactaactcatcaaatgagaaaagagatgatcagagatgtatctagaagcttcaggaccaccatgaccatcgtaaactccgacgaaaacggcaccgtttccagtctcgacttgactatgatcttcaataacctcgttagcttgcacaacagcaatagagaaatctccgaaagaatgtctctcgagttctctagaccaaagaagggagtcaccggaggaagaagagtcaccgtcgtgatcatcatcatcgtcatcatctctgttcatacgaccgtatcgccgcataggtcgtaaacaaaaaagagccattctcgctaaccaggagaacatccctcatttgctctccacgaccacgagaattaactctttattttaggtcgccggagaccacaccggaaagaggaatctcgtgatttgttggatcgaaaagcttgaaacaggtgaagagagaaaacgagttaacgaatcggagattgcgaaaacaaaaagcaaagtttgttccttttttattttcgatatgaattgaatctttttagatgaaactgaagaaaaaaaatgtgagatttttggagaaaaaggaaaagactttcgttggtcttcaagagtgagagagtagttgaagcaaagtgtgaaaaatatgatttgtgtaaattaaagttgtctctataaattaaaattaaattcaattgatgacgtgatttttggtacgtattaccaaggatcttacatcatatttttgtttttgtcgatttatttagaaatagaagtctaaaaacgcgtttcttcttaaaaaaagttaaaagcatttgacaaacctaaacagaggatcaaccgctcaagctcaggtttcataaacacactcttcatcaccaaatcctgcccaaaaggcattccaaaatcagccacaaactgggctttgagcttgataatatcacgctccttgcgggtgatcccttgatgaggaagtaatgggaaactgattaggttctacatcatgagtttgtggtcttgacttcaaagttgttggatcatcaatatcagcttggatactatgagatcccagtggagtctcgtgcatatcgttgtactccatgttaacaaaaaactgaaaagcatccaaatcaatcaaagccatctccactccatgtttagcctcctcctttccaaaaactgaaagacatttttcttcctacaaccacaaaaaaaaacaccaacgaagatccaaatcagattggacgattatagagcaaccgaagaaggaagaagagtcagcgtgaaaatcgaaaacgtaccaaaaactgtaaaggttataattgtgagtcttttgactttggttttgtacttcaaatactaatgtcggatcaatgatcatctaatcgttaaaaatcttcatggttcaaaacgaagtgactattttaagaatattcacgcatggtacatgttgttttatacaaacccattgcgcagagaaataatttttctttgataacatagtagattaattcaaatatgatgcgaatgcttctcttcaaaaacttagcattagcaatgtttctcttcaaagttcaaaaagttagcaatgtattgttattgttaagttgcatgggcacaatattgttaacggataattttactactgttacattgcatgaacattctactcataaagtaagactatcatccaacaacaaaaacctagatgagatcgaagtcctacaattattcagaagcacaagaaaaagaaaaaaaaaaaacagaacacgaaagtaagacagaaaaccacgaaatttcgattcaacaaaaacagagcaaataacagaacaagtgaacaacaccgtttatccagtatatcccccgccggttccgtacccggtggcaccaccaccaccaacgtgagtgttatgagcggttgtccgaccagttccagtgttccttccaatcgggtcggtcacagccgtgccctccacaacgcggtcggtcagttgtcccgttccgtgaccaggcagagccgacatctgatgtgtcccagtgccgtgtccgacttgtccagtggtcgagtgagtggccgtccccaaacctaaaccggttccggctccagccgcttctttcatggccgcgttgtgctgacgcgtttctctcttctgcatctcagcttgattgatcttatcttctttaacctgtgtagccatctgtttctgaacagggtctcgtgtcttcatcttctccgccttttgaagacaaaacaaacccaacgttacaccatttttattattttacatcaataaattaataataaccacaattctgttaccttttcctccaaggtagctttggttttgtccatgccagattttgcagaagctgcaatattcgaagctgtttctttcatcgactgcatttttaccaaatctctctcttttcctttagcgaaattcaaagatgttacaaagatatcttctgattacttttgtttattgttttgctcaccgagcatgtcccatagatatagccataggcctcgcgttcgtcacgatagtttaatatttaattacgttcttgacgacacgtcagtgagacgtgtcatgaaagaagaggaagaagaggtggtaggctttgtgtttcagttattggtcctacacgtgttggaaagcctttgagtcgttgagaagatagatgttgacgcgtgttaggctttagagttcgcctcatgtcggcggttaacccggttttgtaatcgataggttaagacaaaacaagtatattattgtgcatgatatcttaagagttaagacaaaaatagtatgtagctgtaatataagggttttaacatatcaaagtcttttaactgtgatcggtaacttacagaactcgtcgaatcttcagagctcaatacagaatgggctaaagttttcaaagcgagtcgcataaaacaaattgataaaacaaaaagagagagcaaaaagtcacaatgataatggagctaacaatgcataatctgttctcaagagtctaaagacataactaagcgattcctgacctgcgcagctcagattcaccatgagcaaaatggcatctatctccatatgtacagttccctttagagtacctatcacagatcttggttttgtagttgctcccaggatgtggtttcccttcaggaccaccaatcccttgaggtttcttcactgatccaagcctccctataagctctctcaccatcccactcgctacattgatctgttcaaatgttccttccagctcgataatcttcaagtttgggtctctttcatgatctttaatcgataattttgctcctgtttcacggcatatctgtttggaatggattccaccttttccaatgatggcaccggctaaagaagcatctacactgatcttggaagtagaagcaccaaagattgaaacagggcctgatcctggatctcctctccctgagaatctgccgccgggaccaccagatccttgcatatttctggaaacttgagaaaccggtggtcggagatttgtcatctgcgctgcagcattgtacccaccgggcacatagtgcaagaagtggcaattgtcaccaaatggacatccagaagtgctgcagtacaaaccataatgcatcagcaaattcattcgagaaagaacaaaacgacacatctccaagctgttgcactattgctaccttctcgaaaaagctatagcgttttagtacaaagataatgaaagaaatttataaagtaataaaacagattgtagtcattatgcatcaccgatgaacaacacgttgcacaggagccgaaagactcatggatagttcaaagataatgcaagaagaaccttacttgagaacaatggttttatgctgcatatgcaaaattacagtttccttaccatcaaacagaagaagaataaacaaattgtttacaacgacagccacaaaaacaagttttggttgattttgtatattagattcaccagtagagttcagttccaaaattatactccatataagcttatcatccattcttaggaggaatcacagtttgttacattgactttttaactcgtttaaggatgaacagtgctacgtacctgtataacaactatccacttcattagcacactttatacagtattacttcttaatttcatgatccaatcaggaaaaaaaatagatttataacctgaaaaatttagtgcatggcttggatttgcttcctaaaccagttgaaattgattccatctctgttgcaaacattaagtgcttttacttggttaaacttttctacaattttctcaatacatatcatttggacttggcaccagtataccattctggttttgaaaatttccagggttatagagttttgaaattgaactcaacagcttgagttgatacagatcaatatatcaatcaagtaaatccagtaatgttgagtggtcacaaaggctaatgggagttgattgatgaatccaatgaatatgagaagaagggtaagccaatagcacaacacaaagcagaacaagatacaaacttctcatatcaattgtctcccaactctcaagtaaggtaataccagactgaagcagaaaaagggtttgcgactaatctctctaatgaacacaaaaatgaacaaaggaacaacctttacgagagacagagcacacattgcaactagaaatgaacaaacataagtgataccaaaacattctctcttgttgtgaagatctcgaatttctaaaacccaattggagacaataggaaggagaggagtgaaagaacaaaccttgcttagacctcttgaatccgccattggagttgtgagaggcagcagcttcagggcgtcctctcttacgagcatccatgtctcgataagatcgattgaatcggagtaggtagaatcgaagaaagatgaaatgagatctcaaagttttgtgatatgagctttgcgattcttatccttttaaaattctattgggtttatcatcatcatcatcatctccacacacacagctcaacaatataaatgggggatagaggtttgcttaatttgttaataatataaattaattcgtggaacaccaaaagaccaggagactaattccattattaattatatggattactataaatttaaagtatatacattaacattagaatgaatttatgttttgacaataatagagtttatttgatgagactggaatcaaacttgtactcatgcaagtaataaacaccaaaaaaatattcaactctgattatttgtacacatattactttatatttattgttaattcacatccagtggtttcaaaaatagagaattgttaaatttgcgcgttttaattgttttatcatagtcacattagttttaatatattcaaaaaatacagaaaaaataatttgggtaacgagtcatttgtagaaattttggaaaaaaatcgttaagtttggcgcgttttaattttttatcataatcacagtaatttaaactaaaaagtagtatttttttctgataactctatcaataacattcaatctaaaaaaaatacggaacatataatttgaataatcgatcggtttaagattgccattaagattgaacatataattgccattaagaattaagattgtcattttaacaaaagaaaaattataaaaaatttctaacatcgggtcgataagacgataaccctgatactaatttattgttaaccgttcttataaccattgaatatatttttttaaaacaataaaataaattgaagtaaagtaaccattgaaatatttttaaaattgaaggattcagtgacaggtgatttatgttgatctcactttccatcttatattcttgctaattgaatcagattttgaatgttatgctcaaaggtcaaaagcctcttctcaatatttacatgcttggttcgattctttttacattgtttagacaggaattggggatttgagcaagtaaattattaacgatcctgatggcaagcctgatgatgatcacacaagttcagaatttttttttaaaaatagtgtttttacaaacaaaattcctaacgattattttcatacattctgaaaccacaaattagaagaatactactaattgttcatcatatatgaacaaaatcattttctgggatcccttaaagcaaaacagaagaaaaagaaatattgctagtcatttttcctaggggtgatggtgtcatacatactcaccccagcagcattggaagctcatgcgaatacggttcttctccatctggttcaccagcacaaattatgttgttgttagtgatcttagtgcatgacaaatagaaataaacaaaggccgctgttcacatttattaccgctttcgtaatcagaagcatccgtaagccttgcaatggcagcaataagcgcctgttcatgttcctatatcatccaataacaacaacaccaagtttcacttcactgtttctttcaatcgatatctcgtcacaaagttcttatcaattatcatatcgctcaccttgagtagcttcttggccttatcaagctcatgtggatcaggaaggtttgaatcaaaaactctctcgacctaatgcgaaagatttcgacatcaaaaaccctttttgcctaaagagaaacaaaatgcagagagatagagatacctacctctttcacaagtgagtctgtgttgaacaattcaatctcaccgaaaaacttcctcccaccaccgttttccgttgctaaatgttctcttcttggctgagttcttggacctctccctctaccaccatggcttaaggtccttcgattcccacgagttgttccaccgccatgtcctacattcaaagttaccccatcttcctctccatcccatcttatatctttcgttggaatctacaattatataactaactaacttcagattctgctgaaaatgttttcatactaggtggatacactatacaaatgtttcccacgtaatcttactaatgaaagctacctccaaaaacaaatgtaactttacccaaaagacattcttggcagcattttccacaaaaaacttaaaaacctaataatatcaaaaactcgtgaagattacctcattaagatcaacccattcccatgtctcattcactgtgtttatatcatataccaacgcatgtcgaccctgcgagagaacaatgaatgcatcaattacaatatacttaagctatgttcaacgctaaatacagttccaaacttctagatatatcaaagtcatagtatacttttcaacgcctcatatgcacattaacagtaaacacctcctttcttcaattcatcaagaactacactatagagagacttgattaactagagaagtctttcgacaaatgcctaaaccatgatcctagactaatccagagtaccccggctcattctgcctaaacttcctttttaactagtgagctatctagctaagcgattcgactagttgcttagctttctacacagttacaatcaacctaaagtaattgcaatgctcactcactagagtaactctgaactatacggtaaatttcgatcaggctttgaggccttggagtcagatattcgaagtacaggagacacctcgacacacaaacatatataatgctgaacatatgaatttctgattcaatctcaataaaaaggtctcagccatcagaagttacctcatttgcattgtattgtgtaactactgcttcataaaagctgttgtcttcaggccattttgtccacacttttcttccaataagagcttccgcaggttcatttgctgatactacacggttattgaatgacttacttctagtagaaccaatcgacggatactgcatgtgtatcacaaatgatatgatcagtaaataaacagaaaaccatatgcaaatacagatatcctctgcttgttgttctatgaccaaagattaaaacaagaagtcttacggattggaacgtcttctgtttcttccgagaagctgaaaaagtcggactaggatgaacatcgagggactgatgtctaacaacctggtttccacctcttggtctcgaatctctgttggtccagttccatcatacaacacattattacaagatacaacgaaatctagattcatagctttactatcacaaatgatcagactcgttaccttattcttttgataagatcatcattatggacattgttcaacagttgtcggttttcatcatcagatatcctcaattctttacgtaggtttgtcatcacggttgctttatcctataaaatgaaaccatataagccaaatcctttgtcttttgatggcaaaaggaagaaagaggacttacccaagaaaattcatcagcctgtgcttgaaaagctcttaatacagcagaataagcttcctgctcaagtatatgaatctgcgcttccatattaatgtgtagacctaccatatactttccatccaaatgaaaccaacccttcttctgaaatgtagaaaacactttataacatcaatagtttaacaaactactaaattttcaggtacttcacgaaaaacattggcactaatcagattcatgaataattttgacagtcgaggtctcatgagaatgtaggagcttattggtggacttattgtatcaagaaattggataactttagtttaagcgaatattcggacagcaaaaaaaatagacatgagatgatcaaacaatctaatagaatgtgaaaagaatatcttaaaccctaagaaagagaataatttagtaaaacccttttttttaaactccagtgatatttcaaaccctagaactgttagatctctcaatggacaaaagagaaatgtcttaaatcgctcaaactaagtacaaaacagaaattatacctccttattcagaatcctgtcgtaaaacagcaatctttatacgaaacccttaattgtcgaagagagaaagattgactcccaaacgcagaggctataaagagctgattggatccgaagtgagtaattcgtagggaattgaagagagaaattgaaagaatttgacaaaaaggaaagaacttttctaagtattggtagagattgatcttgataaaaagcggaagtgcagtgttttgagctggctgggcacagcgtgcgatgaagagagagagaagagaagatcgaagacgggaagttccaagttggaggagagagaaaccttagtttggtcggaagcagcttaagacaagacgatgcgtttttgtttaatttcattttgggcctattttatgataacataggcctgtttggcccaaactgttaatgaaaatatgaaatgtatgttttttttaaggcacctctactggagtctctaaagtctaaactaagacttgtatttataataaataaaagttggtttttatgctaaaattgtttagaatcaggcttgttaatttaatgtttaaattttttatatatcataaaaaataaaattatctatatataagctccattatgcataagcttaaactatatatgaatattatttttaattgatattacataaagttaataaataattttaaattaatgtagttttagttaatacaattatataatttaggaaaaactgagattttgaaaattaaaatttacactttataaattttatcaacattttgatattttaaatataacttgttttatatgttgtctagcatttttaaggttacactatcttaattttttgcataatgatgttatttaaggaaatattttatttctgatggatcttagaaaagtcagataagtaaactgaaaatcgaaattggtcccgttgtatacaaccaaaagaaaacaacaatatcagaagatagtagcaaaagaacgtcataaaccacaaaagccaaagttacaaaaatccattccatttgtatcctctcttctcctttttggactgtcgtctattctagtttataaaccaccaccatcaatatcatcatcattagactgtaacacaacaaacaccacacaatccatatatccctatgcttccaatacacattttcagataattcaaactatgcatgtgaggagtttcaaaagaagaaaagaaggaaaaagtgaaatcacataaaaagaaatgaaagatacaaattaggccccatcatcatcgttatcaaccgcttctattcagggttccttgggatctcctatatgaatcaactttctccaacatgaacttctcatggcaatttgctataaacctatcagccaatttatcaatctcattcatcatcgtctctgtctcctcttcttggccgtctttaactttatcctctagctgtcttagatagctagagagctgagatggttcttgatcatcatcatcgcgaccatccatggattcagtggagtacattgactcccaagtcgattcgtgtacgagatgagctaagtagagctcttccgggagacgcactggcgcagagacaggcactacgtgagaggagcaaaagttgtagtgaagtctgaaggagccgaataatatattattcttttgtttctttgagactctctttggatagagtaaagaagacactgacaagaaattgtattgcttctttctcaagactctaacaagaatggatgaaactctagatatttctcggagtagccgacaaacttgagaaatgatgagagtttgtattagggatttgagtttcatggagcttgaggttggtgaagaagaagatgaacattgagaagaagacatagaagaagatgttgatttgagtggcattgccattctctctctctttctcttgttacaaattaaatctttggttgggaaaggcttatttctagttgaacatcaaatattatgaagaagggtttgactgaaatatccttatacttttggactatttaaagggatgccattgccactctactttggagagtttaattgtggtcggggtggtgtgtgtgagcccacttgatctgacgtgtttaacgaatactaggaaaatctcagatttgaaagaaagaaagaagaagtgactttagattcaagtaactgacactgatcattgcttctctgtagtctgtactctctttatttcaactacaattttcacatctttgctaatttctgtcaatcaatagctataatattaccactgaatagattgcaaagttcgacaacaaaaatgtaatcaatagtagttattattagtttaatgtctttctctgttaatgaaatcaaatagagtgaaactatatccatcattttgcatggtttaattgatccacagtttggtcattggtgtaacaccaagtatgtaatatcgaataacaaacctaacgactttactaaacattcaaacggatataataaaggtgggatgacgaatcttagaccacatgaaacaaatttgtacagcacttttatgcccaaaaacaaatccctaggatccccatatcgagtctctatgaccatatgccagaaaaaagattctactaccccgcttcctatatttcaaaatatttgcattttttaatttattgtttatctactttttgtcttttttttttttgtttttttaaatataggttacacaatctatatttagcccccaaaaaattataataaaaaatacagtttttaagttggacaaaccaaactgatcaacaatcttaaattacgccaaaaaataagttttttttcctatgaattgccttcttattaaccgcaacattataaacatcaatgccttaatctaagaagatctatacaatcaattaagttactgaaattaaaagaaacaacatatttattggcgttgataattagggttacatatgcaccttatgtcccaaattcgatatgatgttgataaacaaattaagcggaacagcttctgacgagacaagataagatagcaaaggactcgacctgcgcttttttggaaaaggtcactacgatatataagttttgcggtgacacgacttttgatagtctgagtagaaaaaagaattaagaatccagcgagtcctctcaatcatggacgactttttgtcacgagccaacggtgaaagacaaaaacttttgtaatatgggcttttttaattaacatctatgagcccatcaaaataaaggatccattagcctgggatgttcagaatgatcaagtcaaaagaaattttacatctctctccgcttcttgacattcataacatctatctttgcattcacatctctaacgataataaatcatttagcaatagtgcaatacggatagaaaccagtttatcaattcatgaagaaagataatttttaaagatttatgatatgtttgttcatatgtggagattcggaacgtatttgaaatatttttttattaaggttaagggaattgtttattttatcatcaaatccggctgcagaatgcacatcgtgattcgtttattttaatgattttttagagcttcaagttaaggtcaagtttcttcaaatattgcccttaacagagtctagcgaaatttgtctctgctatcaaaacaaataataaattacaatcttattatcccaacaaaaagcaatctttacgcaaacaagccaaatcacctgacctagatatcgaactttaatttaaaataaaaaggactgaattaaaaaaaaattatcgttaaattgttatgtcgacacgcgtcagggggcatctgtgactgagacgaatatagtctattttttataagacgagacgaataaagaaataatactgaacgaaattaagaaatatacttaagtaaaaaaaccaaagacctgtctaaagacatgtaattgtttatctacaaaagtgggaaaacgcaacttgtaagaatagtattggacattattttaatacgcagggggaatcttacagttgttctactgtggctttccaattttaaactgtaacattaattagataaagaacttacttttatttaaaagtattaaccatctaagaaattttataacaagagagaatttatcaactcctcgtaatagatcagtcacaattcaatgtatgacaccttgttttgaatagattgagttgttgttacgcgcagagttttaattgtattgttttaggttttaaaatacaatatttttaattttgtaggaaagtttgaaagtgtttagaaactaaaagcattaacgactctaatataaaattttagtaacccctcttaatcatacaatttttggtattttggaatttggtaatgttgatggtaattatgaaaaataaacgaaaacttttgtatttttgagagtaatccttttattgttttaatacacagatttacaaattgtctatatgattttattttaatagaaattatttattcagcaacaaacagaaatttagtttatgaagcttttgcttttaataaaaaatatatcgggagatctcgaacagaagttcatacttaaaaactcttgaacttatagaaaaacatgtactcatttgcttattttttttttaaataaaaaatataaaccatgtattcttttcctttaaagtatttgcattggccgattataattaaaaatctttcagcttagattcgagatattatgtacccactcgcagaattcacgtataaaaaattgttcacgtcaaattagtatacctttaaaaaaaagaaaaaatttttagtatacctttgagtttttcttgtaaataaattcatttagatatatttgttaaacgacaactgcctttttcttcttctgtttttgttaagacttaagagtaacgaaaacgccttcatctgattagtgccttcatgggatgcatcgatcaccaatattgattagataagaaagctagtgcttgaacaaaaattgaatgtatgttttgcaatatggaatggaattcaatactgctctatattttttgtggtctcttgttttaaataattttatttgtttttgggtgtggaatgtggtttgcctctaagcaacttttggcagtggaatttgaatctctacaatgatttttttttggaatataaaatgttattggtgcaaataataaacaatataatgtcaacagtaatgaataattcaacgaaaactagaagatgataacgaagttgcattgggccaaacaaaacttttggaagatggaaatctatttttatgcatcctatccagaataattcgatatgtctttttagactaccaacttcatgagcctaaaaaatgaatgaaatttatgctgagaatcgtcttgttataattacatttttaagaaaagatgctcatgtaaaatatattctcccatatcttgggtagaacaaaatataatttttacaaatgcaaattcactttgattgggcattgagatattaataatttaatattattgtttaatatattgcggttcaagtgtatccgaaagtacccaatcaattttagttttgacaaacgcgagttcatttttgactaggcaatgacattaaattattaacaattaatatataatctttctgtattaaaaaaatctaatttgtttttcttacatatattaaaaaagaaaattgtgtttggaaaaatcattttattatctgttttaacacaattcaatcaataatagtgtaataaactgtataataaaacaagttattgtacgttgaaaatgtaaaacatcatttaaaatgaaaacaaaaattaaattaaaacatcattttattaatacggatgaagtatactttatatcattttttggaactatcaatgtggttgtgttaatttctagtctcaactctcaagttcaaaaaaactaaacctttcctcaaaacatttgtcaacgttaaatccaataataaatataggaacatctcatataaaactttaaatatttttttatgctaatatatatgcatggtttaacaggatcagttagggtttaaaatatgagttaatggtactataatcgacttccgtgcgatcatactatttttgtgaacaaactcttttctaatgtttttacaaatgaagaagaataacgacaaggtctaatcaagtgggataatatatacttcttataaagtatttattattgaaataagaattttggacttttgcaattatggccattggataattaaaaattgcgcactcctatccattttgagaataatcaaaagaaaaggcgttgccttatatcaatactcatccctatcttgcacctgaagactttggaggaatgtagagatttcagaaaatcccaaaaacaaaacactttagatttcatttcgatcgctattcctcccatgcatttttttgattaatcgaatctttgttttctttttcaacttcgaacttttgatttccctccgttcaatatatcattgaacttaacaatcatatgtttctgtggcaatttgtgtctttcttgcttgttatatgatggataacatcaactttgaattctcaaacgcttcacaaggaagccggctacagttgcagcaacaaccgccccagccgtttaatttacaagacttgaatatgattcaatacaatcaaccatcatctccttggactacggagaccttctctggtctaactccgtacgattgcacagccaatcaatcttttcccgtacaatgttcatcttcaaaaccctacccttcctcgtttcatccgtaccatcatcaatcttctgattctccatcattagaccaatctgtatcgatgattcctatgcagcctcttccggatcaatatatgaagccattatatcaaagatcttgctcgaacgattttgccgcaacaaatgcttcatcagcctcttactcgctttcttttgaagcaagtcatgatccacaagtatgccaaaaaaaaatccatctaattttttttcttacattttttttaagacaaatatgatcctatttgatgtttttaatgttctcgtcaggaactatgcagaaggacctatagtaattctaatgtaacacatcttaatttcacatcatcacaacatcaacctaaacagagtcatccaagattttcttctcctccttcattctcaatccatggagggtctatggctcctaactgtgtgaacaagacacggataagatggactcaagatcttcatgagaagtttgtggagtgcgttaatcgtcttggtggcgctgatagtaagtcaataaccattacaagattttctcaacgatttgattgagctagtcactttgtatatataaagtcatattacctagtacatgctacaaaggggaccaatttaacttgctttggtcttcggtctgaagaactcactaaaacttagaacttcttggttacccaaaaaaagttgttagatatgcatatgaatcatgattggtcatgaataataggtgaatagaatataattgcatgagatcaaaagtcatcttacgcacatgtggattaataatttcctcttttgagaaaattatgttgcattatttaatttggatagatgtatacatctttcagtaaaagtaattacgtaattgttgtaaggatatagtaacttgtttctttggtgggtcactgataagtgtaagtggtggaaaactatgcagaggcgacgcccaaggcgatattgaagcggatggattctgatggactcacaatatttcacgttaaaagccacttacaggttacggttacttcctctctcttttcatttttttttccaaagaagattttattaaataaaatttggcttttaaatctcatcagaagtatagaattgcgaaatacatgcctgagtctcaagaaggtacactaataaatctctgcactaactttttttggacaaaaataaaaattgataatttgggaataacacaattctaaagagttttgtgttgcaggcaagtttgagaaaagagcttgtgcaaaagagctgtctcagcttgacacaagaacgtatgtttctcttcatttttttggtgtgtcaggaataattttttctttattatactaactaaccctctatttttccttcatataaatccaaagttattgaccaaatggcttagcgtagcaatagcaacacgatacgattaagaattattcgaaaataataaataatggcttgttaataatgattttctttttgtaatgttgtggaggcagtggagtgcaaattaaagaggcacttcagcttcaactagatgttcagaggcatcttcatgaacaactagaggtaagttacaaaatgtaactatataaatatattagcttgctttattatataattaagtttctttataccaagtaaatataacccaatgttacattatggcatttagtgcttccaaccaaaacaaaatgaaggctttctagcttagagattgtatatttgcatgtgtgaacattctgtggctctcctcactttttatgagctattcactgataattatttacatagatatgttttttaatacaactctcatgattgatgtgcctttcttcttttagattcaacgaaacctacaactaagaatcgaagaacaagggaaacaactgaaaatgatgatggaacaacaacaaaaaaacaaagagagtcttctgaagaagctaccagacgctgaagcatcattgtctcttctcgatccccatattcactctcctccttcgcctttcttggtacacgacgctgaagccctgatgctaacaagttatgaagacactcaactccagtccaccaaaagttgaaaaatgagagatactctggctaaattagaaaaggcctaaagcatgtttctactctattcaaagtggtataaagttataagagtcgcgacaagaatgtccaaagtgctacacacactaacacttggaaacagaatcaggtactaaatgtgagcaagtggtgtgtgatggggtcgatctctgtcatagactaatagatgtgtgagattttttttttggtagactggaggagaccactgtctcctacattttatttatgaaatgaaacttacaaccgaacatgtcggggaaacgaagtccccataacatcctctaacaaaatcgaactcacatgttccggacatgagtccaacaataaaaaaccaaacggtaaagtaaacgcatagttagctaatccgtctgctagacgattagcttctctatacacatgagtgattcggacaatccagtcctttgagataaagccatggcacaaccgcaccaggaacgccagcggatgagagtccccaatccctgactgcaaaaaacccaccaccaatgcggaatcaacctccagccgcactctcctccaacctctctcccaagccacgacaagaccgtagtagacaccccatagttccgccaaaggggctgagcagacgccaatgttcaaagcgaaacccaccagccatgaaccgtgctcatcccgtatcacgccaccagccgtagcttgccccggattgccatgtgaagcaccatccgtattcatcgtgacccatccctcagctggcttcctccacgctatcattctctccaccaacacatcttcccgagcgtctccattagctgctagatgcgccgcttcgacctccgccactgcactcttaaggaacttaactcgatcccggcaccgcgaatcctcaccaaacacgtagccacaccgccacttccatccccaccacacggttaaggcaaagagtgtaggccagctcctcctctccgaatccgacctctccttaaggttcccatacatccactctaacaaagatgtctcgaaaaatcttcgttgttccatcactggtaccacccgcatccaaatgcccatcatcgcagggcaatctcgtaacacatgaatcaaggactccgaagctcctttacacagcggacacacatcagagtcggccatatgtcgccgaactctctccgcattcgtgagaaccacttgattccctactaaccacagaaaaatacgagccctctccggaaccatcacacgccacactctgtcaaagaaacgtgacatacactgtttcgatatctcgtcaaccgattggattaaataggcagatgacactgtgaaccgcccattctccgtaccaacccaagacattttatcttccaccccataacacccgccaattaccaccgcgagaagtctttgtctcatgaactccggtaagaaaacagctattctttccatatcccaaccaacaccctcgatccaataatctgcaactcgttgccctctctcttccacaggaagctgatccgaaacccattctaataaaggtgttgacaacaaccacctatcttgccaaaagcgaattatcttcccatcacctaggacccagccaatgcctctattgaccacctcacgcagtcccacattcacacttctccacaaagccgaccaagttcccttaggagtcatccaagcactatcatgtatgtcgccgattttatacttactccgtaaaacccgagcccatagactagtcttatcattcaataaaaagtaaatgggaggttcgaaatcctcacccacaccggtgtctttgaaatctcatctttcagcggattgaactccggagaccaggcttgacccatcaaaacactcccgaagagcctccacggaccccctgtcaccgccgccagataatcctcctccacgtcgaaacgcactacgaagaattgccgaggcagatccaacacatacatccctcctctcggcttccacaactcccgtaattttcgactcaaagcggcgatagacacatgcctacccagcactttgacaaccatacacagcttccacaacccattcatcgcatccacaacctctggatcaatggtcaccaccggctcaccatcctcaccattcgggaactccaccctcatccttgacgcgataaactcatcatctatcactctctccgggacaggtaacccaccgccattactcttctgcaccttatccacccatgatacagccgccatcggcacgcaaccatccggtggccgtccgacgtcctccattaacgcatcatgaccagttgcactcaacgccctcgtgtcgccctccataatgtcaaaattcaattgacataagcaggatgtgtgagattattcttaattaactattttgttgttagagaacaaaactcatacaaagagatagcttcttaaattagtaacgctactttttaacattgtgcatgaggaacgtaaccccaccttttaatacttttgctttcttaatcatttctactttgaatattcaatttcccaattaaattgattttattattgggctggttaagaaactcttaaaaaagtgggcctattaggcttgactacttgtaagaagcctgttcttttatgtttgttacaagcaaacacaagaacccaccaaagtctaaatcttcttcaccggtcttcttcgtctccggcagagcttatgatgatccttgaagatggcaaaagaagcgtatcgacttgagctccgagactcgtaaaagattcaaaggtaaaagcttttaatttgctcaagtaagcaatgaaacttcggcaaaaccctagtagattcacgtctgttctcaaatgggtatcacaactttctctagaaacccaattaaaaccctcaatttctggaactgggtttctcctccgatgtgcccaaacccctagatctttcgccaccgtcaccggtaacgaagtttgcagtgagaaatcgaaagtgaagagaacccgaaatgggtttaaaatcactcccaatgttaggaaattagctgaggaagcaatgttggattatttctattccactaggggtttacagtatatggttgcagagagtatgagcaagaacagtccaatttttattgataatcttttgaagaaagttgattgtgttactgcttctgatatcaaccaatctattactcgatatctacggtttcaccctgtcaatgaattcgagcctttccttgagagttcaggtttgaatcccagtgagtataatcatttggttccctgtgataaggtcttcttggatgaagaaggctttttgctggagaaccatcatgttttgtgttatagtggtgttgaccctaagaggattgggaagatcttcaaggaagctagggaagtttttagttatgaaaccggggttttagcttctaagattaaggcgtatgaggatttggggtttagcagattgtttctatctaagcttatcgtttgtagtccgagagtcttgatgggtcatacgaatattgaactggttcaggttgtaaagacgttgcaatctttagggtttgagttcgagtgggtaatggaaaacttgtcagatgagggacctgattggagctctgtgcatcgtgttttaagcttgcttagagaaatctgttttgatgaggaaaaactatatgggttaatcaggaactgtccaagtttgctttttgagaattcagggaaatggacagggattctagttgggtttgaaacaaagcttggggcatctagaagtgaactatgttcgttgtttcagaaattcccgctgattcaagtagagaaatgtgtttcgaatctaaggcagtgcttcttgttcttgaaagagatcgagatggaagatgatgagattcataaggttttccgttctcattcctggtggcttggttcatgtaagttaaagaaaaccagtagcttgcttgtgtttttgaaggctggtaaaactcgggtttgtcaggtcattcaagaaaaccctgaagagatgaaaaaatggacaatgggttcaaaaatccagccgttaccagctaccaacgtagacattgagtcgaaatcaatgaagactcagttcttattagacctcggatacaaagaaaactcagaggaaatggagacagcaatgaagaatttccgtggtaaaggatcagaactccgagagagatttaatgtcctcgtaagtttgggttttaccaagaaagatgtcaaagatatggtgaaagcatgtcctactatgctctcccagacctgtgatatcctagaatcaaaggtgaactaccttataaaggaattaggttatccgctttcgactttggtggatttcccttcatgtttaaagttcactcttcagcggatgaagctcagatttgcaatgttctcttggcttcaagcccgaggaaaagtagaccgcaagatcaaagttagcacaatgctcgcttgctcggacaaaatattcgtgagtttttttgtaaaccgtcatcctgatgggtctaagcatttagaggatctgaagaagctgcatctttcagttgaaacaaactaattcctaactctgttttgtagcactagacctaatcatcttgtatcgaaacctttgtaggtgtagtactattctcttctaatgatattcatctttatatgaacaaatgaatatttatgtatttttttactttaaaattattttattcacttttttttttttggtcaactagtttcgtcttcttcacattgaaacatacttcttgctttgtgtagacaaatcttctgcatatcttccatatgtctgcgtaacaggtaatgtcttttatgcgaaaccctagattcaaaagtcttcttctcaattgggtatcacaagcttttgcagaaacccctttaaaaccccaactttctagaaaccctagatttttcgccacccaaagagcactcgtcgatgctgaagtttccggcgagaaatggggtcttagaactcgaaacgagattcgtaaagtggctcaagttgcgatgtttgattacttttatcaaacgagaggtttgcagtttctggttgctgagagtatgagtaagaatgctcctgtttttaatgataatcttttgaagaagcttaatggttgtgatgttgatgttgatgatgatgatgatatagttaaagctattactaggtttctatggtttcatcctgttaatgaatttgagccctttttagagagtttaggtttgaagccgtcagagtttagtcatttgattccttgtgataagatgtttttgaatgaagatgcttttttgctggagaactatcatgtcttttggaactatggaattggaagggagaagatggggaagatctttaaggaagctagggaagttttcgggtatgaaaccggggttttagcttccaagattaagtcttatgaggatttggggtttagcaaattgtttctatcgaaacttatagtttgtagcccaagtatcttgattggggatatgaatgttggactggctaaggtcatggagatgctgaaagctattggttttggtgttgattgggtaacagagaacttgtcagaggaggtgtcttatgattggagctctatgcatagatgtctaagttttcttagagatttgtatgttgatgaaaatgagctatgtgagttaatcagaaagatgccaagacttattttcgaggattcaggggaatggacattgattctagctgggtttgaagcaaaactagggtcatccagaagtgaactctcttcgttgtttcagaaattccctcagtgtcagagtttaggtaaatttgttttgaatttaaggcattgcttcttgtttctgaaagatattgagatggatgatgacgagatcggtaagattttccgtttgcactctttgtggattggtgtatctcgtttgaagcaaaccagtaccttacttatcaatttgaagggtgggaaagggcggctatgtcaagtcattcaagaaaatccagaagagatgaaaaaatggattatggggttaagagtccagccattaccagctactggatacaaggtaaacacaaagtcgaaaacaatgaagactcagttcttgttagacctcggatacaaagaaaactctgaggaaatggagagagcactcaagaatttccgtggcaaaggatctgaactccgagagagatttaatgtcctcgtgagtttcggtcttactgagaaagatgtcaaagatatggtgaaagcatgtcctagtatcctcacccaggcatgtgatatcttagaatcaaaggtgaactaccttgtaaaggaattaggttatccgctttcgacattggtgactttcccaacatgtcttaagtacactcttcagcggatgaagcttcgattttcaatgttctcttggcttcaagatcgaggaaaagcagacccaaagcttcaagttagtactatacttgtgtgctcggacaagttctttgccactagatttgtaaaccgtcaccccgatgggcctaagcatttggaagacctgaagaaactacttgtgtgttagtagagatcaagaatgcatcaggatatatatagtattgaccacaacaatgcaaatgagccccaaacacaaaggaaagattcgattttgtatctgatgaagacatttttttgaagcagtagctgcagttttgtgttatctcctggagcagattgctatgtaagttttacaagttctatttcaattttttaaaagttggagaaaaaataaacaaatttgtttaatctcaacaaatttcaatgaaaggaactcataatataactgtggcagaattcgagaatgaacttgaacaaaaactaactgaataacgaaactcattgagaagattaaggtatataaaaacactataaagagagattataatgttattcaaacattatcatataatcaagcctcaaataaaatcaaataacgatgatcacagtctttaagaaaaagaaaagccacgtggcacgaaggtttgactagttgactccaacgtccttaactgtttttgctgacgtggaatattcgcgctttggcttttttattaagtaccatctctctaactaaagctccttctttgatgttctctcttccgagtttcctctctgtttgttttcccggaaagcgagagaaagtgcgagaaaattccaccattcttttcttcttttctcctttcgttagatgtcggagcttaaacgtatcactttctctgcataaagcaccattattactgagagtcgagagagattatagtgatgaaaaccaaacagcaattgcgattcctcgctacaattctgctcacgacgattctatttgttctggcgaagactgatactgatccgcttgaaggtaaatttccagattctcgtttcatttttctcagtctaggagtgaatcctagctaagattcttgttcgtcgttgttctctgtttcaattttacttacttaggaacgaactgttacttgatcatcaccaaaacacagaaaccctttcttgacttgaaatttctatgggtttagtcgcgagttttagatctttcgctgttacttgatcatcaccaaatgactgtttagtcttcggctatatgtgattgttgtttatttgtgtttctccgtttagttttggctcttcaagatctctacaagtctctgagaaatccagaacagctgagaggatggagattagagggtggagatccatgcggagaagcctggctgggaatttcttgttctggttcttctatagtagacctgtaatctccttgtttaacccttttcctcagtttttattttgtccggttcgagcaaaatctgattcattctatcgcagacaactgcgagagttaaagcttttgggcagccttggaaaccagcttcaacatctccacaatttgaagattctgtaagcaaacttttctggttcttgattgttaacttcattgcgagacagagtcattgtattgttgatatttattcaaagcattggtctttactttgtttagggatgtaagcttcaataaccttgagggtgaaattccgtttggcttgcctcctaacgctactcatatgtaagtgtttaagcaagtgcattcatcttttaagcatacattccagtgcaattcacgagtgttttcgttgtttgccgattacagaaacatggcttacaacaatctgacccaaagtatccctttttccttacctcttatgacatctcttcagtctttgtaagtggcttattccaaatggatatctttgaaatatctcatcacattgctttccttttatactgatttgttaaataatggcttcctctgtcttctagaaatttgagccataattcattatctggacctcttggaaatgtgttttctgggttacagattaaagaaatgtgagtcttctgttcagttctgttagtctttcatcaccatatataggtgcaagatacccattcatattcaaatattgactttgctagggatctgtcattcaataacctgacgggagatctaccgagctcttttgggactctaatgaatctgacttcactgtaagtatctggtttcttatatctgctatctgctttgtgcacgttggtataacctaataacagttttgatgctgtgataacaaaactgcaggtacctccagaacaacagattaacaggatcagtcatatatctcgcggatcttcctttagctgacctgtagtttcactctctttgtgctttgattttccatttcattgaacttcctttatttatgacctaaacatatgtcttcaggaacatcgaagataaccagttcagtggtattatcccaagtcattttcagtccattcctcatctgtggtgagtttattattccccccttctcataaattggctcagacacacctatgactcatgaaaatcattggtgttttcctgagcaggatttggggaaacaagttccatgtagagcccaactataaaccgtggaagttcccattggacgtcagaccactgatacaaaatgatactggctatccaacaacagagtcaagtgccattatgaattttcccagacctgagactcagaaggtcaaaaagaagaagaaaggcataggagcaggaagtacctttttactggttggtgggttagctttgctgggaactttctttgcacttttcgcagttcgcatgaatcatcgacgtgcacaaaaccttgctgctattcacagaagcaacaatagcatagcatactctcttccagtcagtacaggccgaggtgatatatgcttgtctctcccctcatttttacaatggccattctgattccctggtgctgactttttaccttcacatgtaacagaatatcctgttgcaactgaagataacccacagattaaaaggttccagccaccaccagctccccaactcagacatttaccttctccacctgtcagaatcgataaatctgcaagaagaaagagcttctctgcaacatgtcaatatccatcgttcgctaagcttttctcagctgcagagcttcaactggcaactaactgtttcagtgaggaaaatctactcggagagggtcctcttggttctgtttacagagcaaagttgcctgatggtcaggtatatctctcttctctctcttcaaacattcaaaattgggaattttattatttgtgtctcatccattgatgttttgttaaaacagtttgccgtcgtcagaaacatcccaatgtcttcgctatctttacatgaagaggaacagtttactgaagtgcttcagacagcctccaaactaagacacccaaacattgttacacttctcggtttctgcattgagaatggagagcatcttcttgtctatgagtatgttggccatttgtcgttgtacaatgctatgcatgatgaggtatacaagccactttcttggggcttgcgtctccgcattgctattggagttgcccgagctctggagtaagtattctatcttctcaaactagtggtagtagctattccctacccttgcagttatttattttgactcttccctatctggtgaatcaaaaactttcagctatttgcactcgtcgttttgccctcctatagcccatagcgatctgaaagcaacaaacatcttactagacgaagaacttacacctcgtattgctgactgtgggcttgctagtttaaggccacttacaagcaacagtgttaaacttcgggtaagtaagacagcatctgatgtgtcacctaattctttgactcagagagacctaatgagttgtgatttagagcaggcttcagaaatagcgatacaaaacactggctacatagcaccagaacatggacaaccaggaagcagtggcacaaagagtgacacttatgcactgggagtgctactcttagaactgttaacaggaaggaaagcatttgacaggtacacaagcgtttcacataataatataatcattgatgcctaagctaagctaatcatgacccttttctgatggatgttttgcagctcacgaccccgaggagaacagctactggtgaaatgggcatcaaccagacttcatgacaggcgaagcttagaacagatgattgatggaggcatagccggcacattctcctcaagagtcgcctcacaatacgcagacattatctccctatgcactcaggtattgtcattagagtttcttcactcaggatcattacattaactaaccattctttcataagcaggcagagaaggagttcagaccaccggtttcagaaatagtggaagccctcactgcgctgatacagaaacagaacaaggaagcaagcagtagtgtagcagacaagaccgacccttttagtaaatctttctgctcaacacgcacacgcttcatctcctcacctaccttcagctacctctcctcttgaacattttctgtatctctacttcatgcacatatactttactgtgaaaagaatagttcttagcatatgatgatatacacgtattagtcttggtaaaaaggaagtttcttggtatataatagaaatacaaaagagtttgaaacaaggcaaaatcctaaagcaagaaacagggtcacttggtgtactgaaactaagttttctagcaaatcccaaagatcaaactaagcagaaaccccagcgttcaacaatgtattgatctctcctcttatattcacaggtcttccatcaaacatggaagagagacttgtctcacatagctccttgagttctcttgttttcgaaagtgcagcttcctgtattcaataccaaaatcaataaacagaatttgttagataatagccccttccaattccaaatttctgataatccacagtttagccaaaacaagctttttaagaacatgaggttacctgttttggccatatagcagaaagtgaattctgcagctccatgcgtcttctacccacatctttcaagctctctcttaacttcacttcacggtgcttcttctcctccagctctgaaacaagcctatctaggaatctgttcgacaaacaaatacatatatcagaagctgtggtactcactgtgatcccctggcagagattctttatcctaacgcaccttttggagttgaggatcatgatcagatcccgagatttcttgtttgttagcaatgaaatggccatggagatgtcaaccaccattggctctatggtttcaggagaatactgctgaagaaccatgggggagactgcttgcacgtggtgttgcaaggacagcgtatcttcatttctcagttctatcaaacgctggttcaaaaatgccttgacctgacacaagagaaacgacatcaactcaagaagcatatccaggattaaactgagaattagatagttagtgataagagtacctcatacaaatcatcaaggatcttattcctatattctgtctccaacagctggctcctctctcctccactccctaagacttgagttgtagaatctgtcaactgtgtctggtttgattctagcaaagctgaatcacctatttcttctacctgaggtgtttcaacacttacatcccaagaaatctcagaaacatcaacctcaaggccttggctttcttccactttaaatggagaattctcaggaatatcgctggcattgacaatttcatatgaacctagatcatttccactatcaacttcttctaccatactaacatcccaatctatctcaggagtctcaaccgtaatatcccaatcaatgctgtctgcagccgcatctgtaccatttgcattctcagatgactgaatattatcagcatcgagaccttcagagtccccaaaaacgcttaatgatggagggttttcacgaatgtatttcaggttttgtaagacaatcctcaaaggcttctgcagacagatcagaagccggtcaattcaatctccaggaaacaaggaccaaaattttaaagagaaagagattgaagttaaacagtgatcttacatctttctcagtatgaacatcttgaacataggcagagtagtactccattgcccctgttactgagtcactgttgataacttccagaatcttgctaaaggtactaggaagcgaactcgcagtctccaaaagctcacgcctcacattgtttccctgatatcttaaatgtttaaactttatatgatccttttaaaaaacatatagatgaaaatcaaccaagtttacaagtaaacctgcaatccaagctctcggcaagcatcctcgtattttgttgctgagagtgcaacgctccttttgatatcagcttctttacgatcaagttctgtcatttgttgctgaaccttttgcacttgctttttcagataagggcttcatgttttgcaaaaagaaaacatattagggagatcagaaatgccaaagtagagagactataggtaaaatcaagtagaagccaacttacatttcgtaattaacattctgaattattatctgagctgcctccccaagataaatgtgatctttttcaaacgcacgaacaattgcttcccaaacaccctaaaagagcattatacagctgagacaatgaacacaaacaaaagtgcgaaacagagagacagttttccttacagaagcacccgaaagtcgaccaaagatgttgcggctttccggagttgtcttcaggagaatctcatacacctttttgacctccaagtaaccgatcactggaagcaaaacaacattaaacttgaatgagaatacaaccaagtaaggccctcctcctaatcaatcatcagacataaccaaacaacaaacaagcttacggtgttcacaaagatgccaataaaatctctttggcattttcaaacaaaatactaacactttaagttataaatgagagcagtgaaccaaaacgcaatttaagacgaattcgttttgaaggtttgaaaattcgccaaactgataaaagaacaaaatttgaagaatttaaaaccttcaggatctagggtttgaaagaatggatcgatctctttaggcaaagaagagaactcttttaagattttgactctgatcacagcaaccctcttcctccaatccgccggaattctcttccgatccaccaaccattcttcaaattcaacaaaattgaaatcaaatgaagacaataatcaccaacgcagattcgaatccaacgaagaaaacgaaaaaaaaaaaccaaagagatataaaaatttaaaattccgtgtactcgtaattgatagttctgcattacctccgagacgagagaaggtgatatcgattggaagattttgaacatcatcttgtgacggcattttcttccggttaacctttcacgctttctgggaaattttatctccgaagtctcacacagtttaacgttttggagtctcaagagtttgctacagaagaacgcataatttcattggtctcatcaaatatctcgaatccggttattgaactaaccgaaccaatttactccggtccgcggcagattaaattgtttattggttttatatgggttggttggatggtccattaccgcggttaacataaactggtctatctagtaacgtcggttttacctttacggattagtctacagattttaaacttttttttctttacaagttaaaactattttgaggaaattatttgtatgaatattttgtgaatgatgggaaagaaatcaaaattagtttaccagctcaatttgatcaaaccaattagcttaacaaaaacaaaacctagaccatattagtgcccattcaaacaaagtacaatggaacagttagagatacaaacaaaattcaatcaatatatttgacaatctaagttcataaatcacataataatgacttttaacttgtttcatataatgtctagtgtttatagattgaatgtaagagcggttaatggatcattaaaaatcgaataaaaaatcttataataataatatagatgatggaattgaaaagtatatcttaaagtaaaaatctaatagctgaataatatatataggagaaatataataataataatttagagaacaaacaaaaaatatttatacaagtttgttatcagcaatgtgactagagagaaggaagaagaagagagaggggatggaaaaggacatgttcttgaccgctttatcagaatatttttcttggtttcatacaaaaataaaaacaaagtcgtcttctaatattttaaggtagaagaaacttatacaacaaaaatatcagaaaataaaaaggagtttgtctttaggttcttctctccaatctctatttttctctccaatatccttcttaagtttttgaaccctctccacttcaatataaccgacctctcttctctcttctgaaaaaaacaccaaaggagctttaaatgctccgttacataatctctatctctttccaagaatatagagaaaggaaaataatatacaagaattaaaagaaggtatatcatcatctctctagctagtgatcaaagcaccgtcatcatcatcatatatcatcagcttgcctcagaggagaagaccaacataagagagatcgaagatcaaaatctatctctcttcatcatcttctgctgttactatcatatcacacgctctctcaaacatcatcctatatatagacttctcttcatcatcatcaaatgcaaggtcatcaccagaatcatcatcaacacttatcatcatcctccgccacgtcttcccatggaaacttcatgtaatttttactcacttaataactttttgaattgattgatgatccccatgtttttaataagagagctttaatttatgtgtgcaggaacaaagatgggtatgatattggagagatagacccatcactcttcctctatcttgatggacaaggacatcatgatcctccatcaactgctccttctcctttacatcatcatcacacaactcgtatgcactctctctctctctcttttctttcttttttgggaattggggtttgtttttttggtttcagcagataaggaagattccctttaggtgtgtgagagagagagagagtcacagcaaaagcatgccaaacagatttcaatctttcttctgccatcagtactctattctttcagctttgaccagatcctctctcttttcagacaccaaatctttcaaatccatatatcttacacttctttaaacccttttctctctctgtcctttttcttctaattagaagaactagtccgctcacatatttatatacatgacttgttataactagaccatttctcatacatatggtcacatgactcatcttatggcagagaatttggcgatgagacctccaacatcgacgctcaacatctttccatctcagcctatgcacatagagccacctccttcttctacacacaatgtaataattattactattactttataaatttctatatatatatgccaattttagttggtttctgtttctaatttaatataatgtcagcgcaactactagccatttcatataatatcaagtcagaccaattattatacgtttcttatttttctattgagtagtgatttgattgttttttggttgttttatataatgtgtttggtaagaccgataatacaagattagttccggctgctcaacctagtggttccactcgaccagcttctgacccgtccatggacttgaccaatcattctcagtttcatcaacctcctcaaggttctaaatccatcaaggtctctatccatttatgtttttttaatcatttaattgctttgtcgaactataactcgagtatagatatagacttgttgtggttgtttttagaagttaatgggtcatatctaaatgttatggcagaaggaagggaaccgcaagggtcttgcctcatcggaccatgacatacctaaatcgtcagaccctaaagtgagtgtatattcatacaactgcagaaaattaataagattcttttttttttttttttttttacttttcggtttttgatagtttctttattaatttaattctcaacagacattgagaagactagcacaaaacagagaagcagcaagaaaaagcagattacgtaaaaaggtcagcattcaatatttgtaagttgcaaatatagtttttatatccaaatttatttataacgttatttgctttggtaaattacgacaggcttatgttcagcaactcgagtcatgtaggatcaaactgacccaactagaacaagagattcaacgggccagatcccaagtaaatatttgaacctgtcttttcatatatattgtatttaacctaaagtctaaaatgtaccaatttaatttgatttcctatatatgtttagggcgtattctttggagggtctcttataggaggagatcaacagcaaggtggactacccattggccctggcaacatcagctctggtacgttaatagtttcataaatgtgatgactcaaaaaccgtaaaatttgaaaaccgagagaatgagatattgagtaaatgcaatgtgaagcagaagcagcggtgttcgatatggaatatgcgaggtggctggaggagcagcagaggctattaaacgaactaagggtggcaacacaagaacacttgtccgagaacgagcttaggatgtttgtggacacatgtttagctcattatgaccatttgattaacctcaaggctatggtcgctaagaccgatgtcttccacctcatttctggagcatggaaaactccagctgaacgttgcttcttgtggatgggtggtttccgtccatcggagatcattaaggtacatctcgtcttttcttatagccatatacatatatttaggtttttcgagagatatttacttattctattcgagccacatcccacacaataattagtcatgatgatattgtaaactaatcaaatatggattaataaatctaaattttggaattttacttgaagactaatcattttaaattttatcttagaacctaaaatattccaggatacaatcattaataccatcaattttgtggattacttgcagaacatatactaataatgactgaaattgtgacattgttattatttatatcgtacatatatgtccacagaatatagtacttccaactttattttattatttagatttttttttttaatttagtctttgattctcgtaaaagaggtacgatatagtaataatagataagacagacaagagatagactatatagtgatattgttggacgaggtatatatatacataacattgcatggggtgactctagatgtataaaaccaacatatatacgtgaatgtctttatattacgacaataataaaggtacacgtaaaattattttgaaaacaaattaagaatgcatgcaattgtgtgtgatggtgaagtatctctagaaataggtaggttttggcataatgcaaaagaaagtgcctgtctgttttttcgatttatgggatccataggagagagagatagacataaaccaccatggaattcaacagagacgaccataataaacaaaccaaaaataaataattgtttaacatttttagcacgctcgtcaattggatgattatcattttttttcttttctaaaatggttacgtaaagccattttaattaaacctactttttattctaaacaatatgagtacctacgatagccgattaataatacaaattaatatatggatggtgtgcatatctgacaagacctttggcaatgtctcaatcttatatcctttttagtgaaaataaaaaggaaagaagagattttgggtgtagctagtaactcgtgcagagtacatacactacacactttaatgcattcaacgttctttatgcatccattaagaccattgttaattaatcctcgatatctcaacttgtgtgtattaattagaaacgcatgcatgcaggtgattgtgaaccagatagaaccattgacggagcaacagatagttgggatatgtgggctgcaacagtccacacaagaggccgaggaggctctctcgcaaggcctcgaggcgttgaatcaatcactttccgatagcattgtctctgactccctcccgcctgcctccgcaccacttcctcctcatctatccaatttcatgtcacacatgtccttagctctcaacaagctctctgctctcgagggcttcgttctccaggtacccttataactctttctttttaagtttatgtgcaattatatatcaatataccaatcttttatctttatataaaaatatacctatagagttgatatacaagtggacccctagaggatatatgtggtcctaatcagactaggaatacatattctgtttctttgaactactccttattaaactcaactatcatatacttatatatttctatatttggctgttataacacgctatctaaatttatatagatgtttgtatatatgtgtgtgtctgttttgtgtacaactcatatataggtataacgtcggccataatttgttagaggacatttgtaatatattaagtgtatatagaataaaagtggttgattttaaagaagatgtcaaaactaattcgcaaacttaataattatgcattaacatgtatatgtatatgaaatggaaagtatttgcctcttgattcggacattatgcaagtaggtatctaacaaacacttctcttgtcttatatcaacttggtcgggttgcttttcttagacgaccaagtttattaatttaatatttatttcttaatcatttactagtttaggacaggcaagtttttgaaacaaagaaatatatatatctgcttgtgtatattaatgtataagtctatactctatatgcaaatggacatttcggctaattaattctatacaagatacatgcatatacaagttggcatctttcaatgatttcttaatataattagttctaaattgttcctgttccgcctataaaaaaagtttttgtgtttcgctacacggttagtcgctcacaatttggagaaagatccaactttaaaataggtggtaaatgtggggttagttactaaaaaggggtaatgaattcaattttctctaaacgcacgtgacaattggcaccatgaaagtatgtattaagtatacatattccaatatatgtagtccaaaagaaaaatacatatattatgtatctataatatatcacatcaaataaaaacatggaatgcttggagcccatatcgttgcatgatgtcatggacgtaactgcccaagtatcccatcctccgaaaacacttccttgagaataattcctttacttacatttgattctgcatttttttgtctacttttatatcattgataataggttgattatatatgtatgattctaattaatgatcaaaagtatcatgaagcatggcgtgggaccgagggtatggaattcacggtttcacctttttgacatgttggtgtcgtgttcttattagtgaattactaacaagctttgattttttgatcgatcaacatgttgaataatcggcattagtcgtcaatcaaccacataatttcgggtcatgcacaatcattataatgcttaattagtcctttatctgtttttttcctctctagttagtctttaatacttatatttatgagattaatgatggtccaattcgattatttgtccttaattggtcttagtcaataacatgtgcactactttgtccatcttttgttttgcttttactatttctccattttccctataactcttatttagttttgaactagctaatacattagaaacttacaggcggataatttgaggcaccaaacgatccataggctgaaccaattgttgacgacccgtcaagaagcacggtgtcttctagccgttgcggagtacttccaccgtcttcaagctctaagttctctctggctagcccgtcctcggcaagatggataatactaaaacaactgatgaaggaaaccaaaaacaaaaacaagagaataggttgattagttagccgccagcttgacctctttatcatatatatcgtctctctactcaaatacagtgcaattagggaaaattgtttggcttctttttgttatatgattcttactattatgtttttaatcaagatgcagattatatatatagacaagtattccataccttttaatgaattcttccttatgcaaattcaagtgaaaaattatacttgatcttcaattccaaacacaagaacatgagagagtattgaaaggaaacaaaaatagaaggctggcaacaattgcagttgcatgcaagacttatcacttgttaggtcaaattaaagcattgaccagtgaggaaggtgacaaatggtgagttctgtaggataccgtcagggacttgggatcagtaccgttttgctttgggttcaacgcccttctctctctcctttacttttcatttctttgctgtcaccagttaatttttttcaactcttctatttttatttcttgactgataaaagtgaacattacagtagtacacatgcatggtcaaatcaaaacaacaaaaatctttttacatcacaaaaaacgagattgatttagccgcaaatatttgaaaaaaaatagtttctaagtacatacactagcaatcagattatacatgtgtttattcttggactacaaattcgtttgggccgtaaatttttgggccctaaagttttctattgaattttatttctttttaagagaaggaaaaaacgtacaaacaaaacattataactaaagcccactacttttgggttttagagtaaacccaacaacacagtacatgataagaatagaagcaaacagaacaaaataataaaacagagcagataaacacacgaacacaagaaacacaagttacgagcagagaagacctaaaagccacaaagaagttttacaattcaaagcatacaatctgcttttgaaggtaatttcctgaagaagttacttggagcagaaggcatcttgcttctgaacttaggatgcctcatccagaacatcccacccgcaagagctatgatcttgaaaggcgtcacgtacaaaatcatcgcagcaacaagacaaaaaatcacaaacaagcaagtcgcacgcggatctctccaactcaacaaagcctgaaacctctctccttgcgttgcaatgtctccaacaaccatctggatccgacccgcaacgcttcttaacctatcatacctcatcttcacaacatcttgtccctttgaagttgggaaagtatcaaattcctcatctagctcatcagggctagccgcttcagcccaagatacctttgtgtccatatgagcaggatgacgcggcctgaaccggaaattccaaagccctatcaagaacatgtagaggaatgtggttgggagtatcagctccggataacaaatcaatataaagaagagaacgtggaataatatcgtcgtcaacggattcttccagtagcagacgtctccgagccatttactcatagcaatcaagcctgcaaacacagacactatcctgaagaagttagctttgctccttctcatgctccacatgtgtgaatcaacatcaagcatgtactctacgttctctttccttaaaggaggctctgctcgagataaccgtgctgcgacaatgctcattgcttggtatcttagactgtctaattggttcacagtgaatggatggagataatgcatctttggaagcagaggatggccataaagatagatcatgtgagccaaggatagacaagtgaatctcacagctaattggacttctcccattttctttaacccttttgtttgcagaacaagaagagggtaggagtgagtgtagattctatcagcctctagagtcgacaaccggatccttaccttcccgattctcgaatccactttggctccactgttcgatttctcacttccgccaaggtgacagttatcgaaaactcccagtgtgataactgtacaaggatcatacacttcccatgtgtattgctcattccatttagggctagagctgtcaatgatggttcttgttctcacccatttttgaccgtacttggcaacacaatacggatctgttgtcgctttaccgtcttttgttttcataggcgatagcccttgagcactcaagattcctacttcaaggatgccaataggagacttccatagttgccttgccgtaggtttcacgtcactgatgtacagagttgactcgtccattacatggtaacctccttcaaggcaaactcgtaggtggattcggctggagaacttgagctcgtgtctcttgtctccttccagagccccaaacccaaacttttcgaggttgtaccatttggaatgaacagctctgtgatctaaccttttctcaaatacgctcaaaggtgagatcagcctccccatgacttcatctttagctggtgtcaccttgttttcgaccgtcaagaagaactgttcttcaaatggctctgcagctacaaaaacaagatcttcgttccacatcggattcgtcgtcttgttaggacataactttgttttcagaatctgattcccaacttgtactttaacgaaagcttgaggtggttggctcctgtcactaggctcaacatcttgcgcctcgatgacattaacccgcagataccacaatttgggagatacatagactttagacctcacgctttggacaccttctccttgaacagaggaagcatccgaatgccaagcatcaggaaatgcttcatcggcttgcgtcccaagccaaaccgctaccataacctctcctcttttcttactctcacctcgccgatcttctaatctgtaccactgaggtgcaagtggactatcaggaggaactcttgtaggaacctcacgcatatcaaacacaaccttcccgatgtattcatctcttgtaaccatctccttatcgcgcacaaagacttcaacagtagaggattggaccttgtcttttgaaaatgcgaaaacttgattccactccgggttggttcttttctcgaagtgtttagtctttcctttgtagtttcctattttcacttccacataaggatcacagttgctggtgacagggtttggaggaagatccttggctttgacgacccgaacatagagataaaacatttgctcaacaaggtcatatgtgcttgcagctcgttcactgccaatccatccggttcctccacgctgtcctccatgtggccatctctctccaagctctggtttcatgtctttaagcttatagtcttcttggctcttagctccatctttggctgccatggttttagattacttgaaccaaaagattctcctgtttctttcaaaacgtttcaattctgttcctgacatacaaaaaaacagaatctgagaattgcaggaaaaaatgattagacaaaacctgtttcttggatgtaaagaaactaatgtatctcatcagaactgatttaaaacctttataattagtatttagtaatttactttcaatctcaaccaagataattgaaaggattcttacctgatttaaacaatatatactaagtggtcgacgcaaatataagctttgtctcttggttctgttccatgaactcattcaagtgtttgcaggaaaacacagaatgtcttgaattatcttttgcaaatgaaaagtaagagaaggattaatatgaaaacgataaatagagagtaaatgaagagaaaaagaagatagcaaacaaaatcaatgaaagagataaatctatagtattcgaacttacaaaaaaagagagctatttttatatggaccaacaatatttcaagaacatgtatatatgtaaagaaggatgcgtttaacttagtaagcagtaccttgagaaagatgttgaagaagctgccataaaattctctgtttgctgctgtaccatagaaatgaaaaaaagaaagaaagaagaatttaagaaaccaagaagttaagagttattccataatcaaatttttgtttgatacacagagagagaacgaaagagaaacaattctatctcaaagaaaaagaagaatcaaaatgaaaaaggaagaaccctaaaaaattacttcttattctctctgtttttctccttctttaagagggaagctgattctttttttttgttatcttcgttttattaaataggaaagcagattcttcgtttgtcttaagacttttaggtacattaagaaatttttcagcagtgacaaaggtagaaatagtagattctctcacacttgtaaaaaattacaccacatatttgccaaattgcatgactgatttcaaggatgaataaacccggataaaacactcaaacccaacatcaagtgaaactttctcatgctttaatcaaaacttttcacaaaaatagtttcgcatcaatatataaaataaaacatgtaaacataaatttacaagaactcacagataatatacttagtgccaaagtgataattagaaacatttccaacaccaactttcccctgtgagtatatatatctttagtgtttctttctttctgcctcattggaataagcatctaaaaaatagctttttggagtttgaaactttttcataaaaagcaaaagggcaggctaggctaaggagtgattattattatttgattgagtaacatcattaccttattatctcgccatttttatttctaatgcccgcactggagcttattaaactatttggtaaaaagaatcagtgaaccg

SEQ ID NO: 1409 - DNA, 104607 bp, Arabidopsis thaliana
aagcttaagagatgggagcgagaaatcaccattcgcatgtacggattgtcaccgaagcaagattcgcaggtgattgggaaatcggcgctttcccatccatcggctccatgatccctgtgagacattttcttcggtactagatatcaatctcgtgacgctacttttataggccaaagtccaaatcgatttggaatttctcttaaaaatatgggttagggttaccaattattgggctttaaactgggcccgttaaggctcaagcattaagaaactttcaaaatcttcagcacacagacacataatagtctacaattcatcatcaaaatacgaactttgatttcaaaaatcctgaaacattgttaacaggaacattgattagtagaaaagtacccctccttcagattcaaagtttcaacaatcaatcaacacagacgacatttaaaagaaccggggacatcttagcctcttaggatttaaatgtttcaacaactccttgatttttcttctttgatcttcttctttttgagtttcttagtcggttaattgacaaagttgttatgtcctatcagtaatgattgtccagtaatacatatgagtattgaaacagagtttaagatgcaaaaagactagatggaaactggaaaaatagttatttagtaaaccaaaatttcacaaatcttgctgctatgtatcgaccaaactcttaaagaaattcaattactgtactcatgaaacaatatacgttcaaaacttcacaagaggcaaggtaaaaaaaaagctcgtagttgttacaaatcaatcaactatctacaatttttgtagtctatatgcaaaaagaatccattttgtgcaattgttattgttttccttcctctgttttcgttagagtttcttgatgcttgcttctgtttcagctgaagtcgcaagagggttaccattttcatgttcctgcaacaattcatgtgcttgcagttgtaggcttgtagctgaacttgctatgatggttcttgctctccttgttcatcctgcagtaactgctcctctttctccttctcgccttgccaaacccaaacaatatctgccaaagcaggcctaagatcctcctccactaacttctgatactccattgtatctccattacatttcttcacttccaccaggtgaaacgtcggcgtcacttggaatatctctgcatccatcgtcaaaattccgttttttccttcctttactctttccagtttgaacaagcctgcgccttgctttcttatcttcagcttcaggcacttggcaacctctactagcttagaaatgatctctgaagcaggtttttgcgacgcgaacctagattctcgcttgtcatatacatccccaaaaagtcctgccagaccaaaccccgtagacaaggcgatgatatcgaaagcattcaaggtagcaagtcgaggcggctcgtggttttctccgttttcattttggcctgaacctccagcttccatgggattagtagcctctctgacttgttgtttctccatcttttccatctttttttgcttcaaatgcaaaccctttctgaaccaagaactctccttgatttttgcaatagtgattctagtctcatggttagggtccaacatcttacacaatagtctctttacctcaggagcaaaccagctgggacacttgaagtctgctttacctatcttcctatacatctccataagattagtgtcatggaaaggaagataaccagccaaaagaacaaacaaaacaacaccacaagaccaaatatccgctttcgtaccctcgtatccttttcggttaataacctcgggcgcaacataagcaggtgtaccacaagttgtatgtagaagaccatcttgccgcttgcaatcagcaagcgcacttaaaccaaaatcagataccttaagattatcattgtcatccaacaaaagattttccggcttaatgtcgcggtgataaactccgcggctgtgacaaaaatcaaccgcactaataagctgataaaaatacttccaagcaacatcttctttaagttttccttttgcaaccttgttgaaaagctcaccacctttacaatactcaataacaaagtaaatccttgactttgtagccataacctcgtataactcaacgacattcgggtgtttagcgatcctcattacagagatctctcgcttgatttgctggctaagcccgactctcataactttgtccttgtcaatcatcttgatagctacactctcgttggtatgattactccttccaaaatacactttagcaaaagtaccttgacccaataacctcccaacttcatatctttcagttaatacacttggtttgttctccatccttaaaatctacaaacttcaaactactacctcaaagcatttgagtttttaaacccagtttgttgattccaaatcaagttaggttaactactactgaatcaaaaaagcacaataggatcaggactcagaagtctaaccttttagaccaacaacacaaaaccgatttcgatatctcctgtaacaaaaagattgagaagcaagacgaagagaaaccactcgaaagagaaaggaagaagaaacagtcacttctctcttgtatgatgaaaccgaattgagggatgaatccgaaagacaaaagagaacgaacggatctctctgtttggttgactagtggactcagttctgctcctctgtctaaattctttttatttatatttttggattttatgttttaaaaaagaaataaaggaaaatctaagagttcctttttaaatagttgcgtggaagtgaatagacattagagagagtcgcagagggtatttgttgctcgtgggctcgtccacctaacgcgctatatgcgccgttgatctttgatttttttttggtcggcgatcgttttttttttctttcttctttttggttaacttttattttgtggttttaaaacgataaatcctcctatttattttttattttatgtcgacgataaaagcctctttttttgtgtgtgtgccaacgataaaacctaatattaaaagcagttgtttattaaatatttaatccctggatttttttaattgagtttacaaactgaacttggtcaacattttcaattcttgattctttaagaaacaaccccaaaattacatattttaagtctcggtttgtttcggatgcgcctttagtcatagttatgaattatctatatattataactaggaaagattcaaaatgtgattgtagtaatttcgtgatcgtgaaaaccacaaccctgcaagatgctgatgaatcaatctcatggaatttttgcaaaattaaataattaaacctatagctttaagattgcactagatatatcacatctcaatatcatttatttctatctacattttaagttaagctgtgtaatgaataattttcttaagatttacgtggatcataataaattaatgaaagctctgatgaaggagtttgttaggggaaaaaactgaatcaaattcttgtacgtcatacatattttagtgtggttcgtaactttttcactaaatttttaaattcagttaaataaaaaaaactgtaaatttactaaaatgtaaatgaaatttataaaaaaaatatttcaacataagaagagttcataatggaacaatcataagaagaagctatatatggcgatgtgtatgcactgcagatggtttggagtcacaggctcatagcctcatatgtttacgttaatcatcatggaaagcgatttttgatccaaaaaaaaaggaaagcgataccaaggagcttgtggagtttatggtgatgctgcttttgcgctggttaagttgaaattcagaaagaaagataacccaaaatccaaattaatgattacttcaaacacttttgcatatggagaagaagagctgttcaacattaaacggtacaacgcagcattgaatttccgtgtcccaagcactgactgatgatcattctctaaagtctctataaatatgaccatgtgatcgtacgtggctcctcatgactgccccaacaagccaattactaaacttgtctttatattgcggttccaaaagatctgatgttgatgttctccaaaacagaaacacattttataagataaatgtaaattaaataaagcaattgggaaatatttatatagagtgatgatgaatacgtgaggactagtttatacaccacaacacaaaaacgcgttttgctcattctctctctctcgcacacacgtcaacaatcatatccatcgatgcatttgacttcctcgttcctccatttacatatgtagatccagttatgaaaggagtactagttccaatttcaatacatttatatttaatattttattcaatacaaaagtgttgaaagggattcggataaaccaagcatttttatgtgtatagaaaaataatacttgactttgcagtttccatttccaatcttcaaagtcatatcttaccaaactcacatctctagctaatatatcccctatattttgttacaaatatatatatatatatatatcttacacaaagacagtgcatgtgatatagaaatcaagatgggaagccaaggcatgagttcaccgagtcccttggtggtgaagaaatcgcaagtggttatagtgaaaccctcaaaggctacacctgatgtctctctttctctctccacactcgacaacgatccttatctcgaaaccctcgccaaaaccatctatgtctacgctccaccatccccaaacgaccacgtccacgatccagcttccctttttcagcaagctctctctgacgcccttgtctattactaccctctcgctggaaaacttcaccggggatcacacgaccatagactagaattgaggtgcagtcccgcggaaggagtcccctttgttagggcaaccgcagactgtactctctcttccctcaactatttgaaggacatggacactgacttataccaactcgtaccttgtgatgtagctgcgccctctggcgattacaaccctctggctttgcagatcactttgtttgcatgcggagggctcactcttgctacggccctctctcattccttgtgtgatggttttggagcgtctcagtttttcaaaaccttaactgagctcgccgcgggaaaaacacaacctagcatcatccccgtctgggacagacatcgtctcacttctaacaactttagcttaaacggtatatgttaactagtattatctaaatataatttcttttagatttagacgcattactaatcatcttgatagtttcagatcagttgacaaaaaatagattggtccatatcttttatatattgttgttttaactttattttatttataatgtgatgttactaattaacattgtatatatgtaagtagggcaatgttttatattgtagttttaaatttattttatgtatgatgtgatgttactaattaacattgtatatctatatgtaagtagaccaagtggaggagggacaagctcccaagctagttgattttggagaggcttgctcttctgcggcaacttctccctacacacccagcaacgacatggtatgtgagatcctcaacgtgacatccgaagatattactcagctcaaggagaaagttgcgggggtggtcacgactctagagattcttgcggcccacgtctggagagcaaggtgccgggccttgaagttaagtccagatgggacttctcttttcggaatggctgtgggtatacgccgcattgtggagccaccattaccggaagggtactacggaaacgcatttgtcaaagccaacgtagcaatgaaggctggagagttaagcaactcaccgttgtctcacgttgttcagctcattaaagaggcaaagaaagcggcacaggagaagaggtacgtgttggagcagttaagagagacagagaaaacgttgaagatgaatgtagcgtgtgaaggagggaaaggagcgttcatgttgcttactgattggaggcaacttggattgctagacgaaattgattttgggtatggaggatcagtgaatattataccattggtgcccaagtatctgccggatatttgtattttcttgccgaggaagcaaggtggtgttagagtgctagtcacgctgcccaaatctgtaatggtcaacttcaaggaacacataaatcccctaaatacatgaaattaataagcaggtgaatgtaattcacagtgtttctttaaaatatgaaaaggacctcatgcgattgtatatttaaagcttttgtttgctgtttgtttaagtttttcacatttggaaagtaatattttacaaaccaataatgtaacgccacgtcagcaacaatattccttctaaagaccccacgccaatattccttagtggagtttttaaaatcactgtttcatctaaaaactgattttagctacaacaaaatataaggccgaaaaagaatgctttagttgggcctaaatatttcatgctgtaaaaatgggcctatctaaataagcccaataaatttatgcgagaacaacactagggttttagtttttcttttgatatataatgtaaagggcgccgttaatcgcagcctcagtggaaacagagcagctgcaaacatggttcgtcttctcaatttctcgtttttctcccaattttggtttagtctgtgtctatgtctcttctgtttagttatatctggtcatggatattcaattatgggcgttttggttagtttcttaggacaatggcgactctagttttctcgtttcatgccgtagaccgtacctgtaaatgtttcagactgcgatgttgtatttttcttgacaattgagcttctgggtagtgtacttttgactaggctctgtcaaatgtgataactttttattgattgaatcgtctgttgttttgaccttttatatatcaaatgtgattatgcaggcaagaggattgaagaagcatctaaagaggctcaatgctcctaagcattggatgcttgacaaacttggtggtgccttcgtaagttgtttgtctcatcaatcttgtgtttttaagacaattcattacatttgttctgtaatgttgatgtgtttgtatcgatcatttttatgctgtttcttgttgtaggctcccaaaccatcttctggacctcacaagtcgagggagtgtcttcctcttgtcctgatcatcaggaacaggttgaagtatgctttgacttaccgtgaagttatctctatcttgatgcaaaggcatatccaagttgatggcaaagtcaggactgacaagacttaccctgctggtttcatgggtatgtctttttttttttccagttatgtctgccctttttgtcgtatgtatttgatcactgaactaaattgcattatggtttgaatagatgttgtatccatccccaagaccaatgagaacttccgtcttctctacgacaccaagggacgtttccgtctccactccatcaaggatgaggaagcaaaggtttgttgcactctcttcttagatcttgactggaattagaactagtgattggaattagaagattgattagtctttttctgcttgaatgtgcagttcaagctttgcaaggttagatctatccagtttggtcagaagggaattccatacctgaacacttatgatggtcgcaccatccgttaccctgacccgctcatcaagccaaatgacaccatcaagctggaccttgaggagaacaagattgttgagttcatcaagtttgacgtgggtaacgttgtgatggtgactggaggcagaaacagagggcgtgtgggtgtgattaagaaccgtgaaaagcataagggaagctttgagacaatccacattcaagactcaacagggcatgagtttgccacaaggttggggaatgtgtacacaatcggcaaaggaacaaagccatgggtgtctcttccaaagggcaaaggtattaagctgaccatcattgaggaagccaggaagagacttgcttcccagcaagctgcttgaaagtccaactgctttgaatcatcaagacccgtttcttttacagactcgctgcttgtctcagtttgtgagtctatttcttttcttatgttgttggatttcaaaacccatcaaaaaatagctgagtagtgctttttgtaatgtttgtatggtggattttttggtgatttaccgtttaaatcagatgacagttggtccactcctttgcttagtcttctcctttgctttgcgctattagttgttgagagatgagtaatagatattattttcttggcattaagtaatctagaagaagacctcaaggactcctgaaagtgatgtgaattcagccgccttacacaaaaaagtcaaacattttggtgttttgaatacacacgcttcacacttggtcacaagcttatcttttataattgcttgcttttccttggaaacatcctttccttctatccaactcgtaatttaatataggaagaagaagaagaagaagagtacctcatacgtaaaccattgatgggctcttttgatcgccaaagagctgttccgaaattcaaaacagcaacaccgtcaccgctccctctttctccttcgccttacttcactatgcctcctggccttactcccgccgactttctcgactctcctcttctcttcacttcctccaacgtatctatctatctcctccaacgtttcaaactatgattgtttgtccttatcttggaatattgaaagaattcaaggttcttgatttgtccatttcccttcttcttctctcatatcatcttcttctttgatcttgaaatcacagattttgccgtctcctacgacaggcacatttccagcgcaatctctgaactataacaataacggtttgctcattgacaaaaatgaaatcaaatatgaagacacaactcctcccttgttcctaccatctgtaggatccatttttgcatttttagcttctgctttattatctcttaagacattctagttttaaactatctcattttcagatggtaactcagcctttacctcaactggatttattcaaatccgaaatcatgtcgagtaacaaaacctctgatgacggctacaattggcgcaaatacgggcagaagcaagtcaaaggaagcgaaaacccgaggagttacttcaaatgcacgtatccaaattgtctcacaaagaagaaagtagagacgtctcttgtgaagggtcagatgattgagattgtctataaaggaagccacaatcatcccaagccccaatccacgaagcgatcatcttccaccgctatagcagcacatcagaacagcagtaatggagacggtaaagacattggtgaagatgaaacagaggccaagagatggtaattagcagactcataattaagtaactgaaaccaaaaggatgaggagacaatgagatgtctgattggatttgttgtgaatggcttataaatgcaggaaaagagaagagaatgtgaaggagccaagagtggtggttcagacaacaagtgatatagacattcttgacgatggctacagatggagaaagtatggtcagaaagtcgtcaagggtaatccaaatccaaggtgtggttttatttttctcttgtcaattctgaatgaaaaggaggcttgaagcttgagctataagttagttaaatttgtgatgtgcaggagctattacaagtgcacatttacaggatgttttgtaaggaaacacgttgaaagagcatttcaagatcccaagtcagtgatcacaacttacgaaggaaaacacaaacaccaaatcccgaccccaagaagaggtccagttttaaggttacttggaaaaacagagacataaagagcaaatgagttttggcatttcagcattcctattgtaatctttcattcatatatagtatgtttccttaatcatgcgcctatacacacataactgatcaggactaggcagaggctaaagttccaagcttctccatcattttgccccctatgttcactaccgacgataaatctttattcaactgtttcaagatattaaatcaaacatacatcacaccaagtgtttgacatgatgatgatggaatggaatggatggtggcaaatgatgtgataaacacacaaaggcatacacataaatgtatattactacaaagagcggaatatttttatgtttctttaaaaagaaagaaagacgcaaaagcacatgtgatagtagccgacagtttgaagtaaagccagcaaatcgtgaaagccatttacttttagatctctctctgcactctctgactttgtccgcaaagtagatctgctgcaatggcttctcctcttctcccaacttcgactactcctgatcaacttcccggcggcgatccacagttgctgagctctctacgcgtcctcttgtcccgcgttctagccaccgtccgtcacgcttctgcagatgccagaccctgggcagagctcgttgaccggtcagcgttttcccggccaccatcgctctcggaggcaacgtcacgagtaaggaagaacttttcctatttccgagccaattacataaccttagtggcaatcttactcgccgcgtctctgctcacgcaccctttcgctctcttcctcctcgcatcgctggccgcttcttggcttttcctctactttttccgtccggcggatcagccgttggtcattggaggacgcacgttctccgatcttgagacgctagggatactctgcctgtccactgtggtggtgatgttcatgaccagcgttggatcgctcttgatgtccactctagcagttgggatcatgggcgtggccatccacggagcgtttcgtgctcccgaagacctgtttcttgaagaacaagaagccattggatctggacttttcgcattcttcaacaacaatgcctctaatgcagctgccgctgccatagccacctcagcaatgtcacgcgttcgagtctgagattgttgaagagactacattcctacaccgcatttccaaagtgtgatatttattcatattgaattgttgtaacttgtaaccattcttttgtcatttctgttttgtttactttgttgctggaattttgaaacacaattcatcttactatacaccattaaaacgagagtcagtaaagaagaattttactaactctctcttgttttttgacaccaaagtaaaaaagatacgacaaattggtttaagctcaaaaccatgaatcgaagaataagaataaattacactgtgctctcatgttaagagctctctctatcgtattgccttgtttcctcagcaacctttgtccacacattggcgatcttctctgcatatccaacctgcacattcaaataccaacaactctgttttcacacctttttacatattttcatctctttatttcaaacatctcactcagatttctcagcattcactagcattgcaagagagcagatttcaccaattttcaagcatccattcaaatatctcaaatcatattccttttggtgaatccatttcatgaaagaaagtccccaaatcatagcatcccctataacactcactgacttttctcttccatttcagagctaaaagatcttgctttacactctctcgttaattctatgaagagacagaggtttaataatagtcaaagtccttatatgtacctgattagcaacaaaccctttcatcatattcaagaagtctgcacgcctttccctatccagcctttcaacctcactccagttattttcctgtcacaatatacatagttacatatgacctcaaatcagcataagagttgttttgtatatggacatgactgaatcgaataccttgatctgctcgtactccctgatggcaacatttttagagtcttcagtgaccttgatggtttcttttaactcttctatcttcttaatccttgatttgtcaccgccaaagacctttgatgatgcaacttctagcttttctgctcttgcttccagtgaagaaagttcagatagaagcgtctgcactgtcaataaagcactagatctatctgcaaaggcgccctggactgccatcattaggccaaggtaatcgtggagtgtgtcctgacatgaataattcagagctcttagtgaaactaaatcccagctcaatgaaagtggaatagattcttcatatctctacaagtatctagtttaccaaatgcttgaccgtctgggaattcaactctctgtaaaatctgcttgctttcacagctgaagtggctaaattcttcatatcattggcacgagctctttgagaattgaagacagcttcttcgttctcgaatttcgtcagtttaatgaatgctaatcccaattcccccatagtctcccccatgtcttgctgtgccttcacgagggattcagcctacaaaaaacaaaaaccatgaaaaatactgatcttttgtgaagtaacaagtatgaaatctctctacctgctgtgaagcattaatgatctgttgctcaagatcatacattttctccttcttctccaaaaactctttatcttcttccacaacaggtggttttgatccaccccagtcattagaaactgactgtctaagttctttaaacattctcagaaaatctctacctcctctacccggctgaaccacctcaaccgaagaagctccaccgccttcaccaaacaactgtttcggcagcttcacagcaccatccaacatcctagaagccacatctgtgctcgtagcaagcggtaacttcccttgcgcttgaagaaaaaccttcaattcatcactgttcctgatcacaggatgtgcaacaagcctacgcaaatacttctccaatgcaactcttctctgctccacaaactcttgcttttgcatcacttgactctcaactatactcttatctggcctcggtggaatgcagaaacctctataagactcagctaatctatcagccaatgtaacaatgtctctgaatcttctcctcacgctaaactccgatccaccgtagtcagagagattcgttctagttgtaatctggtaagtgatgtaagtacttcctccaggaatcattgaatttgtggcctcttgctctttctgagggttagaaacagtgatcttgatgtaatcagagctcaaagaagacggagatctagataatgaatctgacgactgactatgaccatcttctgagccattgatctcggagatatcatcgaaagggctgaagataacatccgcgtaagacggaggctcgaggtaagagctgactctgtcgccgccgtttggtttagaacgaggactccgagattcgctgtagtaagacggtggcgcaaaaagtggatcggaatcagctggagttacgacaatcgacgggtgacgcgagtcgaagagagttgacatagcgctgcgataattagagttggatttatcgccgttgacattgcttttggtcaagggatcgccatcttcgcggagaaagagtttctccatctcttctttggatgagtggagatgggactcttcgtcattctctgagcccatcatctctggtaaatctataaggtgagctaattttagtaataaattcacaggaatttagggatttttcgattcggttcgagataacggagattacgaggatacggtggtcgtgaactgcaataaataagcggagtggctaagtcacggcggtgttggctccagatattgaatgtagtagcgtcaagtctcgtcaataactaattggggaagatgagatggaaagagtaatatctttcgggtcacgttaaagtgtttagctgggttttgacccgacccgtagcagcccagcccagcccaatatgcaaattattcttatacttaaatgtggtagagatatctctgcatccaaacgacctgactataggtctacttggttctttcttccacgaccgtatcgagtcaactactgtaataagatttccgatgaactcagggactcgaaattggggttaccgggtccgagccatttgggaaactatcgattctatcttcaccttatgctcttctgtattcttcggaaatgagaatgtagtagtctcatggagtttccaatggcgagaagcttaaagctctgttttctattggagaagagcaaaacgcatgattatgatacggagacacttctttcgtcatatgagagaagagtaaacagttctcgaggttttagagaatttttatcactttcagtaatgtctttgaagcactcaaagtcactgaaatttctggagaagctgaggcagcagatgtctcatgtctaaaaaaggtagctgttttcattcttattcttcgttttttaaaacacattgatgactgagaaaatcaaactcaacttggggacaagttgatgatgattgatgacgcacgcagcaatagattcggtttatagattttgggatagtttattaagatttctgatgcagtaatcttaattgggaaatagtaaagattctggtttaaggagaggatccaaaagcttttagagatttggtgtccgaggatgagaaaaaatcaaagaaaaggtactaaagtaggctggtaggggttcacctacatcttctggaacaagaatcatatttaaaactagaaagtagaaactgtttgttttgttgtttagttgttacaccaaatggtgtgtgctggttagactataagctctctgtctcctgcctataaaaagtatcaactttctctttctcttcgagtaagtgagcgcaatggagcaacttcgacccttctttctgttgttggctatttttgtagcttcacttgtcaatgcagaagttcactttcatgagtttgttgtgtgtttactacttcgaaatcttttttgttttcttccttgttacttacaaaagatgctcaacttagtttattctttttgtgtttggttagatccaagaaacgccggtgaagaggctgtgcagagtccataactcgatcacggtgaatggacagtttccagggccaaccttggaggtgaggaacggcgattcccttgtcattacagccataaacaaagctcggtacaacatcagccttcactggtaaactcactctttccttgcatcaaatcaatcaatgttttatcgctagatagtctgctaatcagaccatgtgcaggcatgggatacggcagatgaggaatccatgggcggatggaccagaatacataacccagtgcccaatccaaccaggagggagttacacctacaggtttaccatggaagaccaagaaggtacattgtggtggcatgcccacagtagatggctgcgagccaccgtgtatggtgctctcattatccgccctccgctctcttctcctcattacccttttccagttattcccaagagagagattaccctcctcttaggagagtggtgggacagaaatcccatggatgtcctcaacttagcccagttcactggagcagcaccaaacatctcagacgcctttaccatcaatggtcagcctggtgatctctacagatgctccagccaaggtacagatttagtttatgtttcccatgcgccacaagcagctacatcttagttggttaatattatgtgcttgtcatgttgcagaaactttaagatttctagtggggtcaggagagatagtcctcctcagggtcatcaactctgctttgaaccaagaactcttctttggtgtcgcgaatcacaaactcacagtggttgcggcggatgcctcctacaccaaaccattctcgaccaatgtcataatgttaggtcctggtcagacaactgatgtgcttctaactgcagaccaaccgccagcacactactacatggcagcacatgcctacaacagtgccaatgctgcctttgacaacaccacaaccaccgcaatcctcaagtacaaagacgcctcctgtgttactcttcaagctaaatcacaggcacgggcaatacccgcacaactaccaggattcaacgacacagcaacagcagcagccttcacagcgcagatgaagagtccttcgaaagtaaaagtgcccctggagattgatgagaacttgtttttcacagtgggattgggactattcaactgcccaacccccaacacacaaaggtgtcaaggccctaacggaacacgcttcaccgcaagcatcaacaatgtctctttcgtcttccccaaacaaaactccataatgcaagcctattaccaaggcactcccacaggtgttttcaccacagacttccctccaacgcctcctgtcacatttgactatacaggaaacgtgagcagagggctatggcagcctactcgcggaacaaaggcctacaaactaaagttcaattcgcaagtgcagattatattgcaagacacgagcatcgtgaccactgagaatcacccaatgcatctccatggctacgagttctacgtagttgggacaggtgttggtaacttcaacccaaatacagacacatcctcctttaacctcatcgacccaccacgaagaaacacaatcggaacacctccaggtggatgggtagccatcagattcgttgccaataatccaggagcgtggctgatgcactgccacattgactcacatatattctggggtttagcaatggtcttcttagtagagaacggagaaggacatttgcagtctgtacagtctccaccattggacttaccccaatgttaagactgttatctacacacatatacacttgtatattctcaaatttgtttcacaaaacatgtcattcattttcaattacaaaagataaacgtatcaagatattttaagtccaaaagtatttttcaattttgcatgcaaaaaaaaaagcaaaactatgcaccagccgggaatcgaacccgggtctgtaccgtggcagggtactattctaccactagaccactggtgcttgtatgtcccaagaggaaaatacacttatattaccaaacatataataatgcttgtagtttcgttcagttaaatctcactgagcacttttcaagtagaagagacacaaacatcgttaccttcgccgccatggcctccgcactcgaatgctggacaacacgtaatgccgccggtggttgcgccgacgacgattttgttgaccaagtcctaatgtcctccgaagacaggtctgagtccctcactgctcctccaccttccgatcaaacctcttccgctatgcaaaagcggtttcagcgtctcggccgcaacgtctccgacgcgatcgcgtcgctcaagaactctctcaacctcgattcgagtcgagacaaccaaaatgcagctaccggaggaggtagaaagctcgtatgggctactgtagtgagaaaccttgctaaaatgtatcctggaagccagttgcctgataaactcgtctccaatctccgaaagcattacgattctttgcctctcaggtaacaccagattctcacagacgcttaagatgttgcgtcatttttactcttcacctaatgtttattcttctcggtttcttaaattattaatttagtgttatgtggaagatacaaagcttagatctagatatgttgttgtattgggaatagatcatggagtaatgtggattaaatatggttttgttttgtaacagttatagtcagactggtttcgatatgaaagatgtatttgtacacataaagttgatagagcaagcttttggagatgataatcctgtgtttgtgattcaagaggtgtgtgatgaggaagctgatgatcagggttctgtgtttaagctcacatttgcttgtacttgttcccttccatggtcaaccatttcagggtctcttgatggtgctttgatttgttgtaagaaagtacaaatctttgagaagaaggggttgactcttggagttgttcttcttctggttgagtctggacaagaaaaaatgttcaaagttaaggttgtgaatgcccttagatctgcggtgaggaagcccaagtcaacctctgtgaagctcccatttggtctttgtggctgtgaagaacagaatgctggtgttggagaattcggggatgttgatgtggagtccattgatcaatgttatagacatgagttggatgatctgaatactaggattcagcttcaaatgccacctccaagctcttcgttttctgtatcagtagatgaatggcagactatccaatcaggtggtgatgatatcagaaaatggctactgaattcagatgatctcgagtttagtggtcagttaggaccaaattcatttaaaggagtttacagaggaacaaaggtggccattgagaaactaaaaggctgtgagaaggggaattcctatgagtttgcaatccgaaaagatttcttggagctgatgacctgtggacacaagagcattttgcagttttatggtgtctgcatcgatgaaaatcatggattatgcgtggtaacaaagttgatgcaaggtggttcacttcgtgaactggtgttgaagaaaaagaagcttcagaccaagttgatatttcaaattgctgttgacatagcagaagggatgaaattcattaatgatcatggtgttgcatatagagaccttaacacacagagaatactattagataagcagtgcaacgcttgtttgggtgatttgggaatagtcactgcatgcaagagtgtcaacgaggccatggagtatgaaacggatggctatcgatggcttgcacccgaggtctgtatttctttgacgctttccctgcataaatcatagttcattgatttgcctcaagattcatgcttaccattacctcatcatatgtgatctgtaagccaataatacaaaaaaacattgcctggtgattggatgatgtaattatacttgtaggcttcaaggtctagcttttcggttatagatgcaataccagacatctgaaagctacctacatgcttcaccatcactaattctccttgtccaattatgcataagtagattctatttggaaaagcagttgttgactgtagtttgtgaatggctgaaatcagataatcgcgggagacccggagaagacaagagagagttggatgagcaatgcgtatagctttgggatggtgctttgggagatggtgacaggggaggaggcatatgggtcttgctcaccagtgcaggcagcggttgggattgcagcgtgcggactaagaccagatatcccaaaggagtgtcctcaagtcctcaaatatcttatgatcaaatgctggaacacttgcccttccacacgccttaacttctctcaaatccactgcatcttgctccgtgccatttcacggtaacacattctcttctacataggaattggaagagtgcctctttttgaagaaatgtttagcaaaccaatagtttttgtgggtaacagaatagcttcacatcaatatagcaaatgtgatgaagaaagtggttggtgtatattttggttagatcagatggtagcaaccttgtggaccggaaagtagaataacagtttcattatcagttataagcctctttgcccagtccactttcatttttacactttgtttacattgtaaatggaccaatatgagtgattttttttcttttctttttctataagaaaaaacaggtacgaatgttcgatttcaaactagaactgttcaagattgtgtatggattggatcctcaaaaaaatataaagatgttcatttaaatttttattgttgcaaaaaaaaaaaaaaaaaaaaagtcaaagtttactaggtcaatttctagagggaaagactttatcgtgcattgcaaatggtgtgtatatttaaattaaaattgtatttacattttttccaacttgtaaatgtttgtttctatggttaaacatttgtatatatcaaaaacaatgacaaataacaaatcaaaaatgaagaaggtgggatataaaaaggagcagccattgatttgtcttcttttctggacgacgacttgaactgctccaacaaaacagaaaaggatgagttccgatcaacggtggagattgctccgaccagcattcttcatcttcttcttcctcttctttcttcctcacaatctcacctttggtctctgtttcaacaccgaaggtacttacttttgtttcatctttctttctgagtctattcgactattgattgatggattaactcttgtgtgttttgcagcattggccttgatgaaattcaaagagagaatagagatagacccatttggagctctggttaattggggagagctttctcattgttcttggtctggtgttgtctgttcacatgatggaagagttgtcatcttgtaagtcatatccgagtccttaacataagaataagaagtttctctaaaatttcagttttgttataaatttgatgtcttataatgtagaaatctaagagatctctccctacaaggaacacttgcacctgaactaggaaacctaactcatttgaaatctctgtaagtaaccaacgttttccccaacactcctcaaactatacactagatagatagacctctacaacaccccttgttcttgttgcagtattctcagaaacaattcattttccgggaaagtacctgaagaggtaacagaattgcaggagcttgagatcttggatttgtgtgacaacaactttggccaaccatttcccttcgctcgcaggctgcttcagatatctccccctccttctcaaccttctcctccatcgcctatggaggaagtccccattgattttcctttcttctttgcccctcctccgcagaatataggtgcaagccctcctactgaaacccaagttatcccaaacccgtctccagttccccctccaccagctcagcctccaccagctcagactccaccacctcagctttctgaagtgcctcatgctgtcaacaaaaagaaatctcataagagtaagatgtacataatagtcggagtgctagtaggtgtattaggcgtcatggccgcattggtggccttcttttttctctggaaccaaaaggtaaaattgataaagccatggggggaaactgggagcagtggccagcttcaagatgttgttactacaggtatcatcactgttatgtttactctctagttcaataacatagcagagattggtgaaagtgagtttagtgtatttattatgacttatgaaggtgttcccaagctgaagctagcagaactagaaactgcctgtgaagatttcagtaacatcataggctccacatcctcagacgccaccatttacaaaggaactctctccaccggctctgaaattgccgttctagcagttgcatctggatccctccaagactggtcagaggatcacgaaacacagttccaagaaaaggtaacatcagaaacctctttctgcattctttctcctcttctttaaaacacatacaaatcatgcaatgcagatacagaggttatctcaagtgaaccacaagaacttcctcaatgtaatcggatattgccatgaagacgaaccattcaaccgaatgctagttttcgaatacgctcctaatggatccctcttcgagcatctgcacggtgagtagtagtaatgccacttcttccaacagactcagtccctcccatctattttttaaacttgtaactgtaatattatgttgcagaccaagacgcagagcatttggactggccaatgagactgagaatcgtaatgggaatagcttactgtatggaacatatgcacaatctaaaccctaaacccatctctcacaccaacctcaactcttcttcagtctacttggcaacagattacgcagccaaagtctcagactttacgttcctcagctccacaccacttgaccccatgaccaacgtatccagctttggcgcccttctacaagagatcatcaccggaaagatcccggatccagattctctgctccaggaagaaaccaaacccgttgcagacccgactctgaaaagctttcaagaggaggtcatggagagagtgtgggaagtggttaaagagtgtttgagtcagaaggtggaaatgaaggaagtggtggttaagctgagagagatcaccggaataacgccggaagcagcgttgcctagtcggtctccggcgtggtgggcggagctggagattatatccaccgaaatgtagatatatcaattgcacagtaaactaatgtaccatcatcatctctgtactctctgcaaatttaaagtctgaagatgatttctttctttctttttttgggttttattttgggtcaatataagataaaatgtgtgagtttgaaaacattaaagagaaatcttgttcttattgtcaaacgacatgaagttgagctatgatatataaaaacgacaagcgtatataaccctgagtcacactgggctgggctcgctcattataggcccatgtaccaatctcgattcttttggtctgctgcaactttcgcgttgaaaatactttttagattcatatcaattctctgcatttctacactttattattatttccttaatcacttccataagaaaagtagcacaatcaaattgagtttcatcatgtttattccttttgttgttttttcacttccataaagaaaggaaaataaggaaacaatcgaactatgaagcttcaaacatattttcttgtaatatataaaaaaagtacatgttggtgcgtggaaaaacataaagcaaaataggataaaagcaaagatcatttaatagaagtcctaggtgtgtttgcatgtccataattatatagccgtttgtttaacttgctctgtatatccgtttcaaatctattgaattcataattggcattttcctacactagtaagaaaataaatctctaatgcattattattaccgtttaaattgttattacaccttttatcagtatacctaaatgactaaatctccaattagaagacgtgtatgcatgtaaaaaaaacataaagcaattaagaaaagataattaaaaaacatagatgtgtttggttttcggtttgtatgcccagaaatctcttgaactctttaatcgtcttaacaccatgttgtgtagcgtgtcttgtgccggccagactcgaggctgtggattctttttcaacgtcatcatgtcttttgataatgaccaatcttccacttcctggattgtccgcgtagtcgtgttttcgctctatcatctcctcgcatgtgacattgtgtcttacaacctttgtttccaagttgttatgaatctattatcgaattatcttttaccttcttttattcgtttttaaccttgttgtatcaaaaattgaaaatggtattcttccaaaccttgtactacatttcagttattaaatgataaaacaagtttttgctcaaaataataataaccatttcttcaattttctctgtatatcgttttaaaatacattgaattcgaagctggcattttccatgaatagaaagaaaacgacaaatctctaaggcgtaataatctcggtttaaggttctgtaatatatatttcattaatatacctaaatttctaattagaattaagatgtgctcttcttgcattcaatcgtatgcgtggaaaaacatatatttaaagcaaaactaacaaaatagaaaacgtaggtaatgtgaatgcatgccaatcattatatgaccgtttgtttaacctatattgagttcaaaattggcatttttctacactaataaaaagaaacgacaaatcctaatgcgttattttttccgtttaagtgtctctattctatctttcactaatacacctaaatcttcaaaagacgtggctctatatgcatgcgtatacgtggaagaatattattaaatatatacccgtttgtttaaaattgattaaacattaacttcgtcaaattggcttttattccgaaattagcactcaatttttaatgttctttaatcttcttaagaaagataactcaaactgaaattaagaccaaacgaaacaaatgcacactgatttgatatgcatttgataacaatattctataaacttaacattcaaaacaaaaaaaatctgtaaaccgaaacacatgaatcaaaaaaagaaaacaactcaagaataaactgaatcgaagaaatggtagggggtttttcaaatcaactaagtaagattggagagtggagccagattcgtcttcagcctctctatctccgttttatactcctcaatgacacctattaattagcattataattattgttatatcaataatcccaaatatatgtatatatatttaattaagttaaattagctatcatgtatataattaatataccatcgctgttgatacaatgttgaacccgagcagagatacactcctttagctgcctttgctcattttctagatatcgtttttgttcactggtaatcgctagttgggaacgcaactcactcacctctctctgcacattaaatgaaatgtatatacatatgtgtaatacgcaagcataatgaatcgaagtagtacatatatgaaattaagtagaggtatatatatacttggagctccatggatctcttcactagagcatcaagatattgaaccttcttccacctagacttttgagccgcaacacggttcgaaattatcctacatattttatttcatatatggattgaattcaattagggtttcatttataagatatgtatcgataaaaaatgaaaattatgttaaccgtttgagtatcttagggtccgtggtgggatcaatattctgacgcatacgaatggtgaagcctggctcgacttcatagttgacgtaaccacctttcttctttcccgcttggctgccactttgggacactccaaacgatgtcgcaaccacagggaaactcattgatgagttaagttgtgataaagtataattgattaagataagtaaatgtgctaagccttgttatagttgtgaggctactactactaccgtcgagtgttggcttttatagtgaagtaaatacaagttaaatatcctatttgcccttgtaattttttttgtcgttttagggtatcttgatttttacttaaaatagaaaaaattgaccaatgtattattgccagatgtgttaataccttatcctttacaaattttttagtttgttttttaaacattttaaactctttataaactttcttgtacgtggtggtgtttgtttttgaacattcttaaaatagtggaattctttgcaacacaaaatttatttgtgtatggcccaaaatggcccataacaaggtctgttattaataagttttgatgatagtgtaaatgggctattaaaaccccattaaggctaaaaaaaaattactacaaggaatatgttttttttttttgtcaaaccaaggaataggtaatgtgtggttaagtatatagaagatcgtcaagtagtttcaccgaatttgcatcgaaagtacccggaagtaaaaagagcacacttcttcttagattagatggctgaatgatccaacttcagagaagcttctggctgacacagaaactagaaagcctatgatgatgatgatgatgctaatgctaatgtccatgtgacactaaaatgcgaaagaaagcctttttgtttattttatttgttggagaagttgctcacatgatttgatgaatagttgccaagtaacttcactagaaacattatttaaacaattttggaccatcacagtgaaaggttcacatctatagaatacatatcccaaagactcaagatttatttatacttttattattttctaagaagctttctatctacacctcattgctacaaaacttctcatttcatattaaaaagcttctctcccactcttttacctctttataaagcgcgaaacctctcttctatcataaaacagaattaactaccaaactatcttcgtcttctatctctttctcagtatattccaatttttctctttggctgcaaagatgttggacatagcgtttgaattgatcggagatgccacgtcgaattcgcttctcatgttctgtttctgcaacctcattattgtcatgatctttaccggatcattaaaacctggtttgaaggattcacaagattccacatttgttacctcagtgagctacgatatgggcaatatttcttctgatgatcattattgtggtgatgatgatgaaaatatgaaaatcgctgctgctattccatcttcacaagatgaccctttgatcgatgactcgagttctgacgaagaagatgattcagaaagcacccattgctatgctgctgatgatgatgctgatgatactgatgacgatgaggatgatgatgatgatgatgatgatgatgatgatgatgatgatgatgatgatgatgatgatgatgatgatgatgatgatgagagcaaagactccgaggttgaagaggaggaaggagacgatgatttgagaatgagggtagaaatgtttatagcaaaaattaacaatgaatggaggcatgagaagcttagggctttgaatttagtttgttaatatgttcattctaattgcaaagattttgtatgaatatgtacatacttttttttatcaatgtataacataatttcgtaatgagtgtattttctagagatgttattattatagaatgatcaaatatataatactctctgaaatgaaaagattggctccttgatcttataatatattagttctttactttctgcaaagagcttttgattcttcttttcatgaaaagggaattaatgctacttgaaaaactaatcatcaagattaaacattacaaaactactaggagttagttacttacctgtaattagcgaacaataacatcccgttatgtttctttcatttaaacaccgtcgtttcgtaaccgcgccatctaaatttgctcatacaagttttcaagagacgtgagagagagagagaacaaaatcgaggttttgatgttattctgattgatgctcgatttcaacatgttcttccccaagaaaattgatccggaaacaatggatatatttgcagaagatttctcccttgagaaattcgacatcgatttcgaattcgacatcgatttcgaattcgacgctcctcgattctacgatttctccaaacctgaactcgattcagaaacagaggaaacagagctttggtttcaatcagctggaaactatcctccttcacgtaagatcaatatgcatatttttggaattgaggctaaaaagactctgtttcttaattatgttatacttttttttctcagcatttagcatacatttgagatacgaagaaaaacatcttgagatccctaaacccgtctcagatcaatacaatggtattatcttgcaaattcttgtctttgatttgatttcttgcaactcaaggtttgttatggtcatttagggtttatatataataaccaagctcctaaagatgttcccaaggcgacgcataagtctaaaaccaaaacttatttacgaaagaactcaactttaacgagacccactgcttctttgttggcaagacagaataaacctctcgatatttactctgttcggcttctcacaaggtaacatcagtcctcttcaacagcctttttgctttcttagactcaaactaatttgatgttttatagatgtcagcggtcattaggaaagtgtgatgacaagttctcatctcacttatattcaatgcctcaaacccaagataacaaaaggcaaaaactcgaaaccggcttcttgcgcaaggtgctgctctcaaacatcatctaaactcactgctctcaacacattttgttttggagctaatcttaaaaagctttttgaagtaggtttcacggctggaccaaactccttttttacataaagttccaaagaaggtaatgcaatttaagattaaacattcactgtatcatcatttttgtgtatcttacatttgtaatttttgtgtttgcaggggtccaaagtcactgttccaagagagcctaacctcaagactgcccaaagagctgcaagaaaccggtaaggactctctttgaatatattgttggttcctttaatggcttgtttataacaacttctttcttatgaatctctttcaggtttaaggctaactcagcacccgagcagattgcaaaattcatctctaatatgaataaaacagtgcgtgtgtgcctacatcattttttgtttctttcactgccaccaactcaaaagtagtaacagtcacaaatctttgcctgcaggttcaaggaactacttcaccatctttgcctaagaagaatacgcctcaccacccccaagatctacaggtctaaatcttctaaagaacattttcaaactcttttatcataccataattttaccagcaattacattctttcttttgtttcaggcatttcatctaaggacatctcttagagcgagggaacgctcttccagtgtaagtctcaaaccgtttgtgctgtttgtttttatctggtcatctttcaagctacagtgatgcagttctcattgcaggctaaaattgcaccaaccgatgattctaaacactccttaacgttagtccataaatcttttataaatcccattcatgatttccttcttctcttgcatttgactcaaacttgaatcaagacttctaaacatgttctttcatgtcttgtgcaggtcaaagtccgttggttccatgaagggtatgaaggtcaaggcgtctcgcagctcaaattccaattgtcaagtttatggacctaagatttgccctctagactcaaaggtgatgcaggttaactccttctacaagaactagaatccatgaaaggtatttagttaacaaattatagaaaaaaaactcacaaatcttttacttcatgatagacatcaagcaaatgcggtgaagcaatcgatatcaaacatgaaaacaatcttctgagggtaagtcactcatgctgcaggttggtttttgaaactataacaatgtagtgatcaggtcatatctctagatggagatccatttatattccccctactaataccaggtttttagtttattgaaggaatttgaagctccaatgaacacaaattttcgagatgaaccatttattgaatctcttagaaaagtaagcattcatcatcttcaaaaacttgcatagaatttgtttctttgcttatgattattaacaatgttagttaccatttcttacagctatgtctcacgtcagatactgatccagtcggggtacttatagattagttgcttctctttactctcttgtatctcatcgacatagagatttttcgagacatatatcgtgcttgtacaaattagatgtgcgaaagcttatactaacatgaagtccaatattcatcaatagtactaagtgttaagtcaatgactactttcaatcctgcatcagtacacagaaagatgtgctagggggaaacaatgtacctgtaaaaatgaattaaacatctgttaccaacagctgattaagctcagtttctagctcggaccagctcgttaagcttctgaatttcttttcttataatagaaatttctgccatcattggatgatacttccctttggcaaaatcatatggtttagtaaagttaactaagaagtgtggttgatatgttttttctttctgcaaatgcatcacttgggatgtgctcaaagggatgggatgaagttggaaactagcctttattaaatgaataagaaaacaaaccttttcttgcacggaatctttgccttgtggtatatgtggttgcttttgtatctgaaagaaacagaggacgactagtctctgtttcactctcaacttgttcattccactcaaactgagaagtcaaaacaataaacataaagaacaaaaaaaagcaaccacgatctcgccatcttgcaggtaaaatggtcttttatttgatctttcataatctgctacataataacaaaacaccaaaactcaaaatcacaaactaacaaaagtagaaaaggatccaaatgacaaagtaatctttgaacattctatttacaagagctgtaggaaaggattgaaactttcacattccaaaaactctgaatctaagattactgctccaaatccacatccaatggaggaagaagaagaatttactgcaccagattaaacatgacaacaaagtcgaaaacagagcaggacaaaaacaaagacgattaccaaactgattagactctcaccagtcgaaatctgaaagcaagtttttgcctcaattgagagaagaagaaaaataaataagagctagcaacatgtctactatttcacttttttaagagtttttaagccaatcagaaagctctatttcaatcccactcgcacaaagtgagcgttgagcgagtgagagcaattttgtaggggtttacctttccaaatcatgccttttttattcaacgcacttcctcccaaaatctccatcgcgtgactcttatgttttttgttttatgtaaaccgaaccaaaatcaatttgtaattttaaaccatgtacactgaaccgaaaccaattataatttgaacttttcaaaatcatgtaaaccgaaatattttttctccttccgacgaagactaaaccatgtaaacagagacgacgaaacctgccggagaacagaaaaacccggcgaaaatgggaattcgatttcgtcgtcctctgttgatcatgacttcacttctgcttccaggttttcatcggaaccaatctcacctccactctctaataaacttcttcaattgtgagtttgtaattttgttgcagagctttcactcagaagaagctcgatgatctcaaatctctcttaagcatcacacgatgtgtggtggatttcgattgtcacaggagtattttggtccgagtggttctttaggagaaaaggatgtttgatatggtcactcaacgcaggaaagatgataaaatgacttatgaagatcttgttattgctaaggtacactcaagtcttttttatcgtcttaatcaatcattggtttcttcttctgagcttttgaatacgcttggcatattggaggacatgcacatatcgtgagtggttttccaactctagcataacatcatttaacctaacattgtctttgcttgcaactagactaagtagaatcaagacacaactagttttgttcctaatgtaaattatctcgcggaaacaacagtatgtcgccatctgtgttaatcattaaagacacagaaggatcaaccttgggagaggcacagaaatgttaccacttcagataatgattcagtcgcggtacttacagattagttgcttctcttaatctcttgtatctcatccacatagagatttttcaagacatatttcgtgcgtgtacaaattagacattgcaatgaaaaagattgagagcttcaatgggaaaacgatcctccatgttaacaggtataaaaacctattgctttaatcatttccttctagtatttggaccaaacaagtgaacaacacatctccatcaattacattctaacaaggagcttgaatttctgtggcaggattcaccagcttgagattcacattttgagataagccatatgcgtatatgttcttaattagttgtaaaagtttgacatatacacaacgttggtcatgtgaataatgtacaaaatatatttatagtgtgaacgaagtatgcattaatggatgtttgcattaaagaggagattgaaagacttttaacgaactcgtgaagatgtccattggaaaaacaattaacttcacctactctttcacctatcccatgttcttatctttaatgccttcaattttatctcccttcccaaaatacccctcatactagccctaaatcacttaaaaacctgcccctccgatctttcttgacatacaagaacacaacagaaaagggaaccctaaaagttattatcttataagctacttttggagatatcttcacggaactgaacaaaccactgtggggttgttgtatctgaagagtggctctcacgccgttcttccccttcctgtacttttgcaggcgacggtaacttctttggaggtggagacgggacaagtgagagcagaaccctagagacctcctgcatggtgggtctctccaaaggatttcgcttggtgcacaagagagctagctgaaatgttttcttgatgtgtcctgagtccatgcaagtcactgagacctctgcatcaacagcttccattactgtgttatcatccgcctttgatagaatctgcaacaaaaaagttaatgatatcaaattgtttccaagaataaacttgtgaaacactttatactcaaattcataccatttgatgcaagttggcctcgttatccacagccttcttgccggttagaagctcaagaaggacaataccgaaactgtagatatcagacttctcgttcagacgcgaagttcgagcatactctgggtcaatatatccaatggttccaagaacataggttgaagcataagttttggtggctggtatgctcttggcaatcccaaaatctgacaaacgcgcttcgaaattcccatcaaggagtatgtttgatgacttgatgtctcgatggattatcctaggtgtgcagtcatggtgaagatatgcaagtccttgcgcagctccaacagctatcttcagccttgtttcccagtcaagcttcaccttcttcccaggccctgcatcatacaatcactacgtttaagtcttccaaaagtagaaaactggctgaaaagaacgtaactggtccaagagaagaagaatagcaaaccatggagaagatcccaaagagagccattttccatgtagtcgtagaagaggaggttgccaaagggagataaggcgtatccgtgcaagcttactatgtttctgtgtctgatgctcccaatggtctcgagctctgtttcaaactcgcggaagttgctgggatactgattgtagattcgcttaatggcaataggtcgggaagttttggaggtgcacttgtaaactgtgctagaagcaccgtatccaatgatgtatttctcatcgaggttttctgtaactctcatgatatcatcaaacgtgtgaatagccatgtccatgtgaagaatcaccagcttcgttgaccctgaaggatccatacaagatatatcataatgctgttgtgaatcttaatgaacgaaagagaagagatcataaactatgagaccaagaccttcaggttgttttgaagagcctttcaagactggtttctgctgctttgacttgtaaaccgcaatgaatatcatgcatatgagagtgatgaaaccgagaaccatacaaatcacggcaactctggtgaatactggttggtcaagagcaagaaatgtagtgagagatatgtcagctaaaaacaatgcaataggataaatgcagattcatataccttgtgacttaggtaaagatgggccacagattgatccaacccagttcccgcagagaaatggatttccaaagaagctataaacgaaaaggtatatttggtatactgattatatgaaaagctaagacaggtaacaatatggcaaaggtgatacctggccggggaaaaacgtgtaaagttcttcataggtgggattattccagaaagattattgaaggagatgttcctacaatgtataaagaacgagcaggaaaaatatatgaattcagaaatgatcataagattatctgagagtacacatcttgttgtaacaaaggaacacgtacagattggcaagactgaagcagttagttagctgatcagggattttcccatgaatcttgttgttgttcagtatcctgtacattaaagaagcaaagaagaattatttatatgcattatacggtaaattgcagaggagaagtgatggtttacttacagagagtttatgttctgcaactggccaagttcagttggaataacaccggcaagaaaattaaatgacacatcgctgagaaggatggagaaaagtttgtaagtaggaagattttatcataacagaagaaatctaagcataagacaagccttacatgatctgaatgcttcggaggttcccgaattctgcaggcaatgtgccattcagatgatttctgctcaagtttctgacaattaaaacaaaactcaagtcaacaaatctgagagagttaatgcaaagcagtgcaactttagggcttgatgaagacatacaagatgagaagatgctcaagatcaccaagtgttaatggaattgagcctgagaaattgttgccagacagatccctgaaacaaagtttgtatgagttggtagttggtacacatatcagtaggtaactaggcggaacatggatgtaaatcagtagaaaataacatacaatgtatcaagattgatgatatggccaagctcagcaggtattttgcccttgaaactgtttgaggaaagatttctgcaatttacagcattgaatcaagatttacacagactaatagttcgaatacataatcatactgtacatgcagtcattgaagcttacagataagtcaagcttccaagattccggaattcaagtggtacagctccactcaagaagttcccatgaacattgctgaacacaataaaagcacaataagttttcattaagataagaagaagaaaaatagagagaagcataaaatgggaaagggttcatatcatatcttacaattgattcaaggcagcacaggaactaatgttagatggaatcagccctacaagattgttgttcgcaagattcctagatggcaaagttacatcaaccagcttttcacctaagataaaaatttaagtatactgaaggataaaaactcacagttcgaacaattgttccagcttcccaagctcaggtgggatctttcccactagttcattatcatttagttgcctgcgaaagagtaaaccctcataagatcaagtattgagaagaacagatattggagtttcaagttctcaatcttacaaatagctgagtcgtgacatattgcctagctcgggtgggatttgtccagtgagcttgttgccatggagatacctattttcaagaaaagacattatccatatatgtgaagatctgaacatatgcatgacacagagggaagaaaaaaaaagggactcacagttttccagtgaatgacagattcccaagtattggtggaataggcccagttaattcattgtcactcaaatccctgcgcattggataagtttatttcattcagtcagaagagcaagaaacgagagtaggaaaaaagcaagcatttgaatatgaaaatgacatacaatacagcaagagcctgcatcagaccaatcacttccggaattctgccagtcaacttgtttccttgaagtgacctgcaagagaacccatcaccacttaaccatattgacatgctttaacaaaccacacaaaagtgtaagatggtcttaacaatacttacagagtagctacttggaggaaaccaatattgtagggtataactccggtaatctgattataagatacatccctgaaaatgcaaatgacgaataagatcactcgagttctgtgctgaatattcattccttaaggagaagacacatacaagatctcaaagcttgtgcaattgccaatgctctctgggatagttccagtaaggttgttgcctctcacatcactaacaacaacaaacattcacttataaattactcgaaatctgaggttgagagtaaaagaaaataaagagctgaaccggattcacttacaagtaccacagacccgtcagctgacacatatcaggagacaatgtcccagttaacatattcccacgtaaaccgctgcaaaatgaatacatcacaatcagaacataaatctctggatgcctagacttaagataagtagatgaactacttacagatactgtaaaacttcattccagtagagtaaccttggtatctcaccagtaagctggtttcttgcgaggtcactgcaaaatcatgagaataatctattatcattgcaatgatccctttgcattaaataacctgcttcatagatagaatattatctgattgaaactcacagggtcttaaggtttggaatctgagttaaggttgctggtattggaccagtgagctgattattctttaggttcctgcattagaatgaaacagttgacaaaaaaacgccaaaatcaggcaaagattacacacgaatgagagagataagaagacatacagaaactccagctgtttgagtttagagattgaaaacggtatgtctccaaacaacaaattggtggagaaatccctgaaacaagaaaggtttttgattatataatagagatagattaagttctcattaacatgaaactacaagcatcaaacaaaacttacacataagcaagagaaacacagtttccaatctcatctggaatttgaccacccaatttatttccttgcaagtctctgtaattaagaaagaccagagcttcataaggatttaacaccatgtttcttctcaaacatacaagtaaaagagagaagagaaacgaacattgattgcagattcatcaaatctccaagggcagatgatatctctccaccaagattcaggtttgacagattacttccaacataaaaaaaaacaaaggcaaatcagaaaagtctgaaatcaaagagacagcacaacaatacggaatgagataaaaaaaaaatccttacagagagacaacattgaggctaacgttatcacagaagacacctctccaagaacaaaagtcgtggttatgaacatcgtcccaatcaagaagcatattcgccacgttgctgaatgaagcctttatcgccatcaacgcttttcctgtgcaaaatcaaaagctttttgaagtcaataaacaaatcaaaaaaagcttatttaatcatttgacactgatgatagtcaaatggtaaaatatgaaccacatgccaaaaactaaaaccccactagatcattagtataataaactcaactgtgaagtgagctaggtcacaaattattatcatatttccaaaaacactaaagtaagttttttttaagaacgaatcaaatgacttttgctctctcaggaacagtcactgtttagatagacagataaacagatatgatatcttcaaaatcggaagaaaggttacaaatttataaaaattcaagttctctggaaaaaaaagagagaaatctctctggctcatggaacaatagagaaacaaaagagattttgaaagagctagaaccttcgttgttcattggagaaacagaaccaagtagcatgaaaaccaccatccccagacaaaaaaacaagcctttcatggtctctatccttctcatcttcttcttcttcttcctcaagagtaacaccacgaaacccagaaaacaagtaacaaccttttttggttaaagacctctttttctgtttagggaaaagtcagatcctttgaagctttgtagcaagaaacgaaattcaaacaaagagcaaaagaagggtacaaagtcgttctgccattgttgggagagaccaaaggaaaagagagaggggaccgacacaggagattagcgtgaactggaaggaaaacagagcagagatgtttaaagaagagagagagaaagagaggacagtctacattactagaggctgagctccgacgccatgagagagagaaactttagtaccctcctattagacaacgacaaaataatgtcagtaacatatatacatacattactatcatcacttgttaaaccctgctaaaacatctccgatcatcttaatgagacagtgatcgaaatgatttttttttgtttttttagtacttaacggtaaagtaacggcgttaaacggagatttattaggccgtatgatttgacggcgacggttctaagaagaaacgccgttttccaatgcaaaggtgaaaaaagaagaacgtcttttaagagtccggtgaaaagacattcctttgctgggtaaaatcccgttgacgcgcgcgtgcatcattattaaatttgatccaacggtggatagagaaatcctatcgtggactgcgatgtagagaatcaaattatgctcttccttgtgatttttagttaatgctttgatagtgattgggtgaaaaagatgccacaaaccggattggtttagtactatccttttatcgatttgaaaatttttcttcagctttcaatattttttacagtttttcatggttttattgcaacatattatcgatcagagttgtctcctttgataaaatctttctatttctaccttgtaattagattgattaattttggggtcgatatggtaccactaggttgaataagttggtagaactgtagattgtaataaataaaaaagtaaaaaaaaaaatgtaataaaaaatgaaaaaaaatgagcagtaatttcactgtggattcagtgttaaacaaaaaacacaagagcagagatcgtgtctaaagctatgcctccgtataaagctgttactctttctctatggaagctatcttcattaagcaattatttgtatactcttttaaaatttgtaggcaaaagtcaatgtgatcatgagaattttacatgttagcttcaatcaatatgataaacgctcagctgattacatgaaaactatgccgatccatagttaatgaatattagtatttgttttgaagctaacatgtaaaaaaaaactcatgatcacattgaaaatgaaaactaaggtactgaagtgactgatcaagttcaagtcagaacgtagggtccaaaagatatccgagaaatattggtcaaaccccgaccgtccgattgaaacgatgtttgatctcgttactactcggttgccctaatgctttggcagcttcctttgtgccaaaatctcatatctctcctctttccatattccgaatccgacatcaaacacaatgccaaaagatgattttttcaatattaaaatttatatggtggtaacgtagagaacagaaaaatatatatcgagttacgttggtcctcttagcttaatatggaccgaccgtatcttcttccttgctggttccgatcttgattcttctatgttgtactacctactatggtcaaactttttgatatatgtgtaaaagtatgtattagtagattataccataacataattctcccaacgaaaaatgccgtttaatactttactaaaacattatactggctaaactaattaaactaatctttgtaatttagctgaataaccagtaatttttctttcaaactgtgaaattatagaaacttaagtagtggaaacaaactgcgacagtaaaattatatcagtagactcggtgaccataaagatttatgtaaatccacaaaaacgtaaaaggagacgggggctcgtatatccacaagatttatataagtcttgtggaggttcagctgtataagcaactctaggcttttagactcgaacggtgcatggctctaatatgtaagaagaccaatctgtacgcattctacagtagtctaaactagaccaattcaattattttttactatgtttcctcttaaatgtttttattgttattgcgtcgaaacaataaacgaggtgctgcgttagctgttgtggtctagtatatatatatgatcagttttgtggttactgttgttaatatcggacagttagtgaacatgagttttttattttaagggtcaaaagttagtgaacatgagttagatttgtgtggactagttagtatgtatatatgatcaaacttgagtgaaaatttgaaatagttaatgaaattagtcaatacaaactataaatttctcatacgtaatgacaatcttcattgttcaccacgtttcaagctttgtatttactgataagaaaataaatgagatttgatcatatgcccacatacgtaacattcgtttattttacaactaattcacttagttatgcgagcattcaattacattgcttttatataagaagacttacgtatatttatagggacctatagctatggagcagactagcttaagcctatagtgaatttacaaaaaaaaaaaaaaaagcctatagtgaagagccaatcagagaagacaagcgtggattttaccggatccacgtggcgtgatcaaacaggcccaaaacatgtagtaaaagctgggacaaaagctgtgaagattgtttggtctagatgcatgggaagtaattttaagtaacctatgttttaaacatttacattatttggaattaatattatatatacactattcgattttgttttccttcaatgtaacattactctggcataaagtatttatcgtataatatcttttattataaatttttgatgttttaaagattagtttatctcttttgaccaaaaagaaaggaaaagggattagatttatatctatgtgaacttgattatacgagttcggataatcggatctcaatgtgatatccatatttcttgcaagacatatctctcgtacaccttttatatttatatcccgcaatcgtgacaactcttaatcattcacttcataatatttccaacaacattaaaagatatttatcttaattctcttttccttaacactaacaaagtagcatgtccatatatactttcgttttttgagcatgagaaaatagatttaactttataagttataaccattgtttcaaattaatgcagatccgagtaataataatttgagatgcaataatggttgtgtcatatcttgattgctaaacttgataccgccataccggtaacgtgaagggagagcttccaatttgtatgcaagcctacatctgacccaattgttggcccaatattaaccaacacccacactaaaaaaaatactatggagggagtaatctacatgactacattccaaagcaggcaatatcgttttttcatgtctgaaaacgcaaattttttttctaattgttaagttggttcaaaagaaatgaacatgggtaataataaaaatgatgtatttgtttgcaaacagcagttctcacttgtctctctctatatgatgaaagacaatgttgtaatctttataggtttcaatatagcgggtatacttggtgacataaagcgttatgaaattttaagcagtaaataggaaatgataaatgattattaaattcgttattaaaaatgtaagaaggaatagtacaatatagaacggtaaaaaaaatggcaaaccatttacttcaataagaaaggttagcaaccacactcagcaaatgggacacataggatccgacgtggtttatattatagtagtctgatatagtagagtcaatgggtatatttgtctttttcaaagactcagttccattgaagcgtaggttacttctttaaacaagactctgttttgaatgatattgtaaagttaaggggtacgtttgtctttttcaggacaaagcgagaccatagatgacgtgtcaactgctaattttcaaaaactcggtctacaaaccataaccaaacttatttattcaattatttccgtcaaaaaaatataattttctttttgcatctcaatggattgattccatgtgccaagtgttggtgttcatgagaaaattagtcgcagctgatgacaacaaacatcaagcatttataatttatataacactcacgagagcctctttctttatctacctcgtctcctaatcacaaacacacacaaatctctgaagtaaaatgacgttcccttctctttctgtctcatttctcttctttgccttcatattcgttacgcatgcattcgacctcagcatcatccaggttcttcttgttttctactttctggctaacaaagtaaccagaaccggttttctcacttgtatatttgtttttttgagaaaatcatgtagatgcaacagggaacatgtccgtacacggtggttgtcatgacaagctgtctttctccggagtcgacaagagatcagatcagcattgtttttggcgatgccgacggtaacaaggttaagtaactagatttttttgtatatagttccagttaagtcgacatcttatttgctttaaagtggtttagataccttgcatgtgtgctcagtgcaagtaactttatagtgatttaaataaaaatgttaaatatctctgttgttttaggtgtatgcaccgaaactagggggtttggtaagaggaccagggggtttggggaagtgttcaacgaacacattccaagtcagaggtcaatgtttgaatgaccctatctgctctctctatatcaaccggaatggacccgacggttgggtcccggagtccattgagatctactcagaaggttcaaagtccgttaaattcgatttcagcaagagcgtccctcaactaaacacttggtacggccacaacaactgcaacaccacaggcagaccatcgtctcccgatctgcctccaccacattttccgccagagtttccaccggagacacctaccaccccaccgccgcctccaccaaggccgtctgctgcttcaaggcttggaaatggtgagagtgttttccttgcgtttgccattgcgactgcgattgccgcaatggtgcgttggagttactagcatggtacttgaagagcatgttgttgggttgtatgaggctttttctttccgtcgaatgtttttatttgctttcgttttgcttcagccttttccttgttgtagaaaacataattacttattaagtatgtgcgcatgagttcctgtttagctatgattattaatcagttggtaccgacatttagtagttcattttcaaaagagaatccatcacttgtgcatagaaataaagattaaaaaaatccatcactttccataaccggtgtttggacttgcaatttttagcgagacagtatgataattttttttttaaagtacatatatgctaagcagtgatcaattttaacaattgagatgaagatttatccaaaaactggtgtatcataccaaattatcaatagattatattgagacaaacaaggatataatttaaataatttggacaacaaacctcaactcaaggcacatttgatgacatttcaaggaaaacataaatggacctaacttttgattcgaattgttattgaagtgttgtcgaaaactggaatgcatggaatttgtcaggtagtagtaggtggagttcatgggagaagtcgaaacacgtaaacaactcttctcttttagacaaatttcttcttttttcggacatctggtttcacgtgtccttgatctaaatcgggattaaatatggcttatattgatgttacaccgagccattttcattttcttttacttaaatcaaattgtctattgatgttaatccgacaatttttattttattttactgattttgtttttgaaatgttgttcttttaagtcaccataaagttaaaaaaaaaaaaaaaagaaaaaaaaaaaagagagaaggtaaatggttagatattccgccgatttagccgctaaatcctgccgaacaattaaatagaatcggtactgagactttattcgatggatcctaaacaaaagcaaaaagatgtagctaagcccaaactactaaggcccatcaagacgtcaaggcgtaacttcaatttagttacagacaactcttactttggaggcccatgaaaaaatagagtggtcaatcaatctcaaatgcaatttgtttgtactatgaaaaaactagactagttttcacaacgttccaaacaaataccatttaaatttacttctacaatataatagtataaatcattttaaaatcataacaatccaaattgcacgtatctataaaatccaatggatcgaaactcaagaaaatatttacaaaaaatatatatatgaacccttttctcgacgtaatctctggccattataatttagtttttcgttgaagacaaagacgatggaaaagacaaaacgacccgaggtataaacaatatgacatgtcatctcttacgtaagcataagttaaattaagaaaaaaacaatcttaactttgtcatttaggaaaaagacaaattatttagagattgggcattgcgagaaaacatacataaatattactatttattaagagtacgtccaggtgatgacaaatgaaaaaaacaaacaaataaaagagaaatattttaccagtacgaataagtaacatgcattgactaataagtagtaagtaattaggtctgaatgatgactgcattttgcagtgtgggagaaatgtgatgcaatttaaaaagtaatgaaaatacataaatacatatatatgtatagattttgatattgttacagcattgttgcggtgcagttttgggtgcggtttatatcaccattcatggtctaaagcaatttttgtcatttacaatttcattctcaagatgagtataagatagtttactcttacttgtacttttcatttgtagctaggtaggttaaaaagtactgaatatggagaatttatatagtaaaaaaaaaaggaataaagcacatgaactgatgacttatctcgattgaagcaattttcattgtgagaatctaaatttagagatgggcgaatactatgaaaatgacccaatcatttatttgttactgttctagttgtttaatggcagtcgtaactcgtaaaacaatcttaaaacaaccttcaaatctatttaaaattttacatgttcaaccatgtttggttaacaatccatattggtttacactttaccatttactgattatcattaaaatgataaaatgatttcttaaagatagacaactaatttgataaaatattatgatttatactgaattttattttcacgtctctagttaactgtaatttttttttttggtttgtttcatagctcaaattttcttcattaaaaaagtcggaagccatgagttgttcattgaggagtaaaaaaaaaattgagtatgacatataaatattacccgaaaccgattttttctgcgtgttatagtaactaattgtctctgcgtcaatgttcacaatgcatgcttggtacatattcaaaatctgggaaaatgtgttttggaatgtcgttttatttcgtaccatcttatttgaaagagtacaaaaacaattttctgtagaaaaatatctcaaatgatatgatctaaatgtatcctgacatgatacgtatcattaaaatgtaatatcagaaagcgatatttatcttttcgatttttttaaaacaaaattacaaaaaacaaaatctcttatctctatctatacatatatatttttctctcatttttcatatttgttcaaactagttcaaattggaatggtgtaaaacgcataataaaaaacagtaaaaaaagcaatactatgattagcatatgattgtaactatatttttgaaaaattgattctaaacaagaattcaatagctagcctaaagtaaaagtatatccatttttatttgtatagaaactaaacatactcatccacgcacacaaaaaaactcctaaaattaaccatttgaaaaagaaaaaaaaaaactgtagaaaatgtattgaggcaccttttttcttaccatagagttctatcttagtgggaccgagggagctgattgaaacgatacctaagtgtgagatattgaagatccaaacattgtgatagtgagagagcaacaagctatccattggtgcatgttacttcacttgcaggaccatttcttttatttgcaagcttacgaaatgtatttgttttttgtattatatattacaatccaatacttttccaaacaaaataaattatataatccaatccaaaagaagaaaacacagagaaagggaaaaacactaaacaagaaagacctaagacggtgtcgtagagctggacaggataaagatcactgtcgtgcagtgtgttaaatgagacggcagaaaagagacaaaaaagatgcacgtgaatcacgtgaagagggcctgttttattatatgagaggtcgggttggcccattgggccttttccatatatagttctattttcgtatttatttatgattacgtgcaatcaaacatcacgtttatgtgattttgtcctttccttaattagtagtactatatttcctataatatatatttatggtgtttaggagatttgttagttagtagattttaaatacaaaaccaaaattatgtgtgatttgtgattttcccattgaacttgaggtttttgttaaaattatgcattattctttctttcttttttgaacaaccaattatgcattattcatctaataaatttgaagtatcagttgaaattcataattgtttggtcataagtcataacatacttttataaacaaaaacttcattaatttcctaaacttattataaggatttggaatataattcgaattgcaaaaacatagtatatatttttaaataatataaaattcatagtagtggtatacatttaatgggagttacgtgattacgtccactttctttcactacaatttttactataatcgaaattttagttaacaatgttttttgtttacactctatatcaaatgaaagaatgatagaaaataaataaattaggcggaaaaaatataataagcaaataagaagagataaaactctataacaaacggaaaaaaatgaacaaaaaatttagttcattgtagttctaccatgccatataaaatcatgtcatctttttcttattatcgtagattctatttcgaagaaaataaaagaagacgccaaagaaagtacattgtcttcttacatggcaaaagtacaaccatccaagtttccagataaatttagagatagaaacacatatcgtaattagtgggattgattttacattttcttccatgcggtcaaattgagatttgtttttcttcgtaatggaatctaaaaatcgtgtggaatcagcaatactattcatatggaaattatgaatctatatttgcaatatttctaaggcggggccatcttttggctgtattgttttttcgtctttagtcttaatacaaacatcgatcgcagcttctcagagtaatgacgcacactcttctgtctctcttttttttcctcttcgtttcctatatttatttctgttgaattacgttttcaaaatattgatgttttattgtgatttttttactgtgaattatttttcataatacactactatatagtatatggtttctaaatatttttccaataattttctccctagaaaaagtcaaaatgataaaatcattagttcgctaaaattttgcatcaaaatgcataatctagatgatgcgacgaaaaaaaaaaatgatacgatgaaggatgagtatgttttcaaaagtttaaaagctaaagctattatactagatattgaattagtttcaagtctgaacgttcacaaaatttaagaggacacctaataaaatcaaatttgagaaagagagtattgccaggtgaaataatttaaaagatgtttttatattatctaatagttgaggacaacttttataatttaaatgatttttgtattatctaatagttgtcgaacctgatatccacttggtcttgttgacaaatttgatttcgacaatttggattttgctaaaatttatttgtgtaatgttttatcatatgatatttgtacttgataaacttcatttaataatagtaatagtgacataaatttaacattagagactataaaaaaaccatttcgaaacaaatcataagtagacccaatggagtacatatatttttatttttttgctacttttatttaacaccagacaacctagagcaagataataaaagaacaaaaaagtctccgatccttaacaagtcttgaacatcttaagaaaaacagtgaaagctctatacataactacaagtgaccttctggaccacaacattgtctcctcaattttagaaacttcttctgttcttaagccaaattgagaactcgtcaagagtgttcatgtctgccctataatgcttctgtgtgaactcaagaaacatagaccacgtaaaatcaggatactttctttcaccagacttcactccgtttactagttcttctggtggcttcaccactttttcccctttcggacataggaagaatgcaaacgtcttcctttctctctcgctgttcaccaccgcccgatgcaaacaactcttgtatcttccattcgttagagcctatgattgaaaaaaaaatggtataagtttcgtgtcattaatttgatctactaatgcatgtattgaccataataagaagactatatatataagtaccatgaaggtgtcgcctatgttcaccacgaaagcgtgagggttaggaggaatggattgccatttgttgtccacgaaaacttgcagaccgccaacttggtcttgatgaagtatggttagagatgttgggtcgcagtggggtcctgtccctagtgcaagctccggttgcttgcactgcgggtagtaattcaaccggaatattgaatcgctgtcttcgaaaaactctttaaaatatctcctctcgaccccaagactcattccaagaagctccatgatctttagtgagagagtgttcatggcctccgcgtattcttgataaaccttcctgcatggataaaatcacaccaattatatcagtcttcttggacatttataataaaatttcaacatttgctaatttgactattacccgaaatcttcgtatccatcgcccattttcttagaaacaaagtctttaacggtttgggaatggatcttctcctcgggagagaacttaaacgacagagtctccttccacgggagctttgaggagaatctcccgacgaaactactagcgtaaccggagctctcaccccacttcctctgagccttctgcttctcacaagccggggccttaaagaaagagtccatatgcagataggcacgagacaagaggctctcatcgacaccatggttagtgattaggaagaagccatgtttcgttgcagcctttgagacgagtctagtagcctccgatgccaagcacgagtcgccggagaggaaaccggctaggtctatgagtgggacttggagaggttgaacatccgtagaaggtttctcgtggtcgggccatacgaactgttgaggtatgtggtgcgagtgctgattaaggagctttgcatcgaagatcgaagaatcctctttggttttgttttcactgaatatttgagggaccgttgcaatgcattccgttgccatttttttttaattatcgtagatccttttaaggcgtaaaagattttcaaaatatatataaaaaacacgttgagaggcttaaagattcagtacagtggtcggtaagtgggagaggaaaggagtggtatatataggtgcgagagggaaacttaggtgcagggaatagtacgtaagcggcatttgggaggttggtgtttctttctttttttggctgtaaatggtaacatatttctagatgaattttggctgtagtttttaatctattaatttatttagtggctgaactggctgtatcgactatattgatttttgaatgggctgcaattcgaagataagacaaaacagatgaaaaaaatcatgttaaattcttgtttttcttaacaacatatatattaggcgaaattatcatgatacttttcatttttattttttaaaattgccagtcgagtattaaaccgtttataaacataataaactattgaataattaatctttcttttgaaattagggataaattcaagtatagtttcagttataaatgtatttattattatttgtaaatacattaatattgaatattgccattaatcacaaaaccgaaatattgaaccgaagcatattgatattttaagtataaacccatccaaacggaataaaccaatatttcttaaaatctatatctataattatgtaaacatgtttaaaacatatgcaatcatatttttaaaaattaatattgaattttaataggttttctgtgataaaattatgtttgctaaaatgacaaattatttatataggcttttttctttttctttttgtaaagtaattaacttacatatgcataatgcacacatgcaggtttgaatccaagttatggcatataatcatgacattactaaaacaaactattaggctacaacccccgttaattcctataagcaaatgaaagaagaaaaagactgaaaattttcagaatgaaactaaacatgtgattcagtgaagtcaagcatgtgatagaaaaaaaaattaattcctctaaatccgtccgtttcaaactttcataagaaatgaaagttccattctgtaatgagtgaaaaggtttttatcatttcagtaaaacggtcatcgtgtgactaaatataaaatgaaacggtcatcatttattgataaggaaagctgttgggcttggtgaggcccatcgtagctttataacgctccaacaccgacaaggcgacaacgatagccaaatggtataaaaacaacagttggtggtaaagaatcaaacgtttcatcattttaaatatttttaagctgagcaaacgaaaaagttgcttttgttttgttttttatgcatgtagcatatgtttatcgaaagtggaagaacacaacaaacacttaaaggttaaagcaatttttatttgttttaaatgaaaagttatccaaatactcatctagattagaaccttctaccgtaacatactaacgttatagaaagtaaataaaaatagttttttaataaaataaaaaaagataattatcaatgaaattaaatcgaggtgttagtaaaaaattagtaagatatatattacgaaaagagaagaagcgttaattataattttaaaaagagttgaattgcttgacccatatcacacatttgaagcggttaaggttgtcttcttgtggagagtgtttggcagtacaacattttcaatgatgtctgtgagtgacacacaccttcaacgcgcatggagatacatatgagttatgacttctctcgtgttcattggttttggtagtttttggaaagaagcaacgtatgcacctaaagttgtcttcttcttacataaaaaataatttggatgtatagaaacggacattaccaatttaacgtaaccgttttcttaattttcaaacaatttcatcctcgagtatatcgatttggtctgttgtgataggtggtgctctttgtgtgccaattgccaacagttaccctaaaacatgcagttttctccgtgtaactgatcttcccattttacgagatcaaaagaacaaatgtacgaagtgatttagctgattcagcgagataaaacaaaccattaacttttctttctcggttataatcagagagcaagttcattcttgttttagtttaatcattgcatgcatatttgacttttgtaaagcgtataaaaattccgatataaacgatatagatacgttatttgatggttgtataaaatccaattaattcccctacgttttacgcaacagaattatataaaagattttgtttaatttacaactttaggaggaaattaaatgtattgtatggataatgtgtgtaacagtgtaagacacttttggtatatcaaaacaatggaatctcttgacttcttaatttaattacaagtccttttgggatccactcagagactttattacaaacagggtccatctctaaatgacctatgatatcatgttctttgttgatgcttaccaatgaactatacaagatagtgtgtactgtgtaatgtcggatttgacagatagatagcctcacttttggaaggaaagtgacataattgagacacttttaaaccctaatttagcagtcgaccacaatctggctttcactctttcttattgacgtctaatccaatagttgactttttgtgattattgaaattgctgttgacccaaaattccaacgccaaatttggttggaaagaaatgctttactgacgagcgtatattgatgcacactaacttttaaactggtgagtttcattgtctaattaatggatttagctagccatttagggtagcattttcacaaaacttagtatcttacgtgggacaattgtgagatatacataggctacatagctcagtcttcggcctaagcaaactttaggcccaatacagacgggcctaatacccaaagagtgaaaatgttgtttaaaaatgacacatgtgccgaattaccacggtccaattaattatcaaaacattaaacggcgaaccaagtatattacaagtcgacatatatactacggctgtatttagaggttaaaattcatttgaaagaagatattcttattcagttcttcaatttcattgcatatttctcgttcattgaacatggctgtataatatcgaaataaatgtaccatgaagataattaggtagagtttttttttttttttggtcatcacggtagagttgatactgtggattgttgatgttaattgattgtaactatttgaaaaaacaaaatatggttaggacttacaaattaattttcaaaccagttattataatccttgtatacacataagtgttgacaaaaagaaaagaaaagagtgatgtttcgatattaagaaatgatttgcgaaaaacgtaatatgatattttgctaagataagagttggtgcctgatcgaaggttaagatatgaaaatataaagcataacacaacaatgtcgtgtttttaaccacaattaattttaaaatatactgtatgtgatagtgtcagtgttagtgttgacgagctaagcgagttttaaagcaaatctatactgtaaatgaatgtttcccaaaaattaacatgtatgttagtgggtatatatatagattaaaaagaaaattttctaatcaataatggtactacatttttaatgaattttcatcgtcaatgacaatgatagctgtaagaaattactttataagatattttttaaaacaaattaaattttaaccaatttttttaaatgaatttgatgttttaaattttaaaataagaaattatttacatatttatatataatacggaaattatgtggaatattatcaagtatatataacctatagcagattttagcaagattgatggatactttagaatatttatggaagatttaaatagcaataatcttaagaaaaatatcaattcaattaaaaaatataatatcttacaacattaagatcatatatatgtaatagatgctcctcaattaattatttgggattttatgacataatcattacttatatatttttattaaacaagattaaggtcatatgtttttattatacatttttttttttggacaaatacaaaattatttttctatgagatatttttcattgttgatattctccactgtttgacttttatctatggaaaaatgtctttgaacttgaaaatttaaatttcatattcataaaaaaaatttgattttatgtaaaaatttaaagatttggagtaaggtttaggaataacgtaacatacatcaaactatgtgtaagaaactcaggaatcttatcattttaaaataagaatccaataaagaaattttggataattaatgttcacttcatctgtattggtcgcaattgtcaacccacggttaaagctgtttgtttttttgcaatttgtttttgacagttaaagctgatttttattaaacagattaattaattactaataattaaatactttaattttcccataatcacaaaaccattaacttttagatgcttcaatttctcctaaacattacatcgtgtgcaaacatatcgaatacaaaccactttagtttcccctaaattaattacaaaagtacaagtgtcatctatcaacaaatctattgtcttgcatgcagcttacctttaacttacaatacataggtagattctcatcacttgtgtactttcattaacggacgcttttccaatcaacctttcacactaaacggacactgcgtcacaagcagacgttgaaaaaaattaaaaattgaagatactttttgactctcgattagagaggaaattaaactgactagatatcactaaaattaaaattaagaactattaagtaaaattttgaactttagaagaaattttgaaaatcaatagatagcagtacctattttataattgaacagaaaaagatttaaaacaataaaggagtagtagttatatgacatttgagaaaatatatgatcaattttttggttagttgaaattttatatttattgatgtcattatttgatgactacaaattccattttcaaacaaaaaaaaaacgttaagtaatttataaccttacatgttttttacttaaaaatgggatgatctccgttacctatctttttaatattatagattgagttgttataatatcgacaaaattatcgttaaaatcgttatacaaagtattaaaatgtttacaaataccataattagaattttatttgcaataacttaattgcgacaaaagttcggatatgatttgtcgcttttatcagtgcaaacatttacatttaattataatatttagtaatgtcaacggttttgacacgcgtaatacccatcttatatatgtaataaaattaaaagattaaataatattttcccgcctgacatgtcccttatatatgttatagttatatttttttcatgagtttagtaataaaatgtattatttgtttgtatggttcatattttttaaaccaaataagtaaatattaaaatgcaaacattattttcttaagttaaggaattaaatgtatttgatatgtttgcacacgatgggcggcctaattcagtaattaattaaaaatttaaattcagtaatagtaacatttttatagcactattttttttgttaataatgtgaaatcgtctaaacgtaacaaagtgacaatggtcttcgcaatttcaatcccttggattttgtcgttccattaaacacaataaatttagttacaaacagttttgcgtctccatgaggaagtattaagtgcatgtaaactttaaataatgttgttgctagaagaacaccattcgctaaactatcatataatctagaaataactagctaagtatcatttttaatcaaatattgtctatgagatgagtaagggcaaaagttgcaggtagacaggtactcttaatattaacttatttttagagaatttcatatcttaaatttgtaatttatgttttacagttttaagtaacgaagaaggacaaatgtaaccaaccatggtcgaaaaacttatggagttcaaaaatgaacaaacatatagttttttttttgtttgttaaaaaactaacaaacatatagttatgaaaaatagtctagtgaatgaaagatttatttcgaaattgggatactaggttcaggtaattatatgtatgtatgtatatatatctaaatagtaaaagtatctgactattccaaaaatcaaagaaattaatgcgcattttggtataagatttgaaaacaaacaataatatcactacaaaaaatgatgacaaatattttcttttaaatgaaactctaaattaaaaaatcagagaactcaaaaataaaaactgtgtattatcttagttctagtcacattatatatatgtgaagatcaaagatggaacaaactagggttttaaggatcgacaattttaactacatcatttttttttgttttttctaatagataaaatttaatcttgaaataataattttatttagaatttctacatacaatattgcaatattttccctttatagcacaaatccaacaaagatgtagataatctatatgaaaatcaatccttaacaagaaataaaaaatatggagaaacactaaaaattcatatattttatagtactaccaattttttttttgttgtctgttttaaatctgctacccaaaaattattggtaaatagcattaattttttcttaacttagtctagattttgtacattaattagcacacgctatttctaagtaatggtaatattttgtttgtatcttttttttctagtttttctcaacttttcttaatttttaatattatcattaaaatagtaaagagaattaagttttcatttatcttattttattattatttctttctacaaataataattacatatacaccagtacaatattgccatatgttgcatttccgtgtctactttactcgcctttaaatagtgaggtttgtgcaacctaaatagttcatccatacttgagagaagaaaaaaaactctttgcaaagattattagaatggcttctgctcaatctttctacaaccaaagctctgtcttgaaaatcaatgtcatggttgtggacgatgatcatgttttccttgatatcatgtcacgcatgcttcaacactccaaatacagaggtaattaaatattattatcatattatatataatatgttattgattttttgtttgtgatttcatttagatttttatttctatgatttcttagcatgaaatacaatttttggagaaacaactagcagttttaaaaacaaaacttgaattttgagaaattcaaagatgttatatatatatgtcaaaatttaacaattattcttctaaatcatccggattccgtttacatgtacacatctacaattttcaattgaggtattcttgttttgatgcctttgagacgaatagtttgattgataaaaaaaattctaaccaatatgatatataaagtttattttctttttgtcaaaccatactttatactatgtaacttttttaagagattattgaaaatagtttatttataaaatagtaacctattgttgaattaaaaaaaaaaaaaaaattgtaaatcgtgtttgcaaacgacatgtgatttatcttagtttaaaactagctgatattcttcaaatcgactgttcttataagtaatcaaccaattagcatcaatcacaataaattgtaaacacttcaatgaaaatggtgattttaaagaatatgttttacttatgttatgaactatctcaaatttgtgaaatatttcataactaatgtggaaaactatataacccctccatacaaaacgtaagtaaaatttatgaaatcctatcatttttaaaggttaaaccaatcaaaaagtaataattcttggtacttgcaatatttttgtcattatattttagtttattaattttattttgattaaatggttttagatccatcagttatggagatcgcagttatagctgtagacgatccgaagaaagcattatctactctaaaaattcaacgagacaatatagatctcataatcacagattattatatgcctggtatgaacggtttacaactcaaaaaacaaatcactcaggaatttggaaatttaccggtcttaggtaacattttttgttctttacaacttaaattaaattatgatatttattcttttgttatagtgaaagatatatttatccgtttgtttccccttacattgtttttgatataaagttatgtcatcggacaccaacaaagaagaggagagtttaagttgtggagcgatgggtttcattccaaaacccatacatcctactgacttaacaaagatttaccagtttgctttaagcaacaagaggaacggtaagtcaacactatcgaccgagcaaaaccacaaggacgcagatgttagtgtccctcagcaaatcacgttggttcctgagcaagctgacgtcttaaagaccaagaggaagaactgctcatttaaatcggattcaagaaccgtgaacagtacaaatggaagttgtgttagtacggatggttcaagaaaaaatcgaaaaagaaaacccaacggtggtcctagtgatgatggcgagtctatgtcgcaacccgcgaaaaagaaaaagattcagtggacggattctcttcacgacctattcttacaggctatccgacatattggtcttgatagtaagtgttttgattttcttaaaaaaaacgatatatatatagtacatgatacactgtttgttttcttacaattcaggtcacctgcacactaactaatgttttatgtttgtttactaatcttccaaagaggcggtgccaaaaaagatcctagcgttcatgagcgtaccatacttgacaagagagaacgtagccagccatttacaggtttgatatctcttgtcaaaaatgtttttggattttactgtttaaaatgggaaaaagttggaaaaacctctattaactcgaatcaaacaaataaactttatatcttattaagcacaaaaatcttccaagtttgagttgatttgtcgatttcaacctatccttagtcaacattaagagctcgttataacaccctttaacttaaacttggggacttttttcctccactttaaatacatcataccatgcatagattatgtgtcattctacttgttatttaacttaaattcatttgctatgttatgcagaaatatcggatattcttgagaagagttgcggagcagggtttgtatagcatgttgtcggatagaggcatagactcgatgtttcgacaaactcacattaaggagccgtacttcaactattacacaccatctacttcttggtatgacacaaggcttaacaatagatcattctattccaaacccgtacatggctttggacagtctaaactcttgtccacaacacgtgagcccgtctgcttcaaccagatgccttacaactacatgaaccggtcatccacctatgagccgcaccgtattggatctggatcaaacttgacgctgcccatccagagcaacctcagtttcccaaaccaaccatctcaaaacgaagaaagaagaagctttttcgaaccacccgtgatggcaaacaaaatcgcccaaacatctcaagttcttgggtttggacaacttggaccgtcagctatcagtggtcataatttcaacaataacatgacgagtagatatggaagtttgattccgagccaaccgggacctagccacttctcctatgggatgcaatcgttcttaaacaatgagaacgtaacatataaccctcagccacctgccaatgcaactacacagccaaatcttgatgaacttcctcaactggagaatctcaacttatacaatgatttcggcaacactagtgagcttccttacaacataagtaactttcaattcgatgacaacaaggtatattttcccaaccctaatcttacaatgatatatatatgtatattgaagtaggtgctgtgagatatgtgtttaaataatcggtttgtgcagcatcaacaaggagaagcggatcccaccaaatttgagctcccagctgcaaaattttcgactgaactgaatcatgaagacgatggtgactggaccttcgtgaacataaaccaggtatttacaatttattaagagatcttagcaataacaaaaatcgaatttgagccaacgttctatcaaagattagattttatcaaattaatgttttataaaactatccaccatggaaattttctaactagacttgttagtattagacatttagtagatttgcaaagtttttcatgctgctagctagtcttgtaattagatagaaatcggcatctgttaatgtcttattgacttacatgacttggttgtgaagggtcaatctaatggagaaacatcgaacactattgcttctccggagactaatactccaattttgaacattaaccataatcagaatcaggtacctctaattcatatcagtcagaatatttatatgaaactatgatacttaatatataaaagaaatatttgtttaaatctattctgaaacctggactcggtttttttagggacaagatgttccagagtttaacgattggtcgtttttggatccacaggtaaacgatataatgtttacaagaacttacataaattatttgtatatagtttaactttgaagtttatgagtctttgaaacaagttttggtgaattgtttcttatataggaattggttgatgacgacttcatgaactctctgttcaacaatgacatgaattgaaaaggattctcctctccatgatgttctcaaaaaggaggtgggaagaaataaattcggcgatacctaatagttctttaagcaaatatctatatagctttagtagttctttaagcagaatacttagttagcctttctaagtattggatgttatgtctttttttcagcaagcgtaatgagtgttggtcctgttggatattatattatgttatctctgggaactttgtaatatcatagtaatgatattaatactatctatgtggggtttagatagatctcatgtgtttgtgttacatacatacaatttacgatcaaatgttcttttttttttgtccaagcgaccatacgttctaagtttgaatggtacaatgttttaaacgaaaataataataaaaatgtgtaatatttggaaaaaataatacataatgtataagactttagatacaaaatgtgatatgtcaacaaattaggttttggaagaatttgagttttattgtagcttttagtttctgagaaatatataggaaaatactttttgtagtttaagatattcttgcttggtaagtgcaacacccaaagttaaaaatactagcaaaaacttcaaaacattgatcccgttgagtcgttgacctttgttttactgaaaaagtttgaaacgtaaaaatcacttacgaaaatctaatacatgtactcaagttttcaaagtcaaatttgtgatgaaatgtacttaatttctcaaaatcaaatcttgtgatgaaatctttttaacttaataagttttgaaaactgcaggaaatgcaatactattaatgtattttaagagtattggataaagtgataattgattctatctagtttttgtaagattcttatactaatgaaaatattgcttatttaatttaaaatagatttgtttctgttaaatattataaaataatattaaattagactagtgatttggaaatgtacattcaaaatcctctttattagaaataatttaagcagtgaattcttagagatttcgaaatattttagtaaaatttcttagtcaaaaatataaaaatctaaatctcatagtcgtaggtaagattacaaaagaatttgataaaaaaaatcataatatttttttctaattcaccaaaatcatttttttttttgaacaaacattcaccaaaatcacctagaacttcattaaaacttaaatccttccaaatatgttggttccactataccctctaagtctaagagtcatatcattaatttaattattttcttttagtcatggttcatgttttgatgcgtgctcccataaacgtatttcttttttttttttttttttttcctgaaaattccatacctttataaaaaccaaggaaccttggaacagatacaaagtgcctcctataatgagatacacctacaacaacagaacaaacaaacccaaaaaaacaagagcacattatacatcaaatagaccaaaccacgtcgccataaaagagattccatgacgtcccagcttctgagctctagacagaaggtccaagtgagtccgaatgaagttctttatctccatcaccaaagaggcagcaggcctagcaatagcagcatgaagacgagcatttctttctctccaaatggtatacaaagaggcttgaaaggcaatcctaagaatcatagccacatttttgttttggcaaggattcttaagccatataactccatcctcaaacaaagtaggaagagagacatgggcccttgaggtgaaaaaattccacacctccgcagcaaaggagcactcaaagaatagatgctgtcttgactcatcctctaagctgcagagaagacaagcagacggaacattcaaaccccaactaagcaatctatctctagtatgaagcctatgacgcatcgtgacccaagtaacaaaggcatgtttaggaatcctccctttaaaccaaaccgcttgaaaccagtcaactcttgttcccataggattcagatggagccaagtagcagccgaggaaaacacattagaggcctcactctctcctatttccataaaaaacaatcatcctcctctttctcttgagaaagcaccacattaggcaaaggtaaacaactcttgagcaactggataataggattcctacttctactcccacttatccaccactctccatctctcaaagcctccgccaccgaagcaccccgaggcatacccgtaattctcggaccctcctctccagataaatgaattagaggtcctaagtttgtccagttatcactccagaaattacaagtaattcctcacccaactttacacaccacaaactgccttgccaaaggtctaagcttacacatgcttttccaaatccaactcccagaattaacattcctcatctcccagaagttctgctgacccaacaaattcctcctgacccaagaaacccacaacgatccccccgcagtgaaaagaagctaaatcagcttcagccccaacactttattccacggttgcagtcttctcaaccccaagcctccatattcttttggcgtgcatacagaatcccagctcaccttagccccacgagcagactcatgcttaccagaccaaagaaaggcgctgcacattctttcaatctcaagaaggcattggttaggcaataagaaaattgaagcccaaaaggatattatagagtagataaccgattgtatgagttgtaatctgcctgcaaacgaaagatgtctgacagtccaagaagagaatctgctaagaattttgtccaaaagaggcttgtaatcctgcttagtcatcttctttgaagtcaaaggcacccccaaattttgtccaaaagaggcttgtaatcctgcttagtcatcttctttgaagtcaaaggcacccccctaaccttccagccatatcactgttctcctgagtaattcctccatccaaaaacaaagctgtcttctcccgattaactcctaacccagtaccttgtttaaactcctccagaataaccagaatttcctgaattgacctctcctccccatcgaagaaaatcaacacgtcatcagcaaagctcaaatgggtgatcagcggaacattacaatcaggatgaagaccaaacctctgagaacgagcacccttgtccaatttctttgagagaacatccatagctagcacaaaaagaagagacaaaatcggatccccctgcctgagccctttcttcccttgcaaatagccaattagctccccattaaaagccacactaaagctcggagttgtaaaacactccttaatccaaccgataaactcagcaggtagattaatagcctgtaacacattcaagagaaacctccaatccaaattatcataagcctttgccaaatccacctgaaggcagcctctagaagtgactccatcaacatgaaaatcagaaaccaattctgaaggtagaagaacattctcacataagagccttccctgaacaaaccccacttggtttccttggaccgcatcagaaatgaacattttgagcttttgctttaaaagtctcgcgataatcttataaaccgtagtgcaaagagaaaccggacgaaactgagacactctatccgctccttgcacttttggaatcaaagtaatcgtagtcgcgttataattccttggtaaaagccctgagacaaagaaaccctgcacagcttccaatatatcctgacccaccaagtcccaagcttcccataagaactcaacagggaacccatcaggccctggagccttgttctttggcatagtagcaatcacatctctaatctcttccaaagtgggaaccttaataagctgcgacgccaaacaattcgagcatctgaactgaaccaaatcctggatttcatcaatgggcataggaatgaccccaaaactctctgtgcccagtaaattctgatatcaacatatcttttatctgatccacattctgaatcctctcaccatcatcactccttaacagtttgatgcagtttcttccttgattagcaatcaccgacttaaaaaagaaggccgtacaggcttccccatccttcatccatctgattctagacttctgcctatagaaagactcttgagctttagcaaagaaattccaagactttctagcttgaaattcctccctgaataaaccatcagatggagcactcatcaaagcagcttgaactctttccaactcctctagagaatcctttgttctttgttggatgttaccgaacccttctctgttcaatttcctacaagctgccttgacaactctcatcctctgagcaaaagtaaacaacttagacccaatagacacctcaacctgccaggcatcattaataacagctttaaaccttggatgcgatgaaagaaaggagaagtatttaaaagctttcttgctcctagccaccagagaagaagtaaacaccatacaaggagaatgatctgaatcccctggaggatcaaagaccgttagagactcagggaacgcatcactccaatgctcattcattaaaaccctatccagtttcctcagaatagggtcatcttgtctgccattagaccaagtaaaaaacgcacccctagacggcatatcagataactcgttatccacaatacagtcttggaactctgccatacctgccagtgggaggggatgaggtaagactgagaaatgctcactagcataaataatctgattaaaatctcccataatcatcaaaagagcacctctagcaggagaaatttgagcaatggaagagatttcttcccataactctcttctctgcacctgagtattaaacgcatagacaaaagccactgagaagctctcattcgttgctggatcataaaccccacacaacataatctgagcagatttataaaaacaaatgacagaaaccgccgggtcccaaaccacccaaattctgccattctccgcaaaatcataattcatctcactcctccaacctggaaatgctgtacgaaaaatctgttgagcattctccactgagacgtgagtctccaaaacaccgccaatagaaggcttatttttcccaatccaactccgcaaaaacctctgacgggaaaggctatttagacctctaatattccatccgaatactatcattaatataccaaaagctgttagagctatgctctatcagagattaacaggactaaccgaggagctacctcgatccccctgagtcatagaagagaaattcggaactgtaataccagccacaccaactcctgactggcagtaagtccccttaatcggcttcttcacaaaatacttcttagcttcaagtttagcaaccttcttaatactcttcattcctggaaaaagcttcggaggttcagccacacccggctttccatagactttattcacctgtgaacccttgtcagacaactccttttctttgcctttccctttagatttagctcccaccacaacccactgattactcaaaccactatcagctgtaatatcagaaccaggaggaaccttcaactttaaatcagagctttcttttatccaggctttaacactctcctgtgttatgagagaaatagattgatcactctcatgggcaatagagatccccactggaggccaactccgacttctctccttcgctgtctttcgtgattcagctctaattctagtcctctttaagggagaagaagcttttccagaagcaccaggcccctgactcttcaccactttcgacccattagtctcgatagcaagagacgtggaggtcactgcgaccacagagcctgctggaatcaaccccttgaccacaccgccttgagctttcctcataagaggcttcggacaccgatttagcaaatgtccaaaccgcccgcaattgcaacacttaggtggcagtcttgggtaagacacacgcactttcacagagttcaataaagcgtctctcacaaagatggtcgtcggaggaggagcatccagcgatatctccactttcaccttcgtatttccaaagtaataaggatccagcttagatttttcagtatgaagcggttccccgatagcacttgctatgacactgattccatcaagagaatacatttgaggtggaatattttccaagatagcccatgtcggagccgtctccaactctggcaaaaacaatgaagcatctgtcgaccaaggataaactgagaaagaaacatttcctgcttgccaatacccaacctgtaacacccattccctagtcgaggtgcacggtatcataatcagacaagaagtatctgagactgctctaataacaatattcccgaattttccccaggctggattcaaatctgagaaaattttggaggaaggtggaatgagaccgtgaaacttcgcaactatatgacctttccattgatctgctgctttcaataacactgaggctggggcttgaactactggagtaccatcttctaggcacaccggagaggatatttttttcagattccttaaagaagccttgaaccgctctgcgtaagaaggcgctgcggtagaaggaatattcgctgggatcgaagactgaggcgaagataactgacacctcggcactgagatgagaggcggcacaacaggagaaacaaccaccaccacaaccgacggagctggaagagctggttcacaaggctcaggagctaaaggcgacgcatccaaagaagcagcaaccgccaaaggaagcggatctgaaggaagagctacccgaagaacaggactgagagacggctcagctaaaggttcaacaaccaccaaatcaggcggatctggggaagaacgagcagaggatctacaatcttcatcttggcagaaaggaaaaaggggggagaaaggagaatttctcagatataaacgtattttttttttcctctgtgccatattttctaattcaatattctaattcattcatttaattactacgaatttttataaagtttctatggtccctaagatgtgatcgtttatctgctttttgttcctaaaaattcattctcctctaagaaattacaaacataacattttaatatatattatcatgctgcaagtcgtacaatttgaccccaaaaaacctcgcctttgtcattacaattaaataaattggttgacgccaaataacaaataaaatgactttagttaagtaggtcaagaaggaatcctcaaaataaacgtttggtttgatggctttgcgaaaataaaaaacgtttggtttgatgtcatattatcaaagtcctatgtcatataactatagatctaaagattgagtctataaagatggactgaagatcaaatcgttattttttttggtaagcagatcaaatcgttatgagtagatggtttagtcaatatatagacattcgtatggctattgtactgtatttcagaattattttaaagtactggtaacttcaatatatgtatatggcaactatatttttagtttaagtcttgaaattgatatatattctaaactctgaagtaccataaacacaaatttaattccgaaattagaataatttaataaataatatagaaagaccacatattctacgtttatgaagggtttgttaaataatttaggtttatgaaccatttttaagtaaaccaaaaaaaaatatgatctatttttaaaatcttccccttcataagttcatatacaattctaagacccctttccctaaacgtaaattttgtggtactgtatatatatgttatgatttgggaaacctttttttggtgcaaaaaacttgggaaaacaaaacataaaatttggtactttaaagaagttcctttcttttcactccaactctttgcaaagagtcaccagcatgtagaaagcaaaatctctcgtttgttatcgctcgcccaaaaaatggatgtcaaggaaacatttagagccataccaaatctttgtgatagaacgcaagaaagttttcttattggataccaatcatgtcacgataaattatttgatgtattccttaattaatccgttaattcttattggttactataaaggcgtaatcatataaaaagaacttcaaattttgtataaatgctatattggcttttcaaaataataattgcaagattaactaaatctaaatcatttccttaatgaactttttgtactttgccttttctcatgtcaatggaccattggaggattaggtttttgttaccctaaagattctctcgttctctctctcgttctactttgtagccttacaaggaagcaatggatataattttggtcaccagaagttaccaattccacaagaaacataatcaatgttatgattggcatgtgttaccaacatgcctgctttcttttatgatcgtcttgttgctttgatattttatggttttgactatttaatttgatcataacaaaaggaaccaaacgatcaaaacaagctgaaaagtaaactagcaaataatcaacttctgatgtaaaacgatgtaaccaaataaaacaaactattctaaagaattaataatgataaaatattcatatgaaattgtttgcatcgatagaactatcaaaaatcataagaaaaaataaaatccatgaaatattgcatgaaaggtaattttgttgtggatcacaactacccttatatcactctctcttttttccgaatcacacaacaatgataaatggaaatgataacacgcaccgcatatgatgcattcaccactgatcatgcaccaccaataaaaattcaaaacctatgtctccattatcattaactagattttgacgatttgtacatttaatttattttattaattcagtattgaatactatgttattactcacgtcatgaatgagacatcaatatcaaaatttcatttttgaaaaaaaaaatattttaaaaatacaatatttttgctattacaattttgagttcgaaagtataggtattggtgttatcgttttagctacttaggatttagcgatggatttatcattttatggtgcatcaaattgtcgaccatttcaaattcacatagcaattagaagatatccctcaactagtatgaaattttgacccacaagatcaaaatatcagaaacattatattctgaaagttccgatgatatttattttccaatttgtatgccaagataattatgtaaatagtttactgaaatgtaatgcaattatgttccaaaataacaaactagtacatctttttgatagctttttattgtaatagtaaagaaaatccaaatctttaggtattacaatgatagtaattgttgaaactcccctattatttttgattgacttaaaagggagtccaaccaaaagatattctagacaaagcctcaaaaaatagccaagatcaaatcacaaatcatacacatctcagttgagatgaaaaacaaaacaaatcacatatgaaaccggagaaaaaaaagacatatttatcatgtatgtatatatagtgttcatcttaatcgaagaattcccatttgaatcgcggagggaccggtttaaccgtttcagccgccttggccgtcgatgcggaatcaaacatttcccattttgaagctacaaccgccggagtacctgatgaggatgatgcattggaattcctaggctcctcctcctcttcctccacaaacgataacaaatcgcgttgctcaaatcgcgtttgcgtttgcggtttgtggcggacggacttgttgacttcaacttttttggcagagtttttgactttcaagaggtcgagtgcctcaacgtacttctgaactctttgcacctaccaaaatcaaatcatgaaataaacaaacttaaccaatcaaaattagagatttgaaatgtaatttagctaatctaattttatacctgcatcttcctcatcaatttgacatcaccatcagcaataatagcatcaagtctcaataactgattcatcaacatctctatcagattcacaagactcttctcttcaactttacctcctttattaatcaccgtctcaaacgccgacacctgaaaaatattcagaacattgaaatccaaagattccgactttgagaaacagagtaaaaaagctctgttttttttttttgaagtacctgtccggcgagtctgtcgacttcgaaactaatatcagagatagatttagaagctttttcaatggcggcgtttttcctttttgcaaggagacgtttctcctgagaaattggatcttctttaacaacaagctttgaccgatctttaactccacaaagatcaagaaacatctttgaatctctctctttgtctttgtacaaaaccttcatgtcttcatggtgaagtcccacttgatcagacaacatcttcttcaactctcctgtttacaataatccaatttaagaaagaaaggaaaaaactaatcttttggttatatatagattaccaaattgggaaagcagaaaattgtaccgaaggaagattgggaattgatgttgatctcgtgataaaccgacccgtatttaacccgaacacgaaagacacgtggcacatcggagttctgatctgtccgacgttgaacaaccattcctccaggtcgagactcccactcattaccactagtcccgccgccgatgaccgacggcgatgttcctgtattcatcttcatcattcttgaaatattctttgcttcttctagtcttctctctgtctctgatcaaaaatagatcgatctcacatgttataaagaatccaaatatagagacatagagagagagaggtgatgaatatgatttctgaacacgatcaagaagaaggagaagaaggaaggaagaagaataaagaaacgtctgaacaaagggaagtaaattgttattttttctgcaactctaaattttaatattatgaaataaataaataaaaagagtgacagctaatggtattgttgttatgtctcatcatcagtaatcacacatatatattttattatatgattcccacattttctttgtatttttttctttgttctttatcagtttggttgtctctattctagatacagataatccatctgtgtcaatgtcaatggggaaaaatcaaacctattgttgttactgattatttctttctgagaaattccaaaatagttatgctcaaacaactgatagtaagtaatctgggtgattataatggtttttcttacactactactagacaatgtatcatggtcatattttgcgtatagattcaaaaaaatatagtaaatttggcgtttactcaactacttatgtttttggggaagttttgttagatttagttttgtaattcattggttctcttactttaattgttatagatttctcaggttaacagaatcatgaaaattctgacaagtttttttggcccacttactgatttcacacacaaccaaagtacaaatttcgtgtttactagaatttggtgtcgtgagaattggttcagttggcaaatcttattgctaatgaaacagaatgtaccaagtacgatggaactctctgtatcttcctcttattttgtgaaaacagactatgtagcgacaaaatggcaaatttcagtatctaaaccactagccactaggcaaattcataacaagtgtcactttctggtgaccgcatgagtttcagtgtcagactcagaacaacagcttacggacaagacatccaacaaacatttcaatacaggtccggcccaatatttatttttcatgggaaattttcttttggagagaactttttagttggatcatatgggtctgggcctctgaggtctggacacctctacctaacccactctggctatacataattcaagggcaatgtttttttttgttttgtttaagacaacagtggttttgattcttttgaatcacaaagccagagaaatgttcatttcaatgacaatggcttctttgcctttaatatgccatattgccatgactcctctcttgttttcaactcaagttctcagataattgtttaattctctccattcatcatacttaatacgattagtctcacatttttggtttttaatatctgatttttaaagttaaaactccttcagaagtctttgaaatagaacagagtagctagcaataccaaccatgtgtgtgttttcatgtatgtcatcaatctgacaaactcatattcttcttactagaagctaaccagttaacaagcaagatggggacaaatcgacactggaaaaaccaacatcattgtaagcaagtcactactcttcttgggagttgcatgcacccctcaaggctcaagctgaagcggattctcatccacaaatatcatcaatatatatactaaatttaacaaattgatatgaaaactaatcttaggatactatttttgttaacagatcccgccgtcgtttgaataatccagataaaataccaaacgataactatttttttcattattttagctttctttccttttttacatattcgtttgattaaatttgaaaaacgtttgaatgtttcaataaaatcgagtaacttaatttcaatattttgctgattcttctgttgatcaaagctaatgttatacaatcacttctctttggcaaacgcagcaaagctgaaaaatagtaagggggataaaaggggatagcgttagtatcactaaaatttatatagcatctaaagaataacatttcacgaaattactgatgatatattgatatggtatagctttgggtagtactaagacaactgatattttaccaaacaatatattgttcaatcatacgtcttcatatcgaatttatttgctttccttttctagaataaatgtaagaacttgaaaaaccaacatgttttcgtccaaaaataataataatctatttagcatatgttgatcatgtcagtaatagaagaagaaaatcgcaagaagacgatactaaccttactgttttggagccaatgactaatgcaatctttgtggtatttgtgagtacagggtaaaattgttaatttatctccgcgaacataatctgaatggcatatcatacacctgttttccccatttttattgttattaaattttagcagcatttcgcacaaaaaaaaaaaaaaaaaatttagcagcatatataaatttaattgtatatgttattcactggttctatctattttctacgtcatgtacactttttttctttctttcaattaattttagatttaatatgggtgaagtctatactttgtaattgtaaaatcagaaaaacatttatgtaaggaagggagatatataaagatagtcatgtacttacattttatcttctagagaaggtttaaacttgatggtaggtaattgagaaatttgtccctctgttaatccttcacctacacttgtgtttcctctttcacgctcttctatccgctctattatttcctgtgatacaataagaataatatatatatatagtaaaataaatattggaccagtttcggtctagacataacggtgagagttaatattaaaatttcaggcgagaaaatgatacttgaaaaatattatgatcgttttggatattccttacatcgagtgaatgttggtttgattcatcttccaagtgttctgcaaacgtatattaaaggtttattaactggtaagagattaaccgggttttggttcagcatataccatgattgactaactgatcaaatagtctttacttattatataaagacgatactattggtcatgctacaaaatcaagtcataccatatcctgagaatgaatgtggagaatcgttataaggcataagtgtgggtattgatcgtggtacgaacaaccgccttggcatcaacattagccacgatatccaacatttgaagcattgcctatggcgagtgtttggttggttttgaaactgatgatgataaccagaacgagaaatgtcttgtgaagtataatgttccgatgaattgggattataataatgtgtagacattgtaggttggttttgatgatgataagtaatcattggagaattgtctaacacatgcactggagaattattgactctaccacgttctctttgatattcctcgattttcctcgtgatttcatcagcctctccgaaaaagtaattgtatccactagaactttgggaatctcccatctaatttatgtattagagaagttataatattttggggaaatagattttctctactgattttgttgtgtgacattatatttttataagtacatgtttctgtttcgttatattgttgtcgtggttgagtctttattagagcatgtaaatatgtttatgaaataagcgagaaaggaattaattaaacgtatcgagtgataaatgctttaatggattcgagatttagtattcttaaatttttgtttcattatcattgattataaaactaagttatgttgatctcaaatccttaattatgttctcctaagaagagtacaagtggtgggaacgaaagatgagtaaaatactaaaaatcttttctcaaaagtcaaatcgcattagttaacaaaaacaaaccatgtgttaccgtcaaatcaatgtgtttaaaagatgttaaccactaatcaagcatttacgtgtaaccggatcaaccggatttgggttttgaatatgttgtggagatgtatataaatgataaattaattgaatatcttaattaatctgtgaaagaaactacatcacacactttgttatttcccctagcttttagttttttttatcatgcaaaacttatgaagtaactagatcaagatcataaaaaaaaagcatcacttcacttcatgacctaattattctcgaagcccaaaactatttacttacacttctattctataaatatagatgatggaattcaccaatccaaaagtgaataaaaaacagaagtacaaacaatatagtatctaattagaatggtatctctaaagtcccttgctgctattctcgttgccatgtttcttgccaccggacctacggttctagcccagcagtgcagagacgaactgagcaatgtgcaggtgtgcgcgccgctgcttctgcccggtgcggtcaatcctgccgcgaactcaaattgctgcgctgccctccaagcaactaacaaagattgtctatgtaacgctcttcgagcagccaccacacttacctctctttgtaacctcccctcttttgattgtggtaagatgatccatcgattaaaaccttttttactagatttttataaattattccatcaatagtgtttgttttatatttgttctcatgattttttggacttatgttttgtgaactgtgcaggcataagtgcctagttgaacaacattcagttccgaggatttggggagtttggtctgcaaacgacaagacgaataaaataaaataatgagaaatacactatttagtgttttgttttgaatttggtttgttcaatacttatgacagatctattgaatatcgttttcaccattattacggaatattttctataattggcatcattgtagtcttgcttttacaataggcgtgttaggttaacatatgcaacttcaggcaaaactcaattcaaattttaaaccaggtttcaaaagtaaaaactaccagagagattcacattgacaaaatcaaatgatgtaaaaaggaatcgttggtttgaagtttgaaccaaaccagagatttggtttggagtagaccggaaccactgacctattgactaaaagagtcaaaggatgcaatcttgtgacgcgtgtaatcaacgcgcatgacctatggtccgtattaaaaaggttactctatatgtatcacactttagcttctccattcccaattgtctcttcttttctttttgtacttgtcaaaaacaaaaagaacaacaaaaaaaatctcaaccgtagaaaattccgacaagagttcagttcatacaatgaactaagtatgggtttctttggaagactgttcggaagtaagaagcaagaaaaggcaacaccgaacagacgaagatggagcttcgctactagatcctcacatcccgagaatgattcgtcttctcattcaagcaagagacgtggggatgaagatgtcttaaacggcgacaagcatgcgatagccgtcgcggctgctacagctgcagtggctgaagccgcactcgctgctgctcgtgcggcggcggaagtcgtgagactcaccaatggtggtagaaactcgtcggtaaaacaaatcagtcggagtaatcgtcggtggtctcaagagtataaagcagctatgaagattcaatccgcttttcgtggctacttggtgagttaattacttctctaagtttaatcttaatactcaacttcataatctataattttgtttgaaagaaattaagtttttgagccaaagtgtggaatagctgtctgatgttgatttttctacttaaacccaaattgaaatatttactaaacaaaaaaaagaaagaatgagaataatttgtatttatttgtattggtccccgaaaaagactaggaaaggagacaaatgaatgaataatgataccaagaaacttgtttagagccgatacgattctctaccgagtaccgacactatttaatggtactactctagaattgtatagataaaatttggtcccaaaaaatatgcaaatattatctcaaacaaaatcttacctaactagatttagctaagggcttattctttgtaataaattaatttttacattaaaccaagtcagcaataaagaataacaaggagagggccaagttctttattttatctactttctttttagtttccaaagttccaaagtgtattttactataaaggtgaaactacagattggtttttaagctttttgagctttaaagttgcatcaccactgttactatcaaagttgcaacctacctttttcataatttgacagataggttatgtagtttagacacataatttagagattctctaatcttattgcttcgtatataacaaataaggtgtgtatcatttagaagaaaatgatagtggttgggaaactatgagtaatttaataaggagtattagtgtattactttgtggtttgaattaagtgtgtaaccaagttttctttaattcaggcgaggagggcgttgagagcactgaaggcattagtgaagcttcaagcgttggtgaagggacacatagtaaggaaacaaacggctgatatgctgcgtcgaatgcaaacgctggttcggctccaagcacgagctagagcttcgcgttcttctcacgtttctgactcttcccatccgccaacactaatgattccatcttccccacaatctttccatgcacgatgcgtttcagaggctgagtacagtaaagtcattgccatggatcaccaccacaacaaccaccgttcaccgatgggttcaagccggttattagaccaatggaggacagaggaaagtctatggagcgcaccaaagtacaatgaagatgatgacaaaatcctagaagtcgacacttggaagcctcacttcagagagtcaccaaggaaaagaggatctctagtggttcctacaagtgtggagaacagtccacaattaaggtctagaacaggaagcagcagtggtggttcaaggagaaaaactcccttcacgcctgcgagaagcgagtacgagtactactctgggtatcaccctaactacatggctaacactgagtcttacaaagcaaaagtccgatcacaaagcgcaccaagacagagactacaagatttaccttcagagagtggttacaagaggtctatacagggacagtattactactacacgcctgctgcagagcgatcgtttgatcagcgttcggataacgggatcgcgggttacagaggagtttctgatgggttagatcgaaaccaaagtgacaaatcgaagatgtacacttcgtttttcagttctaatcctcttttctttcaatagtcgagaaaggatgaaaaaagtgagtggaatgtgtaaaattagatttcgacacacgagtacagagacagccagtgatcaatctgtgttttgtactattttctaattgactgtatccaacaagggtccattcttgtctgataaaaaaacttcaataatttgaagtgatgtcaagtcaagacgtgggaatcaccacttaaagcaatgaaaattgattgatataacctttcatattaaactaatatcttcttctttttctttccggtataaaagcccaataagagtcacacacataagcaatcacacaattacactgaaacactaaaaaataacacgataaatataacctatagatggatttacaaagtaaaacttgttgctttacttatcagacatcatcacacctccaacttgaggtgggaacacagcgcaggtagtgacaccaacggcagtgatcattgccgttttctcctcgaaatagcatcaacagcgccaccacaaacctgcacaacattcacttaatgtcacactttgaagtttaatattgaaatgacagagtaatttgtgggaatgcaaaatttacccggcaatcaatagaaccaaagataggagccacaataggtattggtaagtcttgtacttgtatctcagaggtgtgccttgtggcatatgctctcttgctaaccacttaaactggggacgagccaacagaatgaaaccgaggagaaaccccgttacaaatccacccacatgagcaaaattatcaacgtgaggcagaatcccaattgccaagtttatcaagatgacaaacaaaagcgtcaggagtgcagcaatctggtacatatgctcagatcagaaacatgagccaacatgatggagtgatttgtatgtttgaaatgaaaagcagattggtattaaccttgttagagtagattgtccagttggtgaaaagttcagagagcattgagccaaggaggccaaaaagagcaccagaagctccaacagagatactgtttctgataaacaacgacgacaatacactccctccaattcctgataataggtatataactccgattctaactgaaaatttcaagaaaccaagattcagatttctagcaacagaataacacaactagaagaatgaagactaaatccacccaaattgcataccaaaaccaaattgctgctcgagacgaataccaatgaaaacaaggcttaacatattggctccgagatgaataacacccgcgtgtaaccatatacatgtcaagagacgccaaccttccttcttctccacaactttgctccactcaagtgctcctaacttctccaatcttcaagtatatatcaaccaaaacacaatcatatcaaaatcttgtatctcaaactctcaatcacataacttcatcatttcaacatctcaagatccagtaaatttcgatttagtaaccgacaaacttgagaaacagaaccaaaacgtgattctctagtatttagaaccctaaatcaacatcgatacaaaatttagaaaacgtacgtgtgagaagatggaccaaagagaggattagttcggagaggctcaaaggagagtctaccgagaaacttggcgacacagtgacctctgagacggtgagactcgaaatgattcggacagttattaacgaacatcgccacgacgaaaaccgcaacgttagccacaacgaacatcggaacaagccacgacgtccaccgcgacgacaacgcgttatcgccaaattcagtagacgacgacaaggctaccggcagaggcggtggtccgattcgattccgatcaccgcctctgcttccgattcctcgatctttcgccgacattctgttctccagatcatcatctccgacagccatagtgatctctctcttctctgtctgtaatttgtttattgttttttttgttttggttggtttttttttttttttggattgaaggcggtaagaagagttaaaccttgagagtgggtgagaaagtgggtttctgttaaccaattaaatctttccacgtgtaaatgtataataccggtttttgtggtacgtgttacggtgtaccgtggtctattgcacactgtatcgtaacggagctaacgtgcgctggatttccaaatttgctttaagagcatctccatcggcaaaagtggtagagagtatctcaaaaaataaataattaatattttaattaaattaatatattttaattagtttaaagtaaatgaaccattaattgaatgacaattctgaataaatgctcagaatcttctttcttgccagaaacatttctccacttttctctcttctttcatattttttctctttttaattattatttaattgatgagtatctcaatcagatactccgatagtataaagctgtgatgtatgatactttgctcttgtttcctttgtctttgggggttcttaagaaagtttcgttggctcgtgtaaatgtctaaacttctggacttgataccctatcaattaataatatcggaaaaacaacatatatttgttatgttgaggactctctaacgtttaaattaatatgaacaacattattaaatgaataatcgggttccgaaaatatagtaatgagtaaagttttaggtcttagtcgaaaatcgttgaagacctaatatgatatttggtggaatgatatcaaagagatttttttccggaagagatgattataatgttttattcgaatgtgtggaccattaggaatattagtttagagatatagaatgttatttgtgggagatgggtaaaatccctcttagaaaaaggatcataataaccatgccggtaatatgtgtcttattgatcgtggaataaatgtatggaattgcatggtggatcaagatgtggtcaccgcgtaccaagcgcatcttgatatttgttttaaaagattttcgtcgcttcttcttaaggtatatattgaacgttaaagttaaacttaggatgctagtcgagatgaccataatgaaatctctagacttatttaatccagttgaaaactcatcacataatagttgtcgtatgacattttcgaaacattgttcctttgggtttagtgttgatgtagcagctagaggtgtgccattactctttgaatgcctacggaacactcatacgatgttatatggtctgtggtcacacagagtagatggaaactatcttatgtgtgatgtgccgtcttaatctattaaagggcctttggtaaaaccaaaataaattaacctttttactaaaaaactttttttttctaaaatttgggatcattttctttactaatatttttttagaatgactttgcacccttggcaaatatctatgttgtctaaaggtagagacggataaatggacacgaggaccggaaaagatggcttaatctttcggaagtttagagctacatctttaactttgttttggtttcatgtcaacgtatcatacatagataggttgtaaaaaagcgttacgagaataagtattttctgaataaccgtaacgcctttttatatatctttaagaataaaaaagtcattaactacaaaataagaaggaaatttattggcagagaatccactttgaattacaataaataatgatgaacatttgtctcattttagtcaaaaaaatatgaatctcgtgagcctttcatttattaacctacacataatagtttttcttgtttatatatatatatggttaatggttttcagagaatgaatactcagtcactcataactagcagaagttttttctctacagattcatcgtttgaggagttctgtgagtttatcaaggtaggtatggtttcttaaatcttcgactaaagtttcaattcttttcaatttaggttttctgttaaacaaacgaggttttattttttaaacaacatatcacaaattcacaatagttgtttaacttttttgttttttgtttttttctatgactataacacatgaaaaggtcagatatgtatcatcatcttcaaacgaggatttttctccaccaacaaaatgatttgctgagagcagaaaacagagctaggattcatgctatgacctctccatcaatctgcagatcttgtgaggagcccatcatttcaaccgaagagagggagctatggttggagaatgctcgtcttcggtccgagattgatacattgacttgtttcatatggagattaaattcgttcaggaacctatatcccgcatttgctacgtctttgactgaagtgggttacggagtggcggttatgacgtcactttcgctgaaagaagttgtttttcttgcgaggcaaagaactccgatgtggacaagtaacgggagattgaatctcgacgaatactactctaaattatttccttggtacgcaagaaacgcacccgggtttgtacatgaggtatcaagagcttctgcttttgtcccatgtgatgcttcatcgctcgtggcaaatcttatgaatcatgtaagtgtgtgacaaactacatgaaatcataataatatacacatttatccttttttcttatattgtttatctattcaggtaagttggcaaaaaatctttccgtcaatcatcgcggatgtgtctgtggaatcacaacaacggggattgcaaaaggtaccaaacatttatttattttccgtacaaaaattagaactagtgataattttatatctttataattgtagattaatgtgaattttatgccacaaatctctcctctcattcaaactcggaatgtgaaacttcttcgacgctcgaggcatatagaggatgatacatgggctattgcagaaatttctatgtatttcagctcatatgcgcaacatttacgtcctgaatatatgagatttccttctggatatcttatccaacatatagccaatggtatctctaaggtatatttcaatttcaatagagtttaaatatatataatggtagctttgttctgattttgttattatttgtaggtaaccattctcgaccattgggtttacaaggaagaagaaggcatgaacactttcaattcaaactctgaatttggtgcacagagatggctcactgctctccaaaagcattactacaacacctgccccgtttctattccttcaattggtcacaatattcaaagtagtgaaaattctgttttttaaagtttttattgttctattcatcaattttagtttgattttacactaaccatgttttttaacgtttgtacttgtttagtattcgaccagatctgtcgcaagaacttgcttaacctatcttcatttatggttaacgtattttgttcgggagtttgcgggataactggacaaaggtggaatcggttgaatacagttggagtttcggctaataacattagaatgttcacgcaagaaagtcgaggcatgagtgggatcccttgcgttttggttagcgctaccggtttagctagaatgcacactaaaccagaagtaatgtttggattaatcaacggtgcagaaaaacaagaaatatggagttatttagagtctgctaaagatatgaaagaactaattcgtatcggaagacatcctaattcatggaatgaagtctctgttttcagcattgaggtacgtaaaaaaattcatttggtttagtaataccaatcgattattgagcatttgatttatgaatagagaacaattaaatatattgcagtggaagggttcgaaggagtggtatctgattcaagaaacatactacgatgaatcaggagcaatgataatccacacttgcgtagaagcgccatattttgcagctgcaataaacggtggggatttgtctggcgtcgaactgttacccagtggattcaccataataccatgcgaatcacaagaatgtttcgtgacagctagttgttatgttaaggctgaccaaactatggtcacgagtccaaatgagctggggagttatatggagaacatggtcactaacattctaggaaatgtccaaaatgctcttccagtccaccgttgaagttttatggcttatgaagtttttaccgttcttgttgtcgtcgtcgtcgttattgctattgctgcatgttgttgttgttgttgttgttgtcgttgtcgttgtatgagagtttgaatttggaactttatttctatgaactttattatacacctatcattaagaaataacaaataaatggtgattatggttttatctaagtttttgaaatatttcatatgttggtaatggatttgggatagtaaaccaactaaccataataaattagatcatataacagttttttatatggtgattaagaagaacaagcaaccttatgttttaatcaaaaataaaaatatgaatcaagcaagcaaactcgaagatgaactacaaagacgccacgtggacgagtggggcaagtgaaagtggaagccgacgaatcaaaatggcaaagacgaattagatgtaggggcaaaataggaaaatcaggtttatgtttcgcctgcatcttcctctggtctttctttttgtctcagacggacaaaaccagagagagagagagagaaagagaaaagagagttcgcgtgctgtttgagtatcatatctaatcccagattctttcttccttctctgtatatttccacgacggttgacctaattttcgtcaccatccaattggatttgagaagagagaaaagtattctcatcatctgaagaagaagaaagatagattgatagatagagagagaaatgggtaattcatttgggtgttctgcctccggcgagagattagtgtcggcggcgagagatggggatttcgtggaagccaagatgcttctcgattgcaatccatgtctcgccaagtattcaactttcggtggtcttaattctcctttgcatttcgctgcagctaaaggccataacgaggtttctttttcactcttcattgctcataattttactgttctcgaatttttaatataaagttttctcttttaccgatatgtgatgttagatcgtcggattgttgctcgagaacggagctgatgtgaattccagaaattattgcggccaggtaataaatctagtttcagttttttttctcaattggatttgaaattgttgagcggattctgagctgattcattgattcaagttcgattcttttgattcgacgaatcttaatttgatttagggatttgtatcattagtgaaatgtgaaatctttggctaagtttgagctcattaggctaatagatcgattttgtttgaaatctgacttagattactaatggttacaaattcgattcctacactgaatctattaaaatccaggaatatgctaagtttgcaattaatcatgtttcagacagcattgatgcaagcttgtagatacggacattgggaagttgtgcaaactcttctgcttttccgatgcaatgtgagttcttttcatcactagttgaaagaaaattataacatttggttttgattttgattcttagtatcgtctttctttgtcaaaggttacaagagctgattatttagctggaagaacagcgcttcatttcgctgctgtgaatggtcacgccaggtgtattagacttgtcttggctgattttttacctagtgataaacttaactctcttcctgaaactggtgttgtcactgcaaagaacaaatctgagcaaaggtttttttttttttggaaaccatcttcatgtttgtaaggttttgattgactatgtagttccaacaaaaaaagaaattgtcttttggtgcagcgcattgtctaaatttgtgaataaggcggctgatggtggaataacagctcttcacatggctgccttgaatggattatttgattgtgtgcagcttttgcttgatcttgaggccaatgtttccgctgtgacatttcattatggaacatcaatggatatgattggtctcagctttctatccgccttcttttttattgactaaaggattctttctatactgctcccaagatgacaatcttgttcttcgttaacgttgcaggagctggaagcacgcctttacactatgctgcttgtggtgggaatctgaaatgttgtcaggtaagaacaatactattaagtttattctttttgctttggtattttggagacaaagacttgagagaatctgcattttatgtatttctccatagattcttcttgcaagaggtgcaagaaagatgacattgaactgcaacgggtaagttattccatcacaatcttctaatgttttacttcatgttcaaaatcagtttcagggaagtatttgacgtcgttagaatggaaactttccttttccaaaatatgtttgtaggtggctacctattgacatagcacggatgtggagtcgtcattggttagaaccgttgctttcaccaaattctgatgttgtcattccagcctttcctcattccaactacttatcattgccccttttgagtatcctcaacattgcaaggtaatgaagaaatctccatctgagtttatagggccaaactctggcctcaatatgatttctcttcttgttgactatttgcttgcagagagttcgggttgcagtctgcaaccattggagatgaagtcgatatctgtgccgtttgcctggaaagaacatgcacagttgctgctgaaggttcggtctaaattgttgtcatatcctttgagagatgtttattagtgtcctttgaaaaaaccgggttttgtgtttcaggttgtgagcatcagctatgtgtgagatgtgcgttatacctttgctcttcaagcaatgttccctcggtgacagttggcccgcccggatcaattccttgccctctttgtcgacatggaattacagcgtttaaacgactcccaagctccctgacaagagaaatgaagttacccatgtcactcgggttctgtgcaccatgtatgcttcacacgggagacacaacagatcaatcatcaccgacatgcccaccaacagaacaacgcagcagcaagacccgtgcagcctcggtttcatctgatatattctgtccggtaacatgcagcccattcccttcagtaaacattccaatgtgcacctgcaacgaagggacatgtccaaactttgagacacatggaacagagagacatagcgaagaacacgtcgaatcttctccttctcgaacaacaactgaacaggagaagatagaagaagggcaaagacttgggaaaacaacaacttgttcaagtatgttctggggaagaagaagctgtagcagagagaaccaatgcaactccgagatcaatgcttgatcataaacatattatttgtatgtacagagaaagaaagaggagaatctatatgtctcccatcatttcttacttttaaaatggggatgagccacaacacagagagtcttcttgttaggtttgtaacgtttgtttttgactttggagaggctcaagttattaattatggatgatgatttgtaattgtcaacataatgatggggtcattttgcaaaatctttctatttttattagttggacccatttgttatagtacatagatgaaaatattgagactttcttataattttcaacccaagaactagaagaagtcaaacaaaactaaaggtaataatgaatgattctctatagctcttgatgagaaaaatctgaccacacaaagtccaagtcattttcttcctctgcaaataacttaatactacttttactcttattagttcttggatccaaaagaaagaaaaaacgaaaaacaaacaaacaaatgaagctatcactcaattagttggactcgaactggtttggtttcagtgatgcgccaatttcaaaaagcattcccatttttggctttgctacttcgaaatcttcatttgcagagctagtctatatgactttaaatttcaattacattaccattttttttattaacttattattatgtcatggatcaataattctatatagttcaacctataatgaatttatgagaaagagtggtccactaaccttataatcaactatattcacttaattaggtttaataatctaatgggggtaaagtctttatgtgattagaaaaatggaaacagatcccaaagggaaaaagcttaaacattcccaaaggggaaagaagacatgtgggggaactctgctcttttttctcctcatttttttaatttacaatggaccaccacattctctgttttcttaattttaaccccctttcttaattatcttcgaaacaagaaagcaaaattaacttgtatactataaaaattaagaataatgactatacaattttgttctgtttttgttcgcaatgaaaaaagcctgaacatatgtagttagattagataaatcaaaatctactgctataaagtaaatgcaagaattcccaaacataaaaccaccccctaaaatgattagctgtaatctatctataattggttttgattgaagcatcttcggatatcacattaaatgaatgaaaatacacaattaatttgaccagctttttaataaagaagccaaaacaaaaactcaaaattacaatttgaccatacaactttcgaatatttagaaaacaaaccccgtcagctttaatctggtacacagtggttgggattcctgcagattcgagccgtactctctcaagactctgacccatgccttcatccatatataactattcatcatcacaaatgtatatttaaaaattcacgcaaacaaaacaaagcttgaaaataagaaatattaaattgccgttacgaagtcttattacgtcacgtgagtttcgtgcttctctttctctctctcttcttcttcttcttcatcttcatcttcatctttatcgcgcctaaaaaaaaaacccttcctttttctctttaatggcgtgatttctcttctctgctcttgtaaaaattgaaactttctctgtaaaatcgtctcttttaaatctccgagttttcttcctccttctctaaaagaacatggcgtttcttaccgcattgttcctgtttctcttcttctctttttcgagttccgccattgttgatcttagctcggaaacaacttctctcatctccttcaagcgctcactagaaaacccatctctcctttcttcatggaacgtttcgtcttccgcgtctcactgcgattgggttggcgttacgtgtctgcttggacgagtcaactcgctctccttaccgtctttgtctctgagaggccagattccgaaggaaatttcgagtttgaagaaccttagagagctttgtcttgccggaaatcaattctccgggaagattccgcctgagatttggaatctaaaacatctccaaacccttgacctctcaggaaattctctcaccggacttctcccgaggctactcagtgagttacctcagcttctctacctcgaccttagtgacaaccacttctccggttcacttcctccatcgttcttcatcagcttacctgcactgtcttctcttgacgtctccaacaactctctctccggcgaaatccctcctgaaatcgggaaactgagtaacctctccaatctttacatgggactcaactcattttccggtcaaattccgtcggagattggtaacatctcgttgctgaagaactttgctgcaccttcttgcttcttcaatggaccgttaccaaaggagatttcgaaactgaaacacttagcaaagctcgacctttcttataatccactcaagtgttccattcccaaatcgtttggagagttgcataatctgagtatactaaatcttgtctccgcagagcttattggattgatcccaccagagcttggtaattgtaaaagcctcaagtcactgatgctgtctttcaattctctctctggacctttgccattggagctttcagagattcctctgttgacgttttctgctgaaaggaatcagctttcgggttcattgccttcatggatggggaaatggaaggtactggactcacttctgttagctaacaatcggttttcaggtgaaatccctcatgagattgaggattgtccaatgttgaaacatctcagtctagctagcaacttgttaagtggttcgattcctagggagctctgtggttcaggttcgttggaggcgattgatctctctgggaatttgctttctggaacaattgaggaggtctttgatggatgttcctctcttggagagttgttacttactaataatcagatcaatggctctattcctgaggatctttggaagcttccattgatggcacttgacttggattccaacaacttcacaggagaaatcccaaagagtctctggaaatcaacgaacttgatggagtttacagcttcttataatcgtctagaaggttatttgcctgcagagattggtaatgcagcttcactgaagcggttggttctcagtgataatcagttaacaggtgaaatcccaagagagattggaaaactcacatctttgtctgtcttgaatctgaatgcaaacatgtttcaagggaagataccagttgagctcggtgattgtacttctttgactacattggatctaggcagcaacaatcttcaaggacagattccagacaaaatcactgctctcgctcagcttcagtgcctggttctctcttacaacaatctctccgggtcaattccatcaaaaccctctgcttatttccatcagattgagatgcctgatctcagctttcttcagcaccatgggatatttgatctctcctacaatagattgtctggccctataccagaagaacttggcgagtgtttggtattggtagagatttcactgagcaacaaccatctctctggagagattccagcttcactctctcgtttgaccaacctcacaatcctggatctatctggaaatgcactgactggatctattccaaaggagatgggcaactctcttaagttgcagggattaaacttggcgaataatcagctcaatggccatattccagaaagctttggcttgttaggtagcttggtgaagctaaacttgactaagaacaagcttgatggaccggttcctgcttctcttgggaacttgaaagagcttacacacatggacttgagctttaacaacctaagtggcgagctttcatcagaactgtctacaatggaaaaacttgtcggcctctacattgagcagaataagttcaccggggaaataccttcagaacttggtaatcttacgcagctggagtaccttgatgtttctgagaacttgttatctggagagataccaacaaagatctgtggattgcccaatctggagttcttgaatctagccaagaacaatctgcgaggagaggtgccgagtgatggtgtttgtcaggatccttccaaggcattgctttcagggaacaaagagttgtgtggcagagtggttggatcagattgcaagatcgagggaactaagttgaggagtgcttgggggattgcaggactcatgcttggctttacgatcatcgtttttgtgtttgttttctctctgcgcagatgggctatgacaaagagagtgaagcaaagagatgatccagagcgaatggaggaaagcagattgaaagggtttgttgatcagaacctgtatttcttaagtggaagcagatcaagggagcctttaagcatcaatatagcaatgttcgagcagccgcttctgaaggtgcgtttaggagatattgtcgaggctacagatcatttctctaagaagaacattataggagacggtggttttgggacggtttacaaagcttgtttaccaggtgagaaaacagtagcggtgaagaagctaagtgaagccaaaacgcagggaaaccgagaattcatggcagagatggagactctagggaaagtgaagcatccgaatcttgtgtctttgcttggatattgctctttcagtgaagagaagcttctggtatatgagtatatggtaaatggaagcttagatcactggttaaggaaccaaactgggatgctagaggttctggactggtcaaaacgcctcaaaatcgcagttggagctgcaagaggtctagctttcctacatcacggtttcatccctcacattatacacagggacatcaaagcgagcaacattctgttagatggtgattttgaaccaaaggtggcggattttgggctagcaagactaattagtgcctgtgaatcccatgttagtacagtcatagcagggactttcgggtatatcccaccggagtatggtcagagtgcccgagccacaaccaaaggagatgtctatagctttggcgtgatactattggagcttgtcacagggaaagagccaaccggtccagactttaaggagagtgaaggagggaacttggttggttgggcgattcagaagatcaaccaagggaaagctgtggatgttattgatccactgctcgtatctgtggctttgaagaactctcagcttcgtctgcttcagatagctatgctttgtcttgctgaaacgccagctaagcgccctaacatgcttgatgtgttgaaggctcttaaggagatatgagccatataaccttaaatgttgtagttgtttcttgttgtttaagtaaactgctagtactaaccaaacaagggagtggtagggtttgtatttgtaatgttaatgtaagtgttcttcagtttcttctaaatgtcgaacaaagaaaaataggtattccaatttccaattaattgcacttaatttatgatcaggtgtgaaataaactgatgttataccaaaccaaagaaaaaagtttataacccaaagataaaactttaaaaccaaatatgcaatgttttcatcggtactgctaaataaatttggtttcaattttttttcattttttctgagttcaattcgagaaaatcataaaaataatatatggatacctaagaaaaccaaacattttttatatggacctagctcgggaagttattaaagcacatgcggtggtaggagtgtctcggagattagtgggcagagaagatagactaatctcatggagtagaccaagtgaaggttggtgcacgctgaatacagacggagcgtcaagaggcaatcccggattagcggcggcaggaggggtcttacaggagagcaatggggaatggcgcagagggtttgcaattaatatcgggatatgctcaacacctcttgctgagttatggggtgtatactacgggttattcatggcctgggagtgtaaagtatcccgattagagttagaggtggactcggaggttgttgttgggtttcttcggacagggataagtgaatctcacccgctgtccttcctaatacgcatgtgctatggctttatatcaaaggactagatagtccggatttctcacaagtatagggaaactaatagtctagcggatgagttagcgaactatgcattttctttacctcttggttttcagtttttttatgtttgtccggatgctgtttattcggttatgttggaagaccggaacggaatgtcgtttccgcgtcatgttcgtttgtaatttcttttagtttgaataaaaaataggggacattgttccctatcactcaccaaaaaaaatgaaatttattaaattaacaaattttatcgttacagttttcaaataccaaactaggtcttggctttcgtgtattcggatcgagctattcatattcaggtttttcggcttaatttggatattttaagattttgatatcgagttcgatttggttcgggtttacctaaatatttagaaaacaaaaattttatacgcaaatctatcaaattacttgaaaagtttccaaaaaaaatatttttacttaaatatatgcaaaaatatataaaataactaaatatccgaaaaataacttatatattaagtattatcagatatctttttaagtttaagtttgaatttttggatctcgaagtttaagatcattgagtatttgacttcagatcgagtttttctgggtagactttgtttcggtttttcggattcggatattatggcaatatctatactaaattatttgattttaatatgattaaaaaaaaaatcaaactttttttgtaatcctaaaccaatgtacattccttaataacaaacaaaaattaaaaataaacattaaattgacagaaatgccctttctcgttcaaaaccacatttatgagataaagaaaataaaattgcaaaaaaaaaaggttggaatgtagctgtttgatgtcaagtcaaaatcaagaaatacagtatggtggtcagtaaataattattgtaaatagagggaaaaatctttagtccaaacttctggctttatattttacagtcactcccacttctttttattctttagttattgactacatacaaaatttctgcaacttgctcttttattctgtcgccaaacgtgttcatataatttacactacgaaatgataaccacattatttatatatatatagtatataaccttttctttttaaaatttgtaaaaaggtttgttttctctaattaactacgaaaacaatagaaaaaaacgctaactaaaaacctacaaacatgaagtctcgtgaaatatataggagtcgtagactttgtccaaacaattcacggattaagcatttattgcacaaacctaaatatctcaatttatgcctcatcagtaatataatatcaatcaaataactagtgggttatgtattatacgtacgggccaggcctatttaatgtggatatcacgggtctatggatacagcccatggctaaccgtaatcataattatgtattgcaatgttttgaaaaaacaatacttacttacaatgtttctttttgttgaagctacttccttgcaatgttgcttatttagttttatataattttaaacaaagcatatgttggctaacacaaagtctatttactgattatatatacaggtgtaatgggattagtgtgtcgagtagagtcagtagaccgacgaaaatctatagagacaacgacgacctgtataggagaccgcatggaccatgtgaataagtcaataattaatgcattattgtagtaaacactatttaatgattactaaattaattattcaatgatatcttaatttagttttttttagttataaatatttttattggttgggttttattttcaaattaattttctcttgctttgctcttctattctctcaaaccttgtcctcccaaagatatgttatgtaaattaattaaaggaaatcaaattctgttaatgattatctgtaactttgtttttgtcaaacaatgattatctgtaactaagttcgtcgtattatacgcgtaatgatatatagtcgtgtctagtgtgtcatatgactcgtgttatacgcttcaacttatcctacatgtacctaaaggcgtgcaagcaaaattttgtttctaagcttatttgtgtagaaaaatacaaaagcaataaataatttgggtaaacttttgcatgtgatcaatggatggatatagtacacattgctacttatgttttcaagaaactctagtacgcaagaatagacacgagttcgaatattttgataaattggaataaacttgttgaatttgtagatagttatccattttatatattaggtgtcatacattgacacccaaattcaaaagtttatgtgtactttgtaattgtatgatgcatgtatttaatatagagtagattatagtgtcatttgagtcatcgttttcaaaaaagaagaaggtaaattgttaatgtcttcaatatatagctctattggtaagtgtaaagaaattggtgataaaaacgtagactaaaacattaagagcaattagcaacttaaaacctaaaacaatagcaaatttcatgatatgtaagaaatcgtttgaaaatagattataaaacaacgacaaatattaatatcgtagcttcggtggtttacatttgaagtaactttagatgacgacctaagtatcattaataaacaataagattacctgctaatcttggttaacggatagcttgatgctacaactggaaccggtttgctatataaccggttattggttaagaaccggtcaggttaggttagattagacctgatgttagtgtcaataccctacactttgtttgtgttcaagagttcaccataaagagattcgacgaatccaacggctcgtgagtgaagggtgcatagagatcggagagtagagaatcgaagcaggcgtaggatatttgttttgttgacgtcaaccatagaaagatatacacgtggaggtattgagaagagcgtcttaagaataaatgcttttcttggttttcttattaaaacagtaaaaatgcttttcttgttaaagaaaaaaaataaaaattccttgactaatccttcacgccgcgtctagcccattaaaaattttcggacaacaacaacaacaacttcgctttcctatctctttcagctttgctacactaaacttggcttatcattgctaatatggctcgactcggcttaattttgactaaccacaaatgttttgtaaaaatttcagtaaaaataaaacaaaaattaagcgaaataaatatctagggaaactatattacgcaatgtctaattaggaaactaaatcattatatttatcccaaagatattccaaaagatgattatccactagatattatctgattcgttgtaggtgaaaaaagaagaatgagaaagaacgtgaagactgtaacaagcacacaaaaaaagattgttaaaaacaaccaaataaaacgttattttcaatgtatgtatatccattttagtcggtgttaatgcgtttttatcgtttcctttttctcacgcaaaaactttttatttgggggtttttaacatctgtactcacgctaaagttctatcttctaaacatttggcatggggaatccattcatttattaatttaataaaaactttaagataattgatgaagtataaaattctgtattatcaacacaagaagagaaaaaaaaaacaaacataattcgccgatcgaggagcagccaggatccaacgactgcagtcgcgagtccgtaaatgtatatatatatccattaaaaaaaggaaattgtaatcctaatccaacggttgagataaaagctcacaccgtaacgctagatccatggcagaaacagcgtagcaaaaatctttttctttctctcattgttgttttgtcttgtttctaccattcatttttttttccttgttgttgcgtaatccaactaaccgaaaaaaaccaaactctttcttttctccatttctctctctcttggagggagtgccggaatctaatcggagttatcaccggaattacggttttgcttccgtgcaaagtttttacttgctcgtttggaattcacgacgtgtccgtcagaggaagcagaatttgaaattgaagcaccgattcactttttttttgttttggaaattatatatagatataattctctctgctggttatgatgatgattggatagaaagaaacaaaaaggaaagccaaagatataagaagaactctttctctctctgtttctgtctctctgctccttttgccacgtgaagtttagagaagaagaaggtttacgagatccgtttcagtaatttttagctgcttcaatttgcttttggacgaattacgaagagaagaagcacaattgatctggtaagtttttgtctttgtttgttgggttaattgttgattagggtttttgttattgattatctttgtgctcaacttttgaatttggtaggagttggttcttctctgcttctattaaaagatctgaatttaggctaattgtagttttatggcgtttttaattccgaattttgtgtctttataatatttttttctagtcaaactaattcttaccctatagattgcttgaatttgcttaatttggtgtctttgattttgagttggattggttttgtaatagaaagctcctgttttatccattgaattgtaatacattctggcatttgagactgggttgggtcccttatgtttgtttctggaggtggtaaaactagaaagttaaaaagtctcattctttgtaatttcttgtcagctggaacaatgccatctgatatattggaaccgagaggtgtgcctacaccttctcattttcatgaagacattcgcatcactcctgaggtaactccttcttcgattttggttccacatacgctgcacaagtgttttcatgtttagaacggtttttctcaagactttttgatgttttattttgcagaaacaatttggtttcatgaaaaacaatccaatgcctgaaggtggtgtggatagaagttcaaatctaccgactagttcttggacatctgacagttaccagctctctcaacaatcaagcttgtctggggcgcttccctcctttatccctaatggaagaacaactacaaatgatactcactgggagagcagtctattctcaagctctctgtctgacctatttagtagaaaatgtaagcttcttattcactcttgcaaatagttttacttgttattgttggttttctaatgacttcccttgtttttgcagtacgactaccaagaagtgataagttagcctttatgtctgcaaaccgcgaggaagaaccttcagagtccttagaagaaatggaggcgcaaactattggaaatcttcttcctgatgaggatgatctttttgcagaagtggttggtgagggtgtccataagtctcgtgccaatggtggagatgatttggatgattgtgacctattcagcagtgttggtggcatggaactagatggagatgttttctcctctgtcagtcaaagagatggcaagagaggcagcaatgtttcgactgttgctgagcatcctcaaggagaaattttatccagaatactttttgttaggaatgtggatagcagcattgaagattgcgagctgggggtcctttttaaggtacgtaatttcacctgcgtttctggttacaggttccgaaattatggcaagacacggtattagaaatttcagtagtcttctcttctcattgatgatatatttatattttttagcaatttggagatgttcgggctcttcatacagctggcaagaatcgtggctttatcatggtatcatactatgatataagagctgctcagaaagcggcaagagcactccacggtaggctcttaaggggaaggaagcttgatattcgctattctattccaaaggtgttgttcactcttcttatcccccttgtttgtatgctatgtgcgttgtacctgtcacttttactgtcttgcttactactcttttctgtgatatcaggaaaatcctaaagagaactccagcgaaggagccttgtgggtaaataatcttgattcttctatatccaatgaagagcttcacggtatattcagttcatatggagaaattagagaggtttgcttactagtgttttctttgttctttctttatgatattgacggttatgtgatattgttataactttgctacttcttttgtttgtaggttcgtagaacgatgcatgagaactcacaagtttacatagagttctttgatgttcgaaaggcaaaggttgcacttcaaggactaaatggacttgaggtcgctgggaggcagcttaaacttgcaccaacctgtccagagggtacaaggtagttatcgatttttcttccagccatagtttttgtcaatggctgtctgatgcagtaactaccatattttgaactgtgatgatgtgtaggattcatcatactttttttgtttctttcagtttctggccacagttcgcttcagatgatggtgaggggggtctacctaaaatggcttttaataacctatcatcagctcacatgggtaagatagtgcacacggtttatgattaatcgtttctcaatgattgaacatccagggtcacaactcatacctatcctttaacatctctgtttcagggagacatttcccaggaatattagcttcaacctccattgatggtggatctattcgaggtatgcacaattctgttgggtcacctatgaactccttcattgaacgtcatcagagtctcgatgttcctattggtttgccaccatcggcaagagtcatctcagctagcaagcctgttggtcttcaggagtttggaaacccatttgataattcgaaaacggggatccaaagtatgccaaatctccatcctcattttcctgattaccttgacaactttgcaagcggtagtccatataaatcctctacgacattctctgaaatggtaagcgatggccaaaaagcaaatgagggctttatgatgagcaatgttcgtggagtgggagtagatggatttaatggaggtggtaagtacatgttcttcttattactattctaccttgatacacttgcctaaggttagtgatgatgcgtaaccaatgattgtgaatttaagaagaatagtttactgtagattttagaatataatccatgagtacaatctctaattaaggatatttatattgatcctaaccaatagtagtggattacgaaaggtgacagaggatgcaaatttaggtattacctttagatagttggtttacttgtccccctgggtgtagaacttgtcattcttacaataacggcatcggaataacgtttgctcatttgtattttcttattgtagtcataggatctcccataaatcaaggatcccatcgtggtaacctcaacttatggagtaactctaacagtcagcaacataatcagtcaagtggcatgatgtggcctaactcaccatctcgcgtcaacggcgttccctctcagcgcatcccacctgttactgcattctctagagcatctcctttaatggtgaacatggcatcatcgcctgtgcaccaccacattggatctgccccggtattaaactcacctttttgggatagaagacaggcatatgtagctgaatctccagaatcttcaggatttcacttaggttctcccggtagcatgggatttcctggctcgtctccctcacatccaatggattttggttctcataaggttttttctcatgtcggtgggaatcgcatggaggccaattcaaaaaatgctgtattacgatcatcgcgacagatgcctcacctctttactggaaggagcccaatgctttcagtgtcaggctcatttgacttgcctaatgaacgatacaggaatctctctcaccgaagaagtgaatctaactctagtaatgctgaaaagaaactgtatgagcttgatgtagatcgcatattacgtggggaagacagtagaacaacgttgatgataaagaacattcctaataagtaagtgaattcaccttttctccctattattccctgttttataacattatatgttgctcatttgttcctatttgtctttgttctggtaatggtttaggtatacttctaagatgctcctagctgctattgatgagtactgtaaaggaacatatgattttctttatttgccaattgacttcaaggtatgcaggcctcttacctgttttttcatctaatggagtctaatgcagccttatagcttagggtattttctacatcgatataaatgaaccttccttctatttgcagaataaatgcaatgtcggatatgctttcatcaaccttatcgaacctgaaaatattgttccgttttataaggtataagctttgtacctttttatgatcaatttgtgtagatgatgtatcattgttctttagaaaaaaaggaaaaaagcgtttggttacaagtttaaaaccttaacaggcattcaacggtaagaaatgggaaaagttcaacagcgagaaggtggcatcgcttgcatatggtcggattcaggggaaatcagctcttattgcccatttccagaactcaagtttgatgaacgaagacaaacgttgcaggcctattctcttccacactgctggtccaaatgctggtgatcaggtaaggaagacaagggctcaattgatatccttattcaaactataacctctttctgttgcaagtaatcatatcatctggtagttatgtattcactatagcgtgacacacataaattaggttcatagttggtcctaatgagagaacctatttccctttcaattagctgtttttgatgagagattactgcatttgtaaatgtgcaggaaccatttccaatgggttcaaacatccggtcaagaccaggcaagcatcgaacaaatagcatcgagaactacaccaactttagcagtagctctgataaccgagacgaacctgcaaatgggaacgactccatgtaaccgataagccagacagttttcatgtcgtaagccagactaacccttttaggcgtcttgtatcagaggtaaaagaaaagagacccaaaagattaacacaaggtaaaatatatatatatcgttgacaaccccacagctctgtaaatccttgggggtgtggtaaattacctgagaaaactcattttgcagaggagaaagtttttgaagtcttggtccctttaaactccttcaggttacttcacaagttttgttgtatcactaaacctcccagagaaaaccttgcttgatttttttttctttttgctttctaagtttttatttttctgttttacttaaaaaattgttgggttgtgtctacaaggatctttttctttgtactttgcatacaaatgtaacaacctagtacgatgtgttcagtttcttcgcccgtggcttgggaccatataatatcatttatgtaaacccttttgagggcgaagtttttggcattgctttcttctcttttggtttttagtgtttctttgaatctttagtcggtcactttataagcttctgacacagtcagttgtttaaggcttcctcttggaataaataatactactaagacacttggtctctaaattttcgactatcagaattcttggttggatacatttttggcccctgagagtaagtggcccatttatggcagtggaggacctccttggctccttctccagtccagctcttgtatccatccattataaggctttggaaagaaagaagcaactgggtttggtctgcaacacatacttgatgattctcttggataaggaaccgatctcatgaactatattctataatactatatagttattcttgttatatttatagaaacaaaaagttactatatatgtagtccagtagtaattatgcttttgaaaaagttttgttagcctttctggtggcgaaatcttttttaattggtcattacgtaaaattggtgtgtcttattattcacgtctccctctaaaagatgcgttctctctttctttgttcctatttcaattacagtcacaccgcattataaaatatattttttttaaaaatacttttattcccatagaactataaacaaaattatctcttaaacgtcggcttaattcaaaaatctgatactaagacaattttccgatgtggaccaaaatatatacaagtagaccggttgtagtaaatatattcacgtgatcttacagccaatttaatacatatggaccatctagttttccactaatcaaacataaacctacactaattaatttggggaatacttaattctttatgttgtcaataatttcaaaacaacaataaaaggaaattaaatggagtcaagacagatcgtcgacttggaaaaacaaaggtgggtcccatctaattcactgtcctgatttttcctcttctttccttgttcgtctccccccaatctcctcctcctctttttttgttctgaagagactctcgccgtctaatgggaagctgttggtctgatggctcttacgctggtggaggaatggtcggtgttggtggtggggctaattcctccgccgccactcctaacgacgccgttgactactatctcaagtctcgtggctacaatggcctcttttctcagatcgaggtctgtttcttcccttttcccttcttcaagacttgaaatttttagtttcactcatcttttttttctttgttcgcagttatctttctctgcttccaatttgcgagaccgggacgtgatttcaaaggttcgtttttttcttccagaaaactgatattcctggagccaattaagtgttataggtttgattcaaggatagtgtatataagctt

SEQ ID NO: 1410 - DNA, 116763 bp, Arabidopsis thaliana
aagcttgaaaataagaaatattaaattgccgttacgaagtcttattacgtcacgtgagtttcgtgcttctctttctctctctcttcttcttcttcttcatcttcatcttcatctttatcgcgcctaaaaaaaaaacccttcctttttctctttaatggcgtgatttctcttctctgctcttgtaaaaattgaaactttctctgtaaaatcgtctcttttaaatctccgagttttcttcctccttctctaaaagaacatggcgtttcttaccgcattgttcctgtttctcttcttctctttttcgagttccgccattgttgatcttagctcggaaacaacttctctcatctccttcaagcgctcactagaaaacccatctctcctttcttcatggaacgtttcgtcttccgcgtctcactgcgattgggttggcgttacgtgtctgcttggacgagtcaactcgctctccttaccgtctttgtctctgagaggccagattccgaaggaaatttcgagtttgaagaaccttagagagctttgtcttgccggaaatcaattctccgggaagattccgcctgagatttggaatctaaaacatctccaaacccttgacctctcaggaaattctctcaccggacttctcccgaggctactcagtgagttacctcagcttctctacctcgaccttagtgacaaccacttctccggttcacttcctccatcgttcttcatcagcttacctgcactgtcttctcttgacgtctccaacaactctctctccggcgaaatccctcctgaaatcgggaaactgagtaacctctccaatctttacatgggactcaactcattttccggtcaaattccgtcggagattggtaacatctcgttgctgaagaactttgctgcaccttcttgcttcttcaatggaccgttaccaaaggagatttcgaaactgaaacacttagcaaagctcgacctttcttataatccactcaagtgttccattcccaaatcgtttggagagttgcataatctgagtatactaaatcttgtctccgcagagcttattggattgatcccaccagagcttggtaattgtaaaagcctcaagtcactgatgctgtctttcaattctctctctggacctttgccattggagctttcagagattcctctgttgacgttttctgctgaaaggaatcagctttcgggttcattgccttcatggatggggaaatggaaggtactggactcacttctgttagctaacaatcggttttcaggtgaaatccctcatgagattgaggattgtccaatgttgaaacatctcagtctagctagcaacttgttaagtggttcgattcctagggagctctgtggttcaggttcgttggaggcgattgatctctctgggaatttgctttctggaacaattgaggaggtctttgatggatgttcctctcttggagagttgttacttactaataatcagatcaatggctctattcctgaggatctttggaagcttccattgatggcacttgacttggattccaacaacttcacaggagaaatcccaaagagtctctggaaatcaacgaacttgatggagtttacagcttcttataatcgtctagaaggttatttgcctgcagagattggtaatgcagcttcactgaagcggttggttctcagtgataatcagttaacaggtgaaatcccaagagagattggaaaactcacatctttgtctgtcttgaatctgaatgcaaacatgtttcaagggaagataccagttgagctcggtgattgtacttctttgactacattggatctaggcagcaacaatcttcaaggacagattccagacaaaatcactgctctcgctcagcttcagtgcctggttctctcttacaacaatctctccgggtcaattccatcaaaaccctctgcttatttccatcagattgagatgcctgatctcagctttcttcagcaccatgggatatttgatctctcctacaatagattgtctggccctataccagaagaacttggcgagtgtttggtattggtagagatttcactgagcaacaaccatctctctggagagattccagcttcactctctcgtttgaccaacctcacaatcctggatctatctggaaatgcactgactggatctattccaaaggagatgggcaactctcttaagttgcagggattaaacttggcgaataatcagctcaatggccatattccagaaagctttggcttgttaggtagcttggtgaagctaaacttgactaagaacaagcttgatggaccggttcctgcttctcttgggaacttgaaagagcttacacacatggacttgagctttaacaacctaagtggcgagctttcatcagaactgtctacaatggaaaaacttgtcggcctctacattgagcagaataagttcaccggggaaataccttcagaacttggtaatcttacgcagctggagtaccttgatgtttctgagaacttgttatctggagagataccaacaaagatctgtggattgcccaatctggagttcttgaatctagccaagaacaatctgcgaggagaggtgccgagtgatggtgtttgtcaggatccttccaaggcattgctttcagggaacaaagagttgtgtggcagagtggttggatcagattgcaagatcgagggaactaagttgaggagtgcttgggggattgcaggactcatgcttggctttacgatcatcgtttttgtgtttgttttctctctgcgcagatgggctatgacaaagagagtgaagcaaagagatgatccagagcgaatggaggaaagcagattgaaagggtttgttgatcagaacctgtatttcttaagtggaagcagatcaagggagcctttaagcatcaatatagcaatgttcgagcagccgcttctgaaggtgcgtttaggagatattgtcgaggctacagatcatttctctaagaagaacattataggagacggtggttttgggacggtttacaaagcttgtttaccaggtgagaaaacagtagcggtgaagaagctaagtgaagccaaaacgcagggaaaccgagaattcatggcagagatggagactctagggaaagtgaagcatccgaatcttgtgtctttgcttggatattgctctttcagtgaagagaagcttctggtatatgagtatatggtaaatggaagcttagatcactggttaaggaaccaaactgggatgctagaggttctggactggtcaaaacgcctcaaaatcgcagttggagctgcaagaggtctagctttcctacatcacggtttcatccctcacattatacacagggacatcaaagcgagcaacattctgttagatggtgattttgaaccaaaggtggcggattttgggctagcaagactaattagtgcctgtgaatcccatgttagtacagtcatagcagggactttcgggtatatcccaccggagtatggtcagagtgcccgagccacaaccaaaggagatgtctatagctttggcgtgatactattggagcttgtcacagggaaagagccaaccggtccagactttaaggagagtgaaggagggaacttggttggttgggcgattcagaagatcaaccaagggaaagctgtggatgttattgatccactgctcgtatctgtggctttgaagaactctcagcttcgtctgcttcagatagctatgctttgtcttgctgaaacgccagctaagcgccctaacatgcttgatgtgttgaaggctcttaaggagatatgagccatataaccttaaatgttgtagttgtttcttgttgtttaagtaaactgctagtactaaccaaacaagggagtggtagggtttgtatttgtaatgttaatgtaagtgttcttcagtttcttctaaatgtcgaacaaagaaaaataggtattccaatttccaattaattgcacttaatttatgatcaggtgtgaaataaactgatgttataccaaaccaaagaaaaaagtttataacccaaagataaaactttaaaaccaaatatgcaatgttttcatcggtactgctaaataaatttggtttcaattttttttcattttttctgagttcaattcgagaaaatcataaaaataatatatggatacctaagaaaaccaaacattttttatatggacctagctcgggaagttattaaagcacatgcggtggtaggagtgtctcggagattagtgggcagagaagatagactaatctcatggagtagaccaagtgaaggttggtgcacgctgaatacagacggagcgtcaagaggcaatcccggattagcggcggcaggaggggtcttacaggagagcaatggggaatggcgcagagggtttgcaattaatatcgggatatgctcaacacctcttgctgagttatggggtgtatactacgggttattcatggcctgggagtgtaaagtatcccgattagagttagaggtggactcggaggttgttgttgggtttcttcggacagggataagtgaatctcacccgctgtccttcctaatacgcatgtgctatggctttatatcaaaggactagatagtccggatttctcacaagtatagggaaactaatagtctagcggatgagttagcgaactatgcattttctttacctcttggttttcagtttttttatgtttgtccggatgctgtttattcggttatgttggaagaccggaacggaatgtcgtttccgcgtcatgttcgtttgtaatttcttttagtttgaataaaaaataggggacattgttccctatcactcaccaaaaaaaatgaaatttattaaattaacaaattttatcgttacagttttcaaataccaaactaggtcttggctttcgtgtattcggatcgagctattcatattcaggtttttcggcttaatttggatattttaagattttgatatcgagttcgatttggttcgggtttacctaaatatttagaaaacaaaaattttatacgcaaatctatcaaattacttgaaaagtttccaaaaaaaatatttttacttaaatatatgcaaaaatatataaaataactaaatatccgaaaaataacttatatattaagtattatcagatatctttttaagtttaagtttgaatttttggatctcgaagtttaagatcattgagtatttgacttcagatcgagtttttctgggtagactttgtttcggtttttcggattcggatattatggcaatatctatactaaattatttgattttaatatgattaaaaaaaaaatcaaactttttttgtaatcctaaaccaatgtacattccttaataacaaacaaaaattaaaaataaacattaaattgacagaaatgccctttctcgttcaaaaccacatttatgagataaagaaaataaaattgcaaaaaaaaaaggttggaatgtagctgtttgatgtcaagtcaaaatcaagaaatacagtatggtggtcagtaaataattattgtaaatagagggaaaaatctttagtccaaacttctggctttatattttacagtcactcccacttctttttattctttagttattgactacatacaaaatttctgcaacttgctcttttattctgtcgccaaacgtgttcatataatttacactacgaaatgataaccacattatttatatatatatagtatataaccttttctttttaaaatttgtaaaaaggtttgttttctctaattaactacgaaaacaatagaaaaaaacgctaactaaaaacctacaaacatgaagtctcgtgaaatatataggagtcgtagactttgtccaaacaattcacggattaagcatttattgcacaaacctaaatatctcaatttatgcctcatcagtaatataatatcaatcaaataactagtgggttatgtattatacgtacgggccaggcctatttaatgtggatatcacgggtctatggatacagcccatggctaaccgtaatcataattatgtattgcaatgttttgaaaaaacaatacttacttacaatgtttctttttgttgaagctacttccttgcaatgttgcttatttagttttatataattttaaacaaagcatatgttggctaacacaaagtctatttactgattatatatacaggtgtaatgggattagtgtgtcgagtagagtcagtagaccgacgaaaatctatagagacaacgacgacctgtataggagaccgcatggaccatgtgaataagtcaataattaatgcattattgtagtaaacactatttaatgattactaaattaattattcaatgatatcttaatttagttttttttagttataaatatttttattggttgggttttattttcaaattaattttctcttgctttgctcttctattctctcaaaccttgtcctcccaaagatatgttatgtaaattaattaaaggaaatcaaattctgttaatgattatctgtaactttgtttttgtcaaacaatgattatctgtaactaagttcgtcgtattatacgcgtaatgatatatagtcgtgtctagtgtgtcatatgactcgtgttatacgcttcaacttatcctacatgtacctaaaggcgtgcaagcaaaattttgtttctaagcttatttgtgtagaaaaatacaaaagcaataaataatttgggtaaacttttgcatgtgatcaatggatggatatagtacacattgctacttatgttttcaagaaactctagtacgcaagaatagacacgagttcgaatattttgataaattggaataaacttgttgaatttgtagatagttatccattttatatattaggtgtcatacattgacacccaaattcaaaagtttatgtgtactttgtaattgtatgatgcatgtatttaatatagagtagattatagtgtcatttgagtcatcgttttcaaaaaagaagaaggtaaattgttaatgtcttcaatatatagctctattggtaagtgtaaagaaattggtgataaaaacgtagactaaaacattaagagcaattagcaacttaaaacctaaaacaatagcaaatttcatgatatgtaagaaatcgtttgaaaatagattataaaacaacgacaaatattaatatcgtagcttcggtggtttacatttgaagtaactttagatgacgacctaagtatcattaataaacaataagattacctgctaatcttggttaacggatagcttgatgctacaactggaaccggtttgctatataaccggttattggttaagaaccggtcaggttaggttagattagacctgatgttagtgtcaataccctacactttgtttgtgttcaagagttcaccataaagagattcgacgaatccaacggctcgtgagtgaagggtgcatagagatcggagagtagagaatcgaagcaggcgtaggatatttgttttgttgacgtcaaccatagaaagatatacacgtggaggtattgagaagagcgtcttaagaataaatgcttttcttggttttcttattaaaacagtaaaaatgcttttcttgttaaagaaaaaaaataaaaattccttgactaatccttcacgccgcgtctagcccattaaaaattttcggacaacaacaacaacaacttcgctttcctatctctttcagctttgctacactaaacttggcttatcattgctaatatggctcgactcggcttaattttgactaaccacaaatgttttgtaaaaatttcagtaaaaataaaacaaaaattaagcgaaataaatatctagggaaactatattacgcaatgtctaattaggaaactaaatcattatatttatcccaaagatattccaaaagatgattatccactagatattatctgattcgttgtaggtgaaaaaagaagaatgagaaagaacgtgaagactgtaacaagcacacaaaaaaagattgttaaaaacaaccaaataaaacgttattttcaatgtatgtatatccattttagtcggtgttaatgcgtttttatcgtttcctttttctcacgcaaaaactttttatttgggggtttttaacatctgtactcacgctaaagttctatcttctaaacatttggcatggggaatccattcatttattaatttaataaaaactttaagataattgatgaagtataaaattctgtattatcaacacaagaagagaaaaaaaaaacaaacataattcgccgatcgaggagcagccaggatccaacgactgcagtcgcgagtccgtaaatgtatatatatatccattaaaaaaaggaaattgtaatcctaatccaacggttgagataaaagctcacaccgtaacgctagatccatggcagaaacagcgtagcaaaaatctttttctttctctcattgttgttttgtcttgtttctaccattcatttttttttccttgttgttgcgtaatccaactaaccgaaaaaaaccaaactctttcttttctccatttctctctctcttggagggagtgccggaatctaatcggagttatcaccggaattacggttttgcttccgtgcaaagtttttacttgctcgtttggaattcacgacgtgtccgtcagaggaagcagaatttgaaattgaagcaccgattcactttttttttgttttggaaattatatatagatataattctctctgctggttatgatgatgattggatagaaagaaacaaaaaggaaagccaaagatataagaagaactctttctctctctgtttctgtctctctgctccttttgccacgtgaagtttagagaagaagaaggtttacgagatccgtttcagtaatttttagctgcttcaatttgcttttggacgaattacgaagagaagaagcacaattgatctggtaagtttttgtctttgtttgttgggttaattgttgattagggtttttgttattgattatctttgtgctcaacttttgaatttggtaggagttggttcttctctgcttctattaaaagatctgaatttaggctaattgtagttttatggcgtttttaattccgaattttgtgtctttataatatttttttctagtcaaactaattcttaccctatagattgcttgaatttgcttaatttggtgtctttgattttgagttggattggttttgtaatagaaagctcctgttttatccattgaattgtaatacattctggcatttgagactgggttgggtcccttatgtttgtttctggaggtggtaaaactagaaagttaaaaagtctcattctttgtaatttcttgtcagctggaacaatgccatctgatatattggaaccgagaggtgtgcctacaccttctcattttcatgaagacattcgcatcactcctgaggtaactccttcttcgattttggttccacatacgctgcacaagtgttttcatgtttagaacggtttttctcaagactttttgatgttttattttgcagaaacaatttggtttcatgaaaaacaatccaatgcctgaaggtggtgtggatagaagttcaaatctaccgactagttcttggacatctgacagttaccagctctctcaacaatcaagcttgtctggggcgcttccctcctttatccctaatggaagaacaactacaaatgatactcactgggagagcagtctattctcaagctctctgtctgacctatttagtagaaaatgtaagcttcttattcactcttgcaaatagttttacttgttattgttggttttctaatgacttcccttgtttttgcagtacgactaccaagaagtgataagttagcctttatgtctgcaaaccgcgaggaagaaccttcagagtccttagaagaaatggaggcgcaaactattggaaatcttcttcctgatgaggatgatctttttgcagaagtggttggtgagggtgtccataagtctcgtgccaatggtggagatgatttggatgattgtgacctattcagcagtgttggtggcatggaactagatggagatgttttctcctctgtcagtcaaagagatggcaagagaggcagcaatgtttcgactgttgctgagcatcctcaaggagaaattttatccagaatactttttgttaggaatgtggatagcagcattgaagattgcgagctgggggtcctttttaaggtacgtaatttcacctgcgtttctggttacaggttccgaaattatggcaagacacggtattagaaatttcagtagtcttctcttctcattgatgatatatttatattttttagcaatttggagatgttcgggctcttcatacagctggcaagaatcgtggctttatcatggtatcatactatgatataagagctgctcagaaagcggcaagagcactccacggtaggctcttaaggggaaggaagcttgatattcgctattctattccaaaggtgttgttcactcttcttatcccccttgtttgtatgctatgtgcgttgtacctgtcacttttactgtcttgcttactactcttttctgtgatatcaggaaaatcctaaagagaactccagcgaaggagccttgtgggtaaataatcttgattcttctatatccaatgaagagcttcacggtatattcagttcatatggagaaattagagaggtttgcttactagtgttttctttgttctttctttatgatattgacggttatgtgatattgttataactttgctacttcttttgtttgtaggttcgtagaacgatgcatgagaactcacaagtttacatagagttctttgatgttcgaaaggcaaaggttgcacttcaaggactaaatggacttgaggtcgctgggaggcagcttaaacttgcaccaacctgtccagagggtacaaggtagttatcgatttttcttccagccatagtttttgtcaatggctgtctgatgcagtaactaccatattttgaactgtgatgatgtgtaggattcatcatactttttttgtttctttcagtttctggccacagttcgcttcagatgatggtgaggggggtctacctaaaatggcttttaataacctatcatcagctcacatgggtaagatagtgcacacggtttatgattaatcgtttctcaatgattgaacatccagggtcacaactcatacctatcctttaacatctctgtttcagggagacatttcccaggaatattagcttcaacctccattgatggtggatctattcgaggtatgcacaattctgttgggtcacctatgaactccttcattgaacgtcatcagagtctcgatgttcctattggtttgccaccatcggcaagagtcatctcagctagcaagcctgttggtcttcaggagtttggaaacccatttgataattcgaaaacggggatccaaagtatgccaaatctccatcctcattttcctgattaccttgacaactttgcaagcggtagtccatataaatcctctacgacattctctgaaatggtaagcgatggccaaaaagcaaatgagggctttatgatgagcaatgttcgtggagtgggagtagatggatttaatggaggtggtaagtacatgttcttcttattactattctaccttgatacacttgcctaaggttagtgatgatgcgtaaccaatgattgtgaatttaagaagaatagtttactgtagattttagaatataatccatgagtacaatctctaattaaggatatttatattgatcctaaccaatagtagtggattacgaaaggtgacagaggatgcaaatttaggtattacctttagatagttggtttacttgtccccctgggtgtagaacttgtcattcttacaataacggcatcggaataacgtttgctcatttgtattttcttattgtagtcataggatctcccataaatcaaggatcccatcgtggtaacctcaacttatggagtaactctaacagtcagcaacataatcagtcaagtggcatgatgtggcctaactcaccatctcgcgtcaacggcgttccctctcagcgcatcccacctgttactgcattctctagagcatctcctttaatggtgaacatggcatcatcgcctgtgcaccaccacattggatctgccccggtattaaactcacctttttgggatagaagacaggcatatgtagctgaatctccagaatcttcaggatttcacttaggttctcccggtagcatgggatttcctggctcgtctccctcacatccaatggattttggttctcataaggttttttctcatgtcggtgggaatcgcatggaggccaattcaaaaaatgctgtattacgatcatcgcgacagatgcctcacctctttactggaaggagcccaatgctttcagtgtcaggctcatttgacttgcctaatgaacgatacaggaatctctctcaccgaagaagtgaatctaactctagtaatgctgaaaagaaactgtatgagcttgatgtagatcgcatattacgtggggaagacagtagaacaacgttgatgataaagaacattcctaataagtaagtgaattcaccttttctccctattattccctgttttataacattatatgttgctcatttgttcctatttgtctttgttctggtaatggtttaggtatacttctaagatgctcctagctgctattgatgagtactgtaaaggaacatatgattttctttatttgccaattgacttcaaggtatgcaggcctcttacctgttttttcatctaatggagtctaatgcagccttatagcttagggtattttctacatcgatataaatgaaccttccttctatttgcagaataaatgcaatgtcggatatgctttcatcaaccttatcgaacctgaaaatattgttccgttttataaggtataagctttgtacctttttatgatcaatttgtgtagatgatgtatcattgttctttagaaaaaaaggaaaaaagcgtttggttacaagtttaaaaccttaacaggcattcaacggtaagaaatgggaaaagttcaacagcgagaaggtggcatcgcttgcatatggtcggattcaggggaaatcagctcttattgcccatttccagaactcaagtttgatgaacgaagacaaacgttgcaggcctattctcttccacactgctggtccaaatgctggtgatcaggtaaggaagacaagggctcaattgatatccttattcaaactataacctctttctgttgcaagtaatcatatcatctggtagttatgtattcactatagcgtgacacacataaattaggttcatagttggtcctaatgagagaacctatttccctttcaattagctgtttttgatgagagattactgcatttgtaaatgtgcaggaaccatttccaatgggttcaaacatccggtcaagaccaggcaagcatcgaacaaatagcatcgagaactacaccaactttagcagtagctctgataaccgagacgaacctgcaaatgggaacgactccatgtaaccgataagccagacagttttcatgtcgtaagccagactaacccttttaggcgtcttgtatcagaggtaaaagaaaagagacccaaaagattaacacaaggtaaaatatatatatatcgttgacaaccccacagctctgtaaatccttgggggtgtggtaaattacctgagaaaactcattttgcagaggagaaagtttttgaagtcttggtccctttaaactccttcaggttacttcacaagttttgttgtatcactaaacctcccagagaaaaccttgcttgatttttttttctttttgctttctaagtttttatttttctgttttacttaaaaaattgttgggttgtgtctacaaggatctttttctttgtactttgcatacaaatgtaacaacctagtacgatgtgttcagtttcttcgcccgtggcttgggaccatataatatcatttatgtaaacccttttgagggcgaagtttttggcattgctttcttctcttttggtttttagtgtttctttgaatctttagtcggtcactttataagcttctgacacagtcagttgtttaaggcttcctcttggaataaataatactactaagacacttggtctctaaattttcgactatcagaattcttggttggatacatttttggcccctgagagtaagtggcccatttatggcagtggaggacctccttggctccttctccagtccagctcttgtatccatccattataaggctttggaaagaaagaagcaactgggtttggtctgcaacacatacttgatgattctcttggataaggaaccgatctcatgaactatattctataatactatatagttattcttgttatatttatagaaacaaaaagttactatatatgtagtccagtagtaattatgcttttgaaaaagttttgttagcctttctggtggcgaaatcttttttaattggtcattacgtaaaattggtgtgtcttattattcacgtctccctctaaaagatgcgttctctctttctttgttcctatttcaattacagtcacaccgcattataaaatatattttttttaaaaatacttttattcccatagaactataaacaaaattatctcttaaacgtcggcttaattcaaaaatctgatactaagacaattttccgatgtggaccaaaatatatacaagtagaccggttgtagtaaatatattcacgtgatcttacagccaatttaatacatatggaccatctagttttccactaatcaaacataaacctacactaattaatttggggaatacttaattctttatgttgtcaataatttcaaaacaacaataaaaggaaattaaatggagtcaagacagatcgtcgacttggaaaaacaaaggtgggtcccatctaattcactgtcctgatttttcctcttctttccttgttcgtctccccccaatctcctcctcctctttttttgttctgaagagactctcgccgtctaatgggaagctgttggtctgatggctcttacgctggtggaggaatggtcggtgttggtggtggggctaattcctccgccgccactcctaacgacgccgttgactactatctcaagtctcgtggctacaatggcctcttttctcagatcgaggtctgtttcttcccttttcccttcttcaagacttgaaatttttagtttcactcatcttttttttctttgttcgcagttatctttctctgcttccaatttgcgagaccgggacgtgatttcaaaggttcgtttttttcttccagaaaactgatattcctggagccaattaagtgttataggtttgattcaaggatagtgtatataagcttatatcattactttggttgttatatctcagagtgatgcaatggtggttgtttatacaaaaggaagagatggaacacttgctgaattgtttcgtagtgaagttgttttgaattctttgaatcctaaatggattaagaattttactattggttatcagttcgagattgtgcaaacattgctgtaagtgaagttccttgaaacctcggttatatgtgtgaaaaacttgaggaaaaggaatcaactttaacaccttttgctgcacaggtttcgtgtctatgatattgacactcagtttcaaaattctaaggaggaggtatctgccaaaatttttcatcttttcgtttgtcactaggtagtcttaatataagttacactttttttttaatgttttcagttgcttaagctcgacgaacagcaatttctcggtgaggcaacatgtacattgtccgaggtatgccaacctctctattacatcatttttagtgtaaggaagagaagataaacttgctatagattagtttgatttagatgttgtgttgactgtgcaggtggttaccaaatcaaataggacgattgctttagaacttatgcgtaaagaaggtgttgctgcacagactcagccacaacataatggaaagcttattgttcatgctgaggagtctttagcttctaagaccaatacagagattgtatttagggggttgaatttggaatcaaaggatactttctctaaaagtgtaagctatactctttgaccagtttatctcagtatacttcagacatgaatataacactgttgttgttcatgctcaggacccgtttttggtgatatctaagattgtagagcacgggactccaatcccggtctctaaaacagaagttttaaagaatgatcccaatccactttggaaaccagtctctctaagtgttcaacaagtggggagtaaggtaaaccaaccaaaggggtttattatatctgagttttgtctgaccaggaagatgtattagtttctcttttgtaatcttgcaggacagcccactggtaatagagtgcttagacttcaatggcaatggcaatcacgatctgatagggttagtcacaaaatctcagttccttgcattcttttttggttgagatatgaaaatgatttgctgaagctgagatgattcttgtatcttattggttttgccagaaaagttcagaaatcactgtcagacttagaaaagcttcatttggctggccaaggaatcaatttagccttacctactggtgttggacataaacatgaagatagggtatagaccttcaacaacaagaggtttttacacaatttaaaatgcgagaattctgataacatttagcattatttcaggtattaaagagccagcttttcgttgacaagtttactgaaaccgtccagcatacattcctagaatacttggcttctggatttgaattgaacttcatggttgcaattgatttcacaggtaaaaagatctgaaaagtgcagagtttttctagactctctctctctctctttaaactaatccaatttgtcccttcttccatcagcttcaaatggaaatcctcgcctgccagattccttgcattacattgatcctacaggacgattaaatgcctaccagagagtaagaactcgatctattcaagttaatttgcagaagctggtgactgtgtgtgatctttcttctttctattcaggcaatagttgaagttggagaagtgttgcagttctatgactcggacaaacgctttcccgcatggggttttggagctcgtccaatcgacatcccggtctcacattgctttaacctcaacggaagcagtacttattgcgaggtcttgcaacaaatcctactcacattgaactaacttttgtatcaaaatttctcaattaatctttgttatttgattgtttctcaggtagacggaattcaaggaatcatgaatgcctacaatggcgctctcttcaatgtctcttttgcaggacctactctatttggtcctgtaatcaacgctgctgcaacaatcgcaagcgattcactcgctcaaagtgcaaagaaatattacgtcttgttaataatcacagtgagtttatacacaacaagacgtgtgattttcctctgattcttgtgtttttatctatatgaaaataccatgtcggtttttttgtaggatggagtaataacagatcttcaagaaacgagagactcaattgtcagtgcatcggatctcccattatcaatcctcatcgttggagtcggaggagctgactataaagaaatggaggttcttaaacaaaaacgttatgcttaacttcatttgaaaaacttcttgaaatagattcttacaaggtttatgtattggttgtttgtataggtactagatggagataaaggagagaaattagagagctccagtggtcgaatagcatcgcgcgatatcgtccagtttgttgcattacgagacatacaatgtgagtctcgtgtttcttgatttgtcaggcagagttttggtctctgatcattgtggttgttgttgttgttgttgcagatggagaggtctcagtggtagaagcacttctagcagaattgccaacacaatttttgacgtatatgagaaaccgtaatattactcccaccaccactactccatcttctacttgatccacactctcaacactgtacatacatcagtcagtcacagctataaacgctgtcgtcttatcttggcttttatttttgtttttttcgattttatattgtctggaatttttccgttttccagtattccacgtcaaattatatctcatcactcttcattattatatttgttgtcaaaaacataatttattatatatgccaaattattagttggtttgggcgtattcacatagatatgtactgtttcaacggtcaacatatatagttgttgactttcttaatttggttgggatttaggtggactttctaagtctaacttttattaaacgtgaccgttgattattctttaccgtacttgtcgctgaaacagatactgtctattacagcaacaaaacgagaccttaaaatataaatattctattatatagtatctatttttaatctcataatactaaatctgaaattttgtttatatatacgtattgtgttataattatcataaaattgaaagtaaattttttaaaaaagttgtcaagccgttttatgcaaaaaagattttttttttaaaaaaaaaatttacattatgtgacgtcgttaaactcattttccctgcttggcaaattcacaaaatgttgtttcttcgttctcgtcaacaaatctgaaaatacctacacatgccatgtgtatatcctgttttaaagtttaattttttcatttaaattcaaattcattgacatgtcgttgtaagatactctcaaccttttttctatcagattgactttcttattaaaaaagtcactttcttttctcgtaatcttagctatataatgtcatttttgtataatttagacgtagaaaagttggctaatttaatagatcataataatatcaaatcatatttatccatagtcaaatgagtacgttatacatcctgaacagcaatcctgaacagaaattattttttcgtcgtcccgtcaaaacgtgttatcctacgttttatcagatgccatgctatatgttatgtttttatttcaatgtatttataatcaagtttgaatattacatattttttactttaatagttaatacattacaaagaaacaaaaaaagcatgttgcttgttgttgagaaagaataacaaacaaacacatgtgtcatgtgtgccacgtgcaaacatgactaaaaaaagacaacagtttctcgattgcaactctcttggtttctttcctacttccgtaatgagaaaaaaagctctgtctatacctaaaaaaagttatttcttagaatatcaaaagctagattttaggaaattaaatatttgagatcaacaaatatcgttagttgtgaattgcgacttgtcaagggcccatacaaaatgtttttttttttgtgtgtgtgagcatatccttataataatttgtttgtttaataccaaaatggtgctttaaatgttaatatattactgtaaactttccctagatccactaatttttctttttatcgtttattaaaaaacattaatagtaatctaacccgttatctatatatacattttaagtgagtatgaaaatttactccaattttgatctcctgaattgtgataatcttatctctttttttctttctaaaacttgaatcttggacttggtgtttgcatgtaaaaatgttttttcattactcatttaactgaactatttctagatatagatgaaattagaaatcctcttcgaattatctatcaaaagtagaaagagcctcaataacaacatttcacacgtttttacttgagttagtgatcaatgtgtacacatttctcgaatataactaaatttgtctttcaatctctatccaaatattttataggggagaaaagaccccactctcgcgtaacgtaaactccttttctatatcacaacatatatgtaaaacaatttgattattttcttattccttaacttttccagagaatgtcggtttatagttatacacgaagaatatctatgtttctttgtatttaaatcaaacttccaaaagaatataattatttttcttttctcttcttcgattccatgcatgttttctcaaaaaagcaattaaacagaatatgtatatatgcatgcactccttctttatttttttctttttgtcatcttggagctttacatagcgttcatattattttacattcttctattagagcttttctactaatctttattgatatccatttcttaacttgttcagattcacacgtacacattttttgcaataatcaaatcaaaaagcttttttcacgcgtctctacagttttagcagggtacactgatatagtacatgattttctatatcgaaaattacaatagctagaaaaatatataatttttttaaaaatatgcaaaacttctgcttgacgttaaattttgttttgtcatttgtcttatgttcacacagacgaaaaagcttctataaaaccgtcaaaatagctcacccctaaaaccctaattatatattccctctttcattctccttcttcgtcttttctttgtttctcatattcaagacatcctcaattccaaatcttaaaccctaaatttacagacacaatcgagatcacctgaaaaaagaggtttaaagattttagcaaagatggcgaattcaggaaattatggaaagaggccctttcgaggcgatgaatcggatgaaaagaaagaagccgatgatgatgagaacatattccctttcttctctgcccgatcccaatatgacatgcgtgccatggtctcagccttgactcaagtcattggaaaccaaagcagctctcatgataataaccaacatcaacctgttgtgtataatcaacaagatcctaacccaccggctcctccaactcaagatcaaggtatatttacatatatagttgacaaattagttaccatatttatgggatgatatatgtgaatgaaaaaatgagcataatgttttataatagcagttgaatttgtgctctggacgacgaatatatccatgtagtatatatgagaaatatatcaagtatatatacgaatgttttctcttgttgattagggctattgaggaagaggcactatagaggggtaagacaacgaccatggggaaagtgggcagctgaaattcgggatccgcaaaaggcagcacgggtgtggctcgggacatttgagactgctgaagctgcggctttagcttatgataacgcagctcttaagttcaaaggaagcaaagccaaactcaatttccctgagagagctcaactagcaagtaacactagtacaactaccggtccaccaaactattattcttctaataatcaaatttactactcaaatccgcagactaatccgcaaaccataccttattttaaccaatactactataaccaatatcttcatcaaggggggaatagtaacgatgcattaagttatagcttggccggtggagaaaccggaggctcaatgtataatcatcagacgttatctactacaaattcttcatcttctggtggatcttcaaggcaacaagatgatgaacaagattacgccagatatttgcgttttggggattcttcacctcctaattctggtttttgagatcttcaataaactgataataaaggatttgggtcacttgttatgaggggatcatatgttttctaattgagtttttttttgtatttgtatttttcattatgcgtgtgtttttgtttgtgatcactttgtttacttctttcaagagtttttcatgggttctttgtttgtaacccttgcatttggatttgttttaagtttttttttttttttttttttttttttgggtggggtaattcgttttgtattaaagaagaaattataaatacacaagagtgttaccctttaaatttattggagttcccccaaacaaacacacatgtagacacataaaattatagcattaataactgctaaattccgaattgcgttgttatgtggccattatattgccaacgcagatataacaaaccaaagctttttatttattgaatgaaaatacattttctaccgtgtatcttacaagacataaggcaaagtagcatacctacatgacagtactaataacatctgttgagagtcgtttagttttaatatttttcgtcccgttttcttggactaagatgacagccttgatttaagtaattatatatcaagtttatacatacacaatttcctttccaattttattggactgttttgggggatctcttcagtcagtttgaattcaaaaaattactacgtgcgtgtaatagtttatggcctggttattcgaaaacaccgtagactttagttagaattaatgtcgtatagttttacgtttgttgacaaaaagaagtgtatcttgatatatatattacgaagtcgttatatcagggtttcaaaagtactttgttttatattatatcttgtataacgagacttttactagcaattttctaagttcttgaagatagagatactggccttagaagtaacaactaacaagtatgaaaacttgaccaaaacagattccccgagcgtttgttttcaaatccttgacttttgtcaatccaaagaggttgactccttttgacttaatttttctgtatagtatacttattgaaacaattcctaatatgtatacgttattttcaatatataatgatataggaatgtgtcacagattcttaaatgtatatatacataggataatacttaaatttagaagacaattagaattcaagtagtagttaatgtaataatgttgtcattgtgtcacaattctatttcaaacctataattgtatgatgtgaaaaaataaaatttatagagcatcaacaactagaattagattcaatgtacatatggatttagaaatgaaaaatcatttcgttttgaaactgaaagactcatttttcttatcatcatatcaattgaaatgatggttacgatgataatgaatatcgttattatgaaatactttccgaccaacgcgttatctcctctttgttgtcttaaaagttttgcttatagatttttcgtcttttatgcttgtttcttcattttttacatgcgtgttagatcattagcgtaaatggttagtgcttaaaacttattggtatgcgaatctcggccgccgacaaatatttgtacttcaacttcaagacattcgtggaacttcaaaaacaatctttcgttttttcaaacaaacaaaataatttgaattcgtttcgcgaatgaggcgcgtgtatgacacctctgtctctgtgactatagcgaagctaggtttacttatgatgaaaaaagttcagttcaaaaccagttttttgttagtcgtgaaagtctattaacctgtttttctttataaaatttcccaatatagtattaatatatgaaattaacaaatcgttgaattgaaaacttttaactatcagtcaaagatgaatattagcctgaatatgttaagtgatcaattaactaattaattagctaggcatattaactgtgggatctcctctgggctttgggcggtttggataaagtaacatttgtcgggaaaacagtgaacaagtgctacacaatttttcaaatgtaaagacaaaaagttccattatgttgcaaacacgagacacaaatatttataatagaagagttgtttgaacaaattaagacagccagattatcatatgttttaaaaagaattgttatcgaaaaaacaaaacaaattttgtagaaagttcatgttctttcaacatgatacacaattccaaatactcaaaagtctttgatatttcatatatagatacgattacgaatatggaccgtagctaagaaaacagttcaaataactaaacacaaatacagctattatataaaaatacatcccgacagaaagaatatagttaaaagaaaatcaagagattaaaacgttgacaaaggaagggaaattggggatggccgcacgcacgccggcctcaccgccctgtcaacctttgcggccttctaagctatcgcaaatctcaaccactgcctttaccttctatttcaaacttatcggcccaaagacgtatgaatacgtgcatgtataccatatatacacaatattaaatcatttaaaatacgtatgtatgttcacgttcagggatgttcaaattgcaccgactcactcagtttgtaaatgtaacgcagcccaattctgtttcactaatagtctggcccatttcacaatcatccaaagcgagtttttaaaggtgatttcatgatttgctaggtaggtcagattcttttgagatttcacattccagacagtatagagcgaagagaaactgcaaaattgtacaaagaatggcaaaaaaaaaaaaaaaagcgtttttgtgaaaaaaatccgacctgccggaatcgaaccagcgacctaaagatttgctgtcacagactacagtcttccgctctaccaactgagctaaggtcggttattgattactaatacaaagatttgttaattaacctaagtaatcttggtagtcatgtcctctaatttccaaaccggagacaaaaccggtgagaagatcgctacaaaaattaccaatctctaacaaaattatttaaattaaaaatctccataaacttatttttccctctctgtaattttggataggtttttaatacggtcaaacgcattttttttacttctactaatcaagcacatttgaccatttccggttttggttcaaaccggaaaacgcacgatttcaatttgactgattcgcacgtgtcgtgtgggaatagcacgtggagaatagcaaaaggtcagggggagggaagatagagagatatgttaccgtcacttgcggttgacagatgacggagccggattttccttcaccggccatccatcgtttatagccactgacccacaacaacaccattaaccctttttgcttctgactccaatagtgaagtaaatttccaaacttttgtgtttcttcttcgacgtgaagactctttcggtggtgtgttgtgttgtgacttgtgaggtcttctttctcaaaacccaggactcactctctgtataataaatacgcaagaagatgaatgatccttagaatcattcaattctcttgtaaagcattctaatttggggcaatctcgatattgatcgcgaatcagcaatggagtcatcgaagcccaaaaaccgtaacccgatgaagaaacctgtatccatcacgatggagcatgttctattggcgttacgtgagacaatggatgagagagagatcaggattcgtagtttgtttgatttctttgataattcgaatttagggttcttagattatgcccagatcgaaaagggtcttgcttcgcttcagattcctcctgagtacaagtacgctagagatttgtttagagtctgcgacgctaatcgagatgggcgtgttgattaccaggagtttcgtcgatacattgatgctaaggagcttgagctatacaggattttccaagccattgatgttgagcataatggctgcattttgcctgaggagctttgggaggctcttgttaaggccggtatgttactgttccatttatactgttactttttgctattgatcatcatgtaaagtttgtacctttatgagagatttgtggattttgattgtttatggtgaagttgctatattggcattgtgttgagatgttagaacgtgtttgattgtttatgttatttcattggattgttgagtatcaccaacctatataagccctacagttttgttcttgtaggcattgagatcgatgatgaggaactcgctcgttttgtggagcatgttgataaggacaacaatggaactataacgtttgaagagtggagagattttcttttgttatatcctcatgaagccacccttgaaaacatatatcatcattgggaaagggtgtgcttgatagatattggggagcaagctgttataccggatggtataagtaaacatgtgaaaagaagcagattacttctcgctggaggactagccggagctgtttctagaactgcaactgcgcctcttgatcgtctgaaggttgttttgcaagttcaaagggcacatgcaggggtcctcccgacaattaagaagatatggagagaagataagttgatgggtttctttagaggtaatgggttaaatgtcatgaaggttgctcctgaaagtgccattaagttttgtgcttacgaaatgctaaaacccatgattggaggggaggatggtgatattggtacaagtgggagacttatggcaggtggaatggctggtgcattggctcaaaccgctatttaccctatggatctcgtgaagactcggttacagacttgtgtcagtgaaggtggaaaggcacctaagttgtggaagcttacaaaagatatatgggttcgggagggacctcgggctttctacaagggtctgtttccttctcttcttgggattgttccttatgcaggaattgacctcgctgcatatgaaacgctaaaagacttgtccagaacatatattcttcaggacactggttagagcatcaaaaccttaaatccttattcttatttgcatatcattgttctgtgatatgatactaaaatagcttaaaattctgcagagccgggtcctctgatacagctgagctgtggaatgacatcaggagcccttggagcatcatgtgtttacccgttacaggtagtaagaacaaggtaaaaacccgaaattccgaaaacttgtaaccgattttttttaatgtcttgtctgcgattgtaaaaaacaagtttgatccttgtcatgtcagaatgcaagcggatagttcgaagacgacaatgaagcaagagtttatgaatacgatgaaaggagaaggtcttagaggtttctacagaggactattacccaatcttctcaaagtagttccagcggcaagcatcacgtacattgtttatgaagctatgaagaaaaatatggctcttgattagccaatacggtcttgaaattttctccgagttagtttattcttttttgttcccaaggggtcactctctctaggttatgtgagaaattcaaaaacaagacagagattgtaacatgtcttcgttgatgtgttcaagatcaagactcaagtctgtaaactcacatctccaaaaaagattttgaatggttaagtcatgaactcacatctccaaaaatgattttgaatggttacatcattaaagatatctatcaactaatttttttaaaaaggtcttactgcattttataaataataaatgaatttttatataaatcgtgatcagttgtaagtcacttttctaatattttaaagtgtatagcctatttaagtatatgatctgatttaattaaatggaaaacaaaatattaaaagtatattcttgaaattgggacatatatttttatggtgataaaatttaattatagatttgtaatttgatggaaatttttttgataaatagttatcagcaatataataaagttaacactcttataacaacttaacaaaaaaaacactcttataacaaaaaagaagaagttatcagcaatatatttatactgttttcgttgacttaaaaatataacttataacacacctatgatttatatatctcaattattgttttgttgcgatcattgatattcttttttagactatgtttcagaatgatgacaacaatgttatacctagacatatatagttttaaatgttgttttcagctttaacctatatttattttaaaaatcagcgagcttttcttttcgtttttttagaatatagatttaacttaaaatttagaaattagagtaaaatgagtaatttaaacaaaacttgcaaatcaacaaatttcttaaataactgattgtcagacagatcacaagcaaaagaaagcaaaaaccgtgatagtccccaaaacaagagaattggttggaaagggttgattgtgaatagtcattatatcaaagacttcgttcggtcgtggagtcagagtcagagtcaactatacttgtaaatcgtaacttggatcttaatgtataaaaagatagttttagaagaaacaacaagatcataaaactattacaaacaatagggatatatatacttctcgttagagaatctacacatcaccggaaaaataagagaaaacagaaagaaaaattaaagagaaaatacgaagaagaaaggcgtagccttccctttgcctctgttgacttgccgtttgttttcttccttgatctgttgttaaccagaaccagagaaagataacggaaccgagctaacttccattagccgtagctcgacgtgcttcttaacgtcgtcgtcttctttctcggtttcttcctcctccatatctctttcccttccttagattaatgaaaacgaagctaactgttagtggttgctttagtcttctacgtctctcttcaccccatttataatgcttcatctggtcccatatccaaaaccttatatatataatggcgtatattattatcgtattattgtttaaacaatatattttaaacatgaattatgtcttgttaagttttcgacccatggaatctttttgaaagttatacctaacgtcggtaaaaatttaataaacatttttataacgtgcatctacttttaaaagaaatccatttgcattattgcattaaagatgtttaagcatttggctctccccaacagtttagttcaaattgtttgatagaaaaagttgtttctttttcttttcacgtacaagtacaacgcttgattctaaacattttaagttaaatttgaaccatagtttaacaaagttgtcgaaaaactcaattatactgcaaatgaacgatttgaacaatataatagtgttgaagctagtggaataagatatattcagacaaaggtatgacaagaagtatcgaggtggtttctgtagagggatggaattattctttaattattttttcgtcggcatagtttttgctatatatcttccacttgctggaattatattaatgtgttatctaaagttcgcagcataaattattgttgttgttactgtttatcgttaatactttttcttgctttattattagtagggctactttgctaaataaagaaaaaaaaatagaagtttaactcgtaaaaatgattaagtggtagtcgtaaataagtgattcataatgtaaaattaatatatagtgtcaaaaaaaaaacatgctatttatttttgacttctgcatgactattagcacacacaagaatatatattatatagaaatgtcgtcattccactagctataatatatacatttttgatttttttactaaatagatcatatattttcgtaaaatactaattttctaaggagctgatctagtttagtggtcatacgaggaccacttacctcatcagctcaacccactaatattgagtttgtaccagtttgacaaaaaaaatacttaacttttcagaaaataaaatggaattagttattttcataattacattttcagttaataaaactaggataacaaaaacttgagttttctttttcttcttctgaaagttatgacctacgtagctaggttttagtttacagtcgtggttaacttagagactctttgatcatcaatcagttaagaccaatgcttctttaagccatttagtttattcttgatgataaaagtacgtaacatcatttttaaaaaattgtggtgagtgagtaaaagtcacgatacaaagaaaaatattcatagtttgaaaagaacgtaaagtagagatgaaatgtgaatacgattatatatattgtttacatagttaatgtataggcctttctttctttatataggattgtaaagctctttacaccgctttatttataacaaaaatagaaatgagcaaataattacgtcgaataagcactaattccattaaagtgggagctagtaagcaccaagcacactagttcaactcgtatcaatttattgtatttaaatcagtagttaaaacttgtttaatttcctcattgagaaagatttgcccactttagttaagtcttatcccaaatagcactttagttaagtctttatcccaaataacttgtttacttttacttttctattaaaattatgaatagtactgaattcactatttaaataaaggcactatgaaataaaaagaactccataaaaaatgcattaattattttatatttcttaaatatagacaaactttatagaattaatggctacaataaatattacgttgaaaatgtcgttttaatatttctccatcttttttacataatatttatatgaatttaaatttgaatgtcgatacaacgataacacgaagacgagaaaatataactattttcattagaattgacaccaaacatatttaatctcttcatttttgtcttaaaaacaaaagaacatactttcgtgacataggttcatttagtacttgatggattttcgtgccattggttcatttactcgatgcaaggcacggttccatcgacacagcagcaatgtgattgtcacatgtcgcgtggtaagacgagggttgctagagcttaccagtaaaagaagatacacaaattttggtcttatccattaggcatacaaatttaaaatataattaatatctcatatttttaattttgacagaaccaatgaaataaaacacgcgcattactgcagtgaatcccaattataaggaatctgatttgacgtggatcttcaagacacttccacgaattaaactgcatgttcttaaatgcttacacgtattacttctacaactctcttctctactccagatgtctccatcttccttttatatccgatatctaaaacgctctcaagtatagcacaatccacaacaacaaaaagtacaaatcttactcttcttttcagctagattttactaatcactcgccaagaacaaccaatggccgttcgatcaaccgtaagtaacctaagacgtcgtcgtttctctatgattcatttggtcttcacgatttgacttttatcattttgtgtttgaagggtcacttgaaaaacgtagtgcagaggttaagaacttacacgaaggcgacaaccgtaccaagatccaaagcgtattctacggcggcaacagagtatggtggccagagaaccgccaccacagcggcagcaacaaaaggtgacttcacaccagtttacgtctccataggattgatttcattgtcagtaacatttggtgtctacactgcgtatcttcatctacatgaaaaccctggcgtacgtgtcaacaagaagatgagagagaccgttcccgagatcgaagatccagatagagttctaaacgaagcggaccggttcgctaacaggtcttggtttaggaaaatagctcacgttcaagagtttgacaagcaggatgtgatctctgacccaatcaggaaagaccagtttgctcataaacctcgtgccttgacgcttaaggatgttggcgttgatcctaagatatcggctgctgcagctcactaagtttttatgaaggctggtttatgtgttttgttttccatgtttctgtcgataaataaaacatctgaaggagatcaaagagttttcaaatgggtcggttaaggttttatcctgtttcctcttggatgtattacagtgatcaagcaacttttgagtgtatttgtgttgtttcaacagcatgtaaattatctaatgaaatttcggtcgaagtaataatacaacttcgttttgcttctattttcttctggattaacgattttagtaaaaatactcatttgggagaaaccaatttcttgggtctaggtttgaatgagataaaatggttaacttcctaaccttctaagagtgtccgaggattcattcgcattctaattgggcccaggtcaaggcccaggaccaggccctagtggggtaaaattttgcacgcgtcggtgctttgttttggatgacttggcgagaggtgatagggtagtgtcacgttggcgagcgatattcattggaagataacaatcaaaatgacgttcgtaggtctaagaaatacgaggactaaagagtaaagaatatctctctctctgatctacttagtacttacttagtagttacttctctgtcttatttgattttgagtctctgttttgtctcttctcttgagattgcgataatgagagaacggattattacattcgtttcgctgcttcttgtagctttgctttcgtttcccagtgttagctactgtgacgaccaaacggtgattggtcacttccttgaaaaagttcctattttaaagatttgttcatcgaatctccagtaacatggtgtttttgttgttgttcagatcctgtatgaatcgtttgacgagccttttgatggtcgctgggtcgtttcagagaaagctgaataccaaggtaaagccatgtcgtcgtagtgaattcgtgttttgaattttttggttttctttcgtctgttgaagtaaaaacaagttagaattagtgtaatggaagttacaatcaaaagggggtcttaaagttttggtttttattggaacagatttagaaatgtttacttttactataagtggataagaaacagactttgtgtgagctcttaaaaggttgcttcttatttgaaatcttttaggtgtgtggaagcacgagaagagtgaagggcatgatgattatggacttctagtgagtgagaaagctaagaagtacggaatagttaaagagcttgatgttgatgagcctctaaaccttaacgaaggaactgttgttcttcaatacgaggctcgtttccaagaagggcttgagtgtggtggtgcttacttaaagtatcttcgtcctcaagaagctggatgggttcctcaagggtttgataatgattctccttactctatcatgtttggacctgataagtgtggtgctaccaacaaggttcatttcatcttgaagcataagaatcccaagagtggcgagtttgttgagcaccatctcaagttccctccttctgttccgtttgacatgctttctcatgtctacactgcggtcttgaaatctgataatgaggtgaggattttggtcgatggtgaggagaagaagaagggtaatttactgtctgctgaagactttgagcctccgttgattccttccaagaccatccctgatccagaggacaagaagccagaagactgggatgagagagccaagattcctgatcctaatgctgtgaagcctgatgactgggatgaggatgcacccatggagattgaagatgaggaagctgagaaacccgaaggatggttggatgatgagcctgtagaggttgaagaccccgaggcaagcaagccagaagattgggatgacgaggaagatggtgagtgggaggctcctaaggtttccaacaccaagtgtgaggcagcacccggatgtggcgaatggaagagaccgatgaagaggaaccctgcttacaagggcaaatggagctcacctctcatagataacccagcttacaagggaatctggaaaccaagagacattccaaatcctgattattttgagcttgagaggccgaatttggagcccattgctgccattggtattgagatatggacaatgcaagacggtatcttatttgacaacatcttgatatctaaagacgagaaggttgctgaaacttacagacaaagcacttggaagcccaagtttgatgtggagaaagagaaacaaaaggcagaggatgaagctgctggtgaggcagatggtctcaagagttaccaggtatattgattttcgccacaaatttggaatgcttatacatatcctttgtacttatattatgtatgtgcattactgcagaagaaggtgttcgacctcttgtacaaggttgcagacatttctttccttagtgcgtacaagtcaaagattatggtaagttctcattttcagactttagaaacatattgtataatgaagaatcttaaatgagaatttgcaattttcgtttgtaggaacttattgagaaagctgaaacacagccaaacttaaccatcggtgtgctcatttccatcgtgatcgtcttcctctctctcttcttcaagctcatatttggtggtgcaaaggtaaaaaaaaaacatgtcagtgagatgtaatgttttggttggcgggtgtttgagtcttaacgaaattcttggtatgtatgtaggctaaggtagaaaagaagaaaccggaaacagctgcagagacctcgacaagcgaggcaaagacagaggagaaagcagaagcggtggctgcaccacgaaagaggcagacgaggcgtgagagttagataaaaagaggattagattttgatttttggggctttttgttttgatttatcaccgtatagacaaacagtagtggacctgatattaagacgattattgtaacatgttttttttgtatgcttttagtttcacatgaatctgaatgtggatcacaacatttatgagttgaaatttgataagtaatgggttgtgtacatcacatgcatcagcattatcagtttatcgtctttagctcgagtgtttacaacaaaatcttagcttcgagatttagacttctctaccaaagggtcttgatagccatggcacgagactcgtatgatatactaaccacagttaggtctgtttgcagaatggattctttgacagagcacgagcttcagcagccagaagagcatcataaaggtttgatcgctcttcaaaatctgtgtgtctaaccacatttccaaaaccacgggcaagaacgagctcagcactattcaccagctggctgactgccagcagatgatgcagtcacttcatcagaaaataagaccaaagttgctccaacgaccatatccttcctgcttagtctctgctctttttttgttctttctaatgtcagtgtaacataaataagacggcttaaggaatggaaagataagttggaccagaaaacacacaaaaactgtaagcatggttcaaacttccccttatttcaagtcctacatggaaaatttctttaaaaagtctaaaacgtatataaattaaaagaagaagagaagaaacaaatctaaaaccttacaaaaagttcgacatgtctttaaactctttagagaaacacaccgaagcttctctccctacctcatggtccctttgaaccatatcacgacttatcggtttttataattttaccggcgaccaccagcaggctttctggccggaccagtgtcctcatcatcggactcaatgtcaccgtactgccagattccaattctcgacttgcgagcttcctcttggaacttctctaaagcatcaagagcagcttgtttgcctttgtgcccccatttctgacgtttctccattctcgctattccttcctgttcatcatcatcctcatcaataccaataccaattcttggaaatgttttttagacaaggtgagagaaaaccgacctgaagcattgcagcatttacagagatctcatcatcaacagcaatgagagtgacaacgaattcagttccagtgccttgccctttgactttgcctccagatgtgtctctttcttctatcactgctttgaactctttaccactacccagagttacagtatgcaaatactctcccgcttcaggaccaaagtcgtcttccaagcttggaacctttatgtaggcaagtctgcagagctgagcgagccctggtgctgcagataccgaagggtctattggtctgattgcgctgtatggaactgtctcttggtttccataatcgatgtagaacacttcgaatttttcatctggggattgaaccgctgctcggggtgctgtcacaatctgaacacaagtatcgattgtatgaataaagcatgaagcaaagaaaatctcgaaacaaagaaagtgaattaaaattaccattgcacggttccaggagttatcaaggctaaactgtgcaaggacgatgtcacctctctttggattaaaggatccgataatgggagcgtctttaatactcaatgatgcaagctggttctgaatcgaagctattttctgatctccagcagattgaacatagaaccgaccacctccaagtacttctgtaacaacaacctgtaatagtaggcaatgaaatgaaaatgaaggtttgctttttatttataaaaaaaagatgtgacgtttgtgaaggatcatgtggataagttcacctttaaggtctccttttgcctggtttctacggtgttagtatttccgtttgagacttcttctccttcaacatagttttcccaaatctgaaaaatatcaaaacagtttagcaaattacgttttgaaagaaagaattttcttcactaaacatgtaattgccgaccaccttcagtttctggtttttagcagatctctctgcctgttcaagaagatgtgcttcggcgatcctgtctgcaccaaagctagtctgcatttttgctaagccagcttcaagcagaactgtagccacgtttgtcctcgattcccacatggatcccaagaaagtaccggttctatccacggtttcaacttcaatctgtgtgattataatagagtatgagaaacccatttaaaagaataggaaactgagattaattcttagatgtgcattcggtttacctcaacatctctctgcatgatcctacgtctcattacagagatagcttcttctgaataaggttcgccacggccaggacatctgacaccagagaatgaaaaggctatgctacatgttatctttgggatataaagcttaaaccgatgtccgctgaggacatattccacaacagcgggtattctcctgattctttgcagggatggcaggaaatctttagctttcttagctgccgactgagacaaatatatggttacacattagattagtcaaaaaggttaatgaggaaaatgcgtttattatgtacatggagatatatatatatatatatatatatactaaccacagttaggtctgtgatgtgcatggctggagattcttttgcagaatggattcctttctttccagccagagcacgagcttcagcagccagaagagcatcataatggtttgatcgctcttcaaaatctctatgtctaaccacatttccaaaaccacggacaagaacgagctcagcaatattcacaccaaccggctgactgccagcaattgctgcagcaggtggtgcagtcacttcatcagaatcggctttggcagcagatggaaggaacactgagccaaaatccatgaacctatcagcagctccagatgtggtaggaccatctccttgggtgactttccttgaatattccatttgaacaataacctgttgcaggaaaagggaagtcaaatcttgttcatatgtgcgtatacaaaggcaatgcaaaaggctcaacacaatacctgtttgccaataagtcgttgtctcagaaattctcttgcttcccgagcataaggagctggtttctcttctctacgtgggttgcccatttttggagatctgatactcgaaagacagacccgtctctctgctgctggactcccaaatggaacagcatcatcggcaactattagacaatccccactcaccacttccactacctaaagagagataaaaccaataactcaataaccaaaggagaaggacagtatttagaaagaatttctgcagacaagttacctttcccgtaaagttctggtcatgaattgccttagagtttgtagctggaggaacgtagtttgcccacattttaaccttatctttcttgcattgaagttctgcagctttcaactttttcttagcttcctcctccatcatgttggcactccattcaacaaatttagcaagaccctaagaaaatataatagcagcaaaggtcattgatattgtttcaacaacatagaaagatcatatattccagttattttctatcagagatcaaaaactgaccagtagaattacaaagtataacattatgtgtcaaacaaatttctctaagtaacaacatgtgcaatatagagaagaaaattgtagtttttacgccactagtagagcaaaaacattttcagtccattaagttaatatgcaatttatgttgaaagcaaaataactgcttagtgtaaacacgtacattttcaacgagctccaaccccaagtctttaactgtttccccatcagaataatgaactgaaccaatcagattgttgaatttgtcaacgccttcaagaacaatgcgaacctgcattatccagctcaaaactgagatcacactaatgcaaaatacagataaacaggagagaagctgatgagaaaaatccttacatctctactaagaacacggtgttcggtaaagtacttggcttcagttgcaaatggatcagaggaaacctcgacagacgatgctgcagaggcagcaagtctctgagctgtcgttagaggacctcgtgactcagcagaaacatctccattcggctcatctggaactgtctcaacaacacttccatttgtggttcgccttcccattgatggagcctacattgaaagagaaatattgctgaatgtgtttcaaagtgataggttaaaacgttaaccttgcatgcagcaagaactgagaaacaagtttagatacctggactcccgcaacaaatacttgcacaaactggaactctggaagaagataaacccgaatagtacttccatcacgcacttgctctacaataccttccataggcttgcccttgtttgcagctaaaaggcccatggcatcaaagccagcagaatccccaatggcagaaggaggaagatttctgatagatgcctcagcagcaccaggaacctggagtcgggtaaatccatcatcaaatcaattaaggcagtaaagaatttggagaataagtaaggaagataagaccaaccttgctccaacgaccatatccttcctgcttggccagctcttcaagctgtagcaactctttaatgtaaggactaaccttgtcctgattctgctgacctggctccctaacctgtcatgtcataaagctaaggtatcaccaccataattcagacaacaccatctcgagtgaaagaaaacgcttatcacctttgcccaaccagttttaacaacaagcttagcaagattctcgttgccaaggaaaacagagccaaattctcttccagcaatagcttccaccttgtaatccactttgaatgcaacctcctgtcaaataaaaacttgagatgagaaaatatagtcactcacaatagctagtgtataataactgagttattaattttgactttgcacctttcctatgcaaagtttcctcaaaaattctttgctttcccatgcaaaaggctcatctatacctcctctgcgagcctaaaaagaggaaaaaacaaacaacatgacatttaattccaacaaaaaataatataatctgcggtttaagacttcataagcagtatgaaaagaaaaaaatcaatatcaaaaagattttttgattggttgtgatgatcacaagcttttgtttcaaacactaatatctggtaaaaaaaacttgagattaaaactcaccatcttaggtgccataagagaagaaaaagtaatggtcttttccggtggaggtccagctctgttgtggctcaaagccgtgatcactaagcagtctccggaggtaacagccttcactcttcctttaagccattggttctcagcccccgttgccatgttcactagctaaccttagaccaaagccatttcggcaaaaatcagagtaaatcattcaaaagactcatcatttggccgcactataacacagtgcattggtaaaatatatgatcaaacatcaatttggtctgattagataatcgaaaccactaacgagattaagctacatgcatcgatacataaagactacaatattcatcatcaacgaatcacaaaaatgtacatttgtctcgatctgcactataactttgagctaaccaaaccaatcagacgagactctatatcgctcgatcagatcggaactaatcggaaaagatcaaattgaatcaatgaatggatagatctacgagaattcttcgataattccgacgaacataccttgattaaaccaaatgatagatctggagaagagagtctctctgtgattgaatacaaaagaggagatgaagaagaagaagacagagagagaagctcagagtttgggcaaaaagagtttaacggcggatctcgagatgggaagagagctcaggggatttgtgcagaggagctaaaagaaagaaagaaatataaaccagaggaaagagggaagatgactagtatttgtctcttttaccctcgctatttcgaataaattacgtgtaggtgccattttgttagattttgtttttacggaaaagagttggttttaaggtcgtaccgtggaaagtgaatatccacttgtctgtttcactttagaagtttacagaaaaatcaaccctaaaactaaaagtctacttaccatttttttttgcatatatagtcctagcgattaatttcttttataactagatagacatagtcacatagatagtctttaaaaaaatttggattcatttatatacaaagattagagatagatgatataaaaaaaaccactagctattcaagttaatccattacgtgtgctggtttatctggtttccgctctttgattggctatcgattagataaatacttaaaacaaattactcttttgtgtttccgttctttggctcacatcgattagagatatttagatagatacttaaaacatatttaacattttgattgtttgtttcttgtatacttttgttatgaagtgttgcatttgaaggttacaattgagggcaattactctgtaagaccggcgagcaaattaattgcctgtgattatagataagagcaaaatttgtaaaaccccaaaataaatatcaagtcaacttttgctttggggttaaataagaaaaaactacaatatgtatcaagtcaaatgtcactatttattggtaataaataatgggatctgccagaaatgttttcattgactcaaaacttctttttatggtaaaatcaaaactttttcagatttagctaattcatctttaatgaataaaaaatatagacgtttgattttatttatttcaggtttggactatgcagggctgggattatgcaccataatattttgtttccgacgaaaaaaagctttacagtgaagaagttgagatcgaaaatagaacgcgaaggtcgtaaagtcaaaggtagtacaataaattcccacccacaaaactcgccgaacacaatttattataattaaaattctatacccacgcaattcccatttcctcttctagtaaagcaaaaaatgcaatttcaaacacatacacgacagctacataaaaaacgaataaaaaacacgtgtatatttccacttttatatcagcactagttccaaaattccaatcaccgtcagtcacgttcgatatggaaacaaaaccctttcacggattaatcattagacaaaatcccaatagattaatttatatccagagtcgcgcactacaaagcatgatcgtcaaaaacggtcccaaccatatgttcatttcataacattgacttgatcactcattgagacagaacaatatgctacttataacataacttctttttaaacaaaacacacaacattgatttgactacatttcccaatgtaaaaaaaaagattgaagaaagctcaaatgtgtaacctacggggagggattaaagcccgaggaggatttggtatcgagtcatccggtccaagatcatcaataggtggtcgcttcctatgtgcatcggtaaccgattggtacgccatacccaatgccaaagcctaccacacaattttcctaaatttcagttcactgaacgacatataagatatatattctattggttttacttacaatgtgatcacgttctggaggggcataaattccggcattgatcgttgtccgtctccggcaactgttggttggtggatccgttatgttcttgaaaccggtcggaatcactagaaccggcaaaccgactaggtttcccatacagactttctcccaatcggtcacatttccaataaacgcatcgactgtaaagctcttctccacttcccgaatcaacttaccacgagctctctgagcctaagccggtaaattagatagataaataaatcggacataactatcacaaaaccaacctataaaccaaaatgagaagttgaaatggacaaaaacctgaatgtaatctactgctgtaactacacgagcacggcgtaactcaaccggccattgatcttgagcttcatagagatcttcttgaccggttctttgccattcatcaaaatgagccaacatatctacatccattgtgaagttcaatatcccttgaaccgattccacagtataatttagctcaaaaggaaccatattgacacctttggaaccaagaacttccaccacctgaagaagtcaaatgttgaatcaacacaaactagttcattactgtgattggaaaaagtatttagcagcttgtttaccttcatatcagcatcttttgtatacccaactgtgagttttgtgatatcaacggagaagggatcttcaaacgcgatctctctagatgagagatcatcgggatcttttcctttgatagcgtcaagaattacagcgcaatccgctgctgttctacagaaaggtcccagcttatcctgtaacaagaggagttggatcttaaaggttagatattctcaagttttcactcggttttgaagcacattaaaaccgctactattttcaacataccaggctctcggatatgctcatcactccggttctaccaacgctcccaaatgtcggacgcaatgctgttatgccacaccgcgctgcagggtatgtcattgagcctgctgtctccgagcctatagcaaaaggaaccatacctgaacaaaaagtttacccaaaaagaggaaaaggagctgtttatattttcagctatagccaaactgaaacgtaatcttgactcatttttctaaaataaaaactaaccagccgatgtggatgcagcgggtccagctgatgacccggtagagaattcctcgatattccatggattcctagtccgtcccccgaaccagatatcatcataagccatagaacccgtaacaagctttgctactaaaactgcacctgaagcttttaatctaaacaaccaaaaaaaccaagtgtccaatggacgttgtaactccaatacagcaaaaaggaaaatcaatgaacatagtgaaattttattttcaggaccttttgtaaacccatgcttcaatgtcaagaaattggtctttgaaagaagttgaaccccaagttgttttatatccgggaactgcaactatatcctttaaaccatatggaatcccgtgaagaggtcctatcacgcacaaaaatttcatagtaagaaacttgaaacaccaatccatcaaacagatttgtatgtggcattagagattccatcaaacagactatacggcactagagaaagataccaagataagttccttgagagagtaaatcatcagcttctttggcttgtttgtatgccagttcttcagtataagtaactaccgcttcaagaacatgattgtaccttttaccattaacaaaatcagcatcatgtaaaattccctgcaaacgttcagtgaaaatggaagctcccttaccgttttaactgcttaagataaatccgaacgagttctttggaagtaatttgtctcgtctttataagttctccgagttcaagaacctgccataatgcattcctctagttagacgaatagaccagtctatcgaaataacaaccataaaaaagagtgatgacttacgctcatgaaggcgatatcttcttcatctctagggagttttactccggatgccgaagggtatttgaatctcttgtcttgcactcgttgaacttctctgttccaagacggattaaacaccaacggggatggattttccaacccaccattcttagtagctactagtttccggttggctcgatatataggaacattcatttcagtagccccctttgcaatctcctgtagctatatagaccaatcacaaacatcaaaactccattatcataactgataagtaaaacatacactttcttactcaaagtatgatttagaaacccaaaatggctatctaaatgaacaaatctaaatcaattcaaaccaatcaggtaaaaacgtagaaaggtgattccttgaatcattacagaacattaacagactgttaagagaatcaaaagacttactttagtttcattgaagaatgcagaatcaatcaactcaaacatgccctgaagacacttagcttccatagtcttatctggtagttcagttagagtaactgtcctgatcataaacagtgtaaataacatcagctcactgtctaaaaccacaaagttgaaaaaatacaaaaaaatagattttcttttacctcgtcaaagttgtaatcttacggcaaggaacactcactttccggtccaagagtttccacagattcttacaatttctcaccatttcaatagaaggctcacatggaagaagacgggagcagagaagcttcgagtcagaaggatttgcgtccgcacaaaagaccgttaaacctaggaggaggcagaggaataaaagcggcgcgcatgtacggctacgaggaagtgagccacgcgtcgctaaacaaggtcgtgcgcttggatcacacgtggcgatcgatggtctcgccatcgtctcggctagtgtgattcgagcttgacaacggtgacagtgaaatcgttgtttttgggtttaggagataaacaagaatcagacggccgttgactttgacgctgctccgaggaggaactcaattcgaatgcaaaactggaaactggataaattgatcattaattagacgataatcgagtacttaaaatatattattacataaatactcaatgataaactaattttgtttatgatttaaagatggttaaaaccggtttactctattgagttttcgtcctcagcagtctgcatctgacttttaagttttaattaaacataaattaaataaaagagagaataatataattatccagctagattgcttcgttgcctcaaaggaaaaagtaacaaaagacaaaaactttcaattatgtgaagaatcgtacacctttcttatcgtcttctccatcgtttctccctgaagatttgttctactactctttttgggtatatctgtttacttgaatctcttaccatgaaagttcttcaattatttccttacttaaatctaagttgctttatgttgcgtttgattaatgggatcgtacttttctaaagttctagccttttatacgaaaaagcaacttttcgtgattttcttcaattgaatagctaaaattaggaaattttccttttcagtgttgtttttctttttctattttctttcttttctcttcttcttcttcttcaagcgatgaaccagaaaagttttgattttgattttggtgaaccaggaaagtggtactcgatctgtggtttgttgattctgaattagtatattcctggaaaattctgtaagtagatttatgataactaatctgaatttcatttagctctgattgttgtgaaaattgtgatagttttgcagatcaatagctattcctaagttgttgagttacacaacaggttcattgatgcagagttgttcttgtaacacttgatagctattccctaagttgttgtggcttgtctcaggatcttcttggcttttaggttaatttctatgacatttagatactagggcattgttggctgtgatggactcattgtgatcttttactggctcattgagtactgaaccacagatctcttaacatcttcatgtttttggttttctgcttgtgttctttggttttgtgagtggtttctatctgtatctaatttctcattcttcaggttcagtttcataatttaaacaagatgcagctcaaagtccctgaacatcaggttgcaggacacattgctaaagacgggaagcctggtcctctcgtagatgacaagggtcggttcttcaagccacttcagggcgattctcgtggtgaaatcgaggtaaagttctacgaatctttctcctcaaacacagaggttccagaacacatccatagatatttcccggtgtatcacggcactcaagcagttgaaggttctgatggagcagccatgatggtgttggaaaatcttcttgcagaatacacaaaaccatcagtaatggatgttaagatgggttcgagaacatggtatcctgatgcatctgaagaatacatccaaaaatgtttgaagaaagacacgggtaccacaaccgtgtcatcgggtttcaggatctctggtttcgaagtgtatgatcacaaagaatcgagtttctggaagcccgagaggaagcttcttcgcgggctcgatgtagatggagcgagattgactctgaggaagtttgtatcatctaactcactttcggacactggctcgaaacctgactctgcttttgcctcgagtgtttacggcggttcccacgggatcttaacgcagttgctggaactcaagacctggttcgagaaccaaacgctctaccatttcaactcttgttcgattttaatggtctatgagaatgaatccatcttaaagggaaatgatgatgatgctagaccacaagtcaagctggtggattttgctcatgttcttgatggtaatggtgtcattgaccataacttcttgggtggtctttgctctttcataaacttcattcgtgagattcttcagagcccagatgagtctgcagattcttagatttaagttaatttgtttgttatggctttggctgattccaatttttggatataaacttatgtttccttcacatatgtacttgattacctaaagagcagaatacattcgtactcttttctcaaagagtattccatttctaggcatataaaaaaattccatatttgaactttactttgaatgtgacttgtacagctaaaaaagtttagcgccaaaagaggaaataattcacactaatagtaaatttcgtaaataattaagagtttgtttgcagtgagatcccaaatattactaaaagtatagggactgaaatgaaatcgtcttctattaaaatcagtctgctctgcgttccccttttcaaattcccagtctcgcgcgcatcgttgaagaagaagaagacgacgacgattgactgagaatggtgctactttgtttcgtcgtggatctgcggaatatctcgccttctctgatcggagatctaaagcaggtctctctctatttccattctcagtaggaatttttgctcgtatatcgttgaatctatctgttgatcgaatttgattgttgctgcgaatttcgtctctctgaagctcgaatttgattgttactactacgaatttcatcttcatttctgaatctaggatttgattgttgctgcgaatttcgtcttcgtttatgaatattgaatttgattgttgcttgcgaatttggttgtagtcgtttctgaagctcagcaacttacacgcaatttcgtctccggtagattctctcactgatcggatcggtttgtgttatatcttgaaagatcgaatttctggaaacgatcaggttatattcgtcatcaatcgttgtttccttctattttcggtggtttgtgtgtggttttcatgttttttttacggatccagcagttgaaatttgcgtacactcctactggaaacttctgtcttcgagacttccatcacgctattaacagcttgcctttggatgcgtttgtacctgagatcgatgaatcgggagccatatcttgcagaggtctctctttacctctttttatctatctgtttcttcatagcttcctggttaatctcatgatctgtaatcatactaaattgttcatagatctaaagctatcaagtgttctatgtgatcgagctttgtactcatggggaggtagagacattatgaggaaagttattgtgctgagttcttgcttccctgaagatatggattctgaagctaaaaacactcttatggttagtcaaatttgtcaaatactgtgtttgttagtgctttggcttgtaatcttagttctgagtctttttgcttcaggctgcaacagataaatgtgtgtcagttgagtttcttttgtttgagaagcaagaaagctatctgagctatacgcaggagaagattaatagattcctcagatgtttatcggatcttgacaattgttcatttcaaacctgcatccctggtaggttccaaataactagctgcttctcatatttttatgctggttttttaaataagatttccaagctactttaatcattttggatctgtattctgtaaagaggttttaaatccagcacgaggtaacaaagaatagttctgaaactgatccgttctatgaattcagatggaaaatcacttcatggccttgaaaagagatggcttcaggagctaaaggatgacactggagaatcactgcaggctcagattatcttcaaaagtaaccttgttggttcagtaaataaggtcttctgcaatatcactgcagccacaaatcagattgtcgacggatttatcccttgtcaagtactgagccatactcctaaactttaatcttttatcccccaataagcttaccttttgcatcattaggaaaatatttggatactgtcatattgtacttacctcagctaatggtttacccactacagtttttcatcctcttgctgctgtttacagacatgcaggtgccacggcatcccattacaagattcagtggaaaagccaacagagaagttgaaatgctccgtaaccaatcatgaacttggaaagtatgatgtgattgaaaattctgtgaaagttggcaacagaacaaccctgtttttacctacaatccatagcctccagaaacttcatccagtttcttcccaagttgatttcaatgtcatagagaggactaatctaacttctctcagcgaaggtaaggcttttagctattccacagcactctcttcttttgacttcgattcttgcctccaagatagagagcttgattcaagtatgctattttgacgtaggcctactacttgggataccttacattgtaagcccttcaacttgtcatgaaacagaagaaatggatcaaccagatttgaacactcagagtaagcagtatctcaggtgtacccaatataaatacccattgactcatactttcctaagcatctagaatacagtttttcagggactatgtggtgcactatattcaatggaccaaggcttggtttgttcttcaaactgtaatctagacaccatgagagccgtggaatttcattgttattacgttcttcaaccgtctgaaaagggtccaatgcttctgagggtaaaaattcagtactctgaccctcttccttgatcacataacattagccttacagaattttatcgtccatatgatatgataagtttgtgttatgtcttgaattgtgcatttttcttagtcttaacagacaaaactatttgcagagattggcagggtcagaggaagtcctgcctatttgcaatgtcagtcagtttgccgagtcctctattcctagagaaatcgagatttctgtcaaaggcgctttgttagaggtcgatgtcatttcaatcttttgatattcatatttagtattaagtaagacttgtaactttttctttctttctgaaatttaagcagattgaatcaacaaactacaatcctctgatccacaacagaggcttccaccagaaactgaacctcattgtgaaagaaagtcttcaatttgggtgattattctccccacatcttatcttctcttcatcattagaatcccttcaaatatgttgctcatctctaacttcttttcttgtttctggaagttcattacattctaacacgaaagacgcaacatatgaagtgagctcagtccattcagattctgtaattccagcggaacagacatttccacacatagtaaatccaggaacacttcaggaagttcgtataattgatgaagaagacaaagcaacagcttccattactaaagaatgggaactactagtagtcactgaggaggttcgcatgaagtctccttctccggttataactacgatccgccaagttctgtctcctatacagagtaacaacaaacaggctgatatgaaaacatcaatgattttggaaagacttgaagctccgaggaagattagaggaaacgttggatcaccaaatgtagtcatacataatcccatctcaccagatgtctgtgtcttttctcagaagaagcctctgattccttttcagacaactcaggtttcatcaagccagctcatgaaacccagctttcagagactgaaacgaaagcaaaagtgagctttaagtagctctcagggtaagattctgctcctcttcagcttttcttttacttactcgagatgatagtgagaaagttaaaaagattgttaagacaaatttgtttttgagctgacacagcgtataataggaaaggatctcgagaagacttgaagtttggagtaaaggtaatattctgtagtttgcgtattaggatacaaacatgatctactgttcttttctttttttgtacaaaaaccaaaactatattaaatctcactatatatgtacaatttaaactatatcaaatactcttgtgaaatatatatatttttaaacttatttttttagaaattctctttatggaagatgaacttggtggaggtcttatgagagaaatccagtgataagtgtcgtaactctttcactaacccagctgctccacaataaaacactcctgccaatattaccaaaacattcatattatttgcatctgcataaacataatgagatcggttgttagttagttagaaactcaccgactctagtcttaggatgattcacagcgatccttttgaaaacgcttctccagtttggcctagcgaaatgggacatgacacgtgttcctgacacaacgtccactccatgcttagcatggtttagagactggagcatcgtgataagtgcagacctcgcgtccccttcctcgtaaacgctggtgcagtaattatgcagctcaattacgtttttgcggtctgtttcagtcacttcgtccatcacgttcttgaaccagtcaaacgacccctgctctcttgtgacccagtagaagtaagctctcttggttctgaacgtctcactttttcttgatggagaaacaggaggtgtgaccatattatggatcggtgactgtcttcggttactgccttcttccacgcctttcaagttattgattatgtcactcactatgctgatcatcggagtggcaccgattcctagacccactagcagaacaacttcaaacttcttgtagtcttgtgctggtgctccatatggaccatcaattaggattcttggaaagctaagggatcacaatttaaagaaaaaaatgacctagttagagactgcatatgtatagctagagtataactgaattatagttagttactgataatacttactcagggatgtaatcccagtgcttcgagtcggctctgttcagtctgtgttcatcaggagggcgtggcttgcacacctgtggttcagagggagttacatacttggaccaaaataatatcttgtgtttatagtctagagtggaaatggagtaaaatacctcagagaataatgatcttaattgcttagtccagtctcctaaaaccctgatgtggacactgaggtagtcatctcctggagctgaggtaattgagaatggatgcctgtttataagaaaacaaatgttcagttttgtttccatacaaatgtcttcacataatatgagttttttttcctcatttaccattctaatgtagaaactgcagaacagttgagatacatgtattgtccactcttgtatctgaagttgcttggtcttgacaagtgaagcgacaagacattccctggtaacacagcaacctgttgaaaatgtaaggtactaatagagatgaatttacaaagtcctccttttcttggatatatcaatatagaaatgtttatagattccacctttagcactgaaacagcctcgacgcttgacctgaatgcacgaatcagcctttcacacaagtaaagaaccaccggtaccatcaaatacatccatgtctattagatcacatgaaaaccaaaattagagtccatattccaactctgtaatgggtctaatggttaataagttactaaccgttttcttgtaccatggctcgatgatgaggtatacgtagaatccatgaacgacaagaagcgagtagacgataacaaataagtggtgagagtaccagaaggcattgaagcctgttattttcttcagtggtccaggaaggttgagcttattacgtctgaaccatgttgtagccaatgtaaaggctatggtcattagtacaaccattccaatcccggtaactccttctaccgattgaacaaagtccaaatatctctttgtctgtggcccaaaatacttctccattggctcatactgatcttcatctgcagctatcagccggggaaaatcacatgctaagtgagatgtagcatggattccaactccaactgaaattcctatagctatgacctgtgtaaggttcaatcataagcattcttctatatatataggaaacttcttttttatactccgggaagctaaaaaattaccttgtgaaaattgaggctgtcatcgaaaggaacaatagcacttaacttggttttggtccggagccaagtgatggtgttcctacaaactggtaacaaaatcatagccatgtttagtttaagcgtctctgcagctcctttagctatacaaacacaaactcccatgacttcgtaagcggatctttttcgatactccataaacttccacgtgaacaaacccgccatagcacctatccatagagccatcacccacactctcttccaattatcaaacaaaaaatacttcatccctctgcaaaaacgcgccccgagattcctactctgcggaaccatgagattctgacttagcatcttgcttagcttcttaccctctccatctctcacatcctgcatcggcgcttgcaatagaagtatctcgagattctctatctgtttggcattgtagcaagtgcctccaaacacatcaaaaaacactcacaaaccaaacttttctaactaaaaaaatgattaaatcaaaacaaacctcattcacaaaacttcacataccatgatgtacccataatgataaggatctagttcttccataattaaagcagcatattcatcagcttgtctccgaatgttatccagctcgtttgcagaagcacttaaagttataatctatacacatatagaaaatatacttatgatgaagaacacaaagagctgcaagattgttaatactaatcactacaaaaatcaagattctacctctcttacttcggcttcattcaaccgcccatccgaatccttatcgaccctaaatttcataccacacttcaatataaaactcaaagttcatgtcaaatatatagagaaatcgaaagaaacatttacatggcgaagaaagttcgtagccttgaatcaaaatcttgatcagtgatctgcttccagaactctttaagctcattaatgtttattgaatctccgcttacgttttccctcctcgctaaagcatcgaacaatgccaacgcaaactctgtcgatttcatccctgcagcaaaatttatgtaatcaatcattgaaatttcaaaacagaaaatattgaaccctctcactagtcgcttcttctaacctatacattcaccgaatctagatcggtgtaataatccgttagtagtcattgtcatcacataaaaccgtttctcaacctcaggccaaccagtgacaccatcagttttggtgatgaatttaagacctttgagagctaactctgctctagatttcgaacggcgcagctttgccagctgcggccgcggtggttttctcgcggaagacgaagaaacagaagaagcaactcgtgttattccggtggaaacagaagaagccaagcgtttcaaaaccgagttactcctccctgaacgaccttgtctgagaagcgattgatcctcataattagacccggcccctcgatggttcggtgacttcaagccgtacacggagacggaatcgtcgtggatatctagcgtgatctccacgtatggttcatcttcaccgtaatagttgcttgtcgtcgccacgttcgccgacgactctcctctgttgtacggcgactctgtgtagtatctcacgtgttcgaaacctaacttttgcatttcacttcgattcatcatcaacctctggtttaagaaatatatttatgcatctttgaagaagacgaagaagaagaagaagaatgttgaaaaccagagagacgaacttatgtaaatgattaaattaattaacaccggaataccaaaagcatacactaacaatatgaaattaatttaacctattgaaaatatataaaccagcctatgaatctttagtaatgaagaaaaattcaaagtagcatgaaaggagactttatcttgtttattgtaatttggtgttggggttggttagaaattttctaaagagttgttagtgtactttcttcgtggtcaaatctcccgcgcattatcagaccacgtccaatatgagacttattataagttgatggtcaggttaaccaaatttttattagctttctcgtcgtattcgctcacgttacatcttagtctaatcaacaaacttcgaaatctaaatctgttgacaaacgaaaaaacatcgaaaatctaaattaaaatataactttcatattaatcatacattttaaactaattattcaacccacctgcttaataaaacatagcattttctattcaccaaccacttgcaaaaaataatttgtactgtaagagattattgtatagaatatttgattttgactttcttgtttttttttttttttttgtccaccaactttcttgttttaacccaaaaagttactctgataataactatcacgtaattacatcttaataatatgataattggcattcgtaaactatatattaaaatgaagaccttgaaaataaaagattatatcaatttatctgaaggtggagaaattaattaacagctacagtatgttaaagtgggaaagttataatattcaagctaaggataatttaaacctgccgtccaaacagttcccaaagcacatggatttgggagggaaaatcccagaaaaccaaaatcagtttggggaaagggttttgctttcagattttgttcttgctttttctcttcctaatttttgaagggtttattcgttaataaccctaatttatgaaattggtgaaagggcaatttttatttttatttttgctgagatatgaaaaggcgacagtgtgagaaagttgtgattcgtatccacaatattggcacaccattgatttctgggtcttctggtttgcctttagagttatttcacattcaatcagatcggccgtacacgattggtcgaagtagtagtgatgggttttgcgattttgttattgatcatagctctatcagtagaaaacactgtcagattctatttgatagccaaagtcacaaactttatatttttgacggcgtgattcacttgccttccggtagttttagtcaagtttatgatgagtttaggagaagattagttggtgttgaggatttggggaatttgaagtttagggcttctttgaatggggtttatgtaaatcgtgttagagttaggaaatctaaagttcaggaggtttctatagatgatgaggtattgtttttttgcgggaaggaagggttgtgttgtaaagatggtcgagttgggtttgtggttcaggagattgtgtttgaaggaagagatgcttcgattgtatcggtctcttcaggacattctcgaggaaccttttcaagtgggaagagaagcaaaagggtttttgctccgatggaaaacgagattaattctccagtttctgggttttatccacctaaagctgttggtgttgttgagagagtgaattctcttgtaagctattgtagacatatattgaagagtgatgatcctctatcttgccttaggctatctattatatcacattctggaaaggaatgtctatcttgttgtacatccaaaatgtttaggtcaaaagtaggtatagtggccgatgatagaggagttaagagtgccgagataaatcatgatatgggtcatggtttgtctggtctaaggttgagtattgaacggccaaactcaaatttacatgtagatagaagactaggtgtctctgacttgattagcgaaatagaaaacgagtttgctgcttgtacttttatcagtgataagactaggactatgcttccttttgatggggagaaagttaatactcccgatattacttgcatcaataaagagaaaagttatcaaagttctctccaagcacctgggaagaacttttatctaaatcgtctacagtatattgaacaaagctcaactggttgtcaacgggtggtttccttgccagaacttcttcaccctgtggaaagcattcaacaaatctttcttgcaacatttacaagtgatattttatggtatgtcgaaaagagtttgtttttgtattttccctagtagtctaaacacaacaatagataccatatctacaattgttccccaggcttgttcaagagtctgacgaatttgtattagcaggtttcttacctgttgtgatacacctagacacttgcctgtgactatcgcatgtcacaatgctgagagatgttggagttcaaaccctgatgcaagaactgctgtgcctttgccaaattacccaaatgtgactatggtgtacgtaatactgatcatatatctgttaaaaggaatggtgaatggttttatacttgtttgttattaaaacttcattacttcctgtttgtcttaggtatccaccatttcctgaggaaattgcatttgggaaggaccgcacgaaccgtggcattgcttgtcatcaccccaagctgtttattttgcaaagaaaagatagcattcgtgtaattatcacatctgcaaacttagtagcaagacaggttagagtgtaggccttagtatatagtaatatatatatatatatatatatatatatatatatatatactatgaatcacagatgagtcttggctattatgaggtttcagctattttcagagagttttatcatatttaattttctaatggagatttatcattccagtggaatgacgtgaccaacacagtttggtggcaagactttccacgaagagcagaccctgatcttttatcccttttcggccattgccaaagagaaaccaatcatggtttaaagccagacttttgtgctcagctggctggatttgccgcatcacttttgactgatgttccaagtcaggcccattggattcttgagttcacgaagtacaactttgaacactcagcaggtcaccttgttgcttcagtgcctggaatccattcttataagccgtcttatctcacagagtctggttgctcaaataccgtgagtagcttcaccttccatcttctatgcatgcattctctgattagtatcaatatcttgaactcatcttttattggttcacttagttgttttttcttaaagaatattgaaagtttaattgtgtcctgtatattagaaattttggtctatgcatccctttcttgactaattgtatgattattgtttcacagattttcagtgaagaatttctgggatctgttgaagcatctgttgtaggtctcagttaccttttccgctctgccaatgattccacaggagcacaactgaaacgactggcttcatatatccgcagaacccgggaaaattctctcggaatgttagaacttgttttgagaagaaatacgaatgtgcctgctgacccgaatgctgtgagagtccttgttcctaacccagatgatgattcaagagatggtaggtagttacatttcatgtattacagatcgctgtatgttccagacatgaattttcattatgtgactcgtccaaatttccttttgacagattttgtccaactaggctttttgccacggagtattgcaaaatgggtgtctcctttatgggatattggattctttaaatttgtgggatatgtgtatcgggatgaagtccttggagctgcttcttgtaggagcaacgagaaggtgcaactagtgctgcatgtattacaggcagggtactcttcatatgcttatgagatactttgcataaatagagtatggatacatctaaaaatctctcttgaattttgcagggagtgtccatttcagatatgtcaaagttgattcaaccttatcatgttgttgcattgtgctcgttgattgcttcacttcagagatgtactggcatttggaggctacaagaggtaagtttgattattaataaaactaaagaatcatcctttcagacccttgagttataacgagagtatatctgtctctaactgtgttcttctgtattgggtttctgaaaggtgttaggccgttacaagtggcccgaatctcaggaatctgatttcgtctacagtaagttcattgcctatgataatggtaaacaaacaccttaatagggtattaagtttatagtttttctttttcttataataggtgcatcctcgattggaggctcagcaactacaggatttcaagctgatttttcatcagctgcaggtaaaaaagcgttacagcattttgactcccaggagtctgatccagaggtaccatttttttttgaagcacccttaaaaactgttactacaagttttttgcatgaaacgtttggtctgtgttcttcttgatcagtggggatgctggagtaacagggaagaacgggaagctccttccattaaaataatcttccctaccatagaaagagtcaagaatggccatcatggtgtcttgtcttcaagacgtttgctttgcttctctgaggtatttgcttattttacacttgtataatgcccaaagcttttgttcagaaagataaagtaaggattgctttggactgattcaataatgtactggaaattatgaacctcaaactttgtcttttgactatcttgtgcagaaaacctggcaaaagtggagacatagcaatgtgcttcacgatgcagttcctaatcctcaagatagagttggacacccaatgcatatcaaggtaagaacaaaggagagctctgtctgtgacaataaaagatttttcgagttggcgaaacccgactcttccactgtagtaaaatgtctttataaactatgaacaggtggctaggagactctttacctccacgagaggttcacgatcttcttcgtttggttgggtttacagcggctcacataatttcagtgcagctgcctggggacagaccatatccagatcctccagaaacaaccaggaccagtcaaacaatgccatcagagcagttaaaaaacttcgtgtatgtaactatgagctcgggattgtgttcgttttccctccacctcatgaagaaaccgactcatgcgaagggtctaaaattgatgatattgtcttgccttttgttgtaccggctccaaaatatggatggagtgataaaccggctacaggtttggctatgagggaagcttttgctgagtttagggaaggctctacaagtttctgtggagaatcagaagttgaggaagaagtagaagaagaagaggaagaagaagctgatgctgaaggaagaggagagtttgttgcagaagaggagaagcaagaggaagaggcttatgctgaggccttgtggagccaggttgagtcatcctcatcctccctcagctcctgaaactatgtcgtttcggaaaatacccttgtatatgtaactactgttgtttgcaacaaacataaaattttgaaaagtataataagaaatgaaataattcatttcatactctaataaaaaaaaacgaataatgtaatacattgaaggaggacttaataattagaaaaaggttatataattagatacattctttttttaaaaaggttatataattagatatattcgagtggttagaattttttttccctttgtaaacatttgaaacttaagaaatttctggtcaataaaatgtaaagttgaaaaagtaatagaaatattcttagagaaattatagcaggatggaaaaatggatcaccacaaacaataatagcaaacgaaaacgaaattcaaaaaaattcaggtctctgaaacaatatatatacccatagccatctttccatcaaatcatccagaaaaaacaaaaaaaaacaaaaaaataataaaacaaaaaaatatcttttttttttctaataaaaaaaaaataataaataaatatgagatacacaaatgtgtccattttattaggcatgttggtgatctttgtttcaccaatggtgttcgcagatgatttgacaccaatcccagagggcaaaccccaagtggtgcagtggttcaatacccacgttggtccattggctcaacgtaaaggcttagatcctgctctcgtagctgctgaggctgctccacgtatcatcaacgtataactcacacttgattttcccaaactcatcattgtaacaatatattttaacataaattttttgaaaacatgtaaatattattgcaggtgaatccaaagggaggtgaattcaaaacactaacagacgcaataaagagcgttcccgcagggaacacaaagcgggtgatcataaagatggctcatggtgagtacagagagaaggtcactatcgacaggaacaaacccttcattacattgatgggacaacccaatgccatgcctgttatcacctacgacggtaccgccgccaagtatggaaccgttgatagtgcctctctcattatcttatccgactatttcatggccgttaacatcgtcgttaaggtaagtgatcctactaatatattatacatatctatgagactagtcgactatttcatggtcgagtgatttatttttttgtatatgtagaacactgcaccggcaccagatggtaaaactaagggagcacaagccttatccatgagaatctccggaaactttgctgctttctacaactgcaaattctacggtttccaagatacaatctgtgatgataccggaaaccatttcttcaaggattgttacgtcgaaggaacattcgatttcatcttcggaagtggaacctctatgtacttggtacgtaacatctcatacatattttctttatacataaagtgtgaaatctctaacgcatgcttgaattcaaaagggaacacaattgcacgtggttggagacggtattagagtgatcgcagcgcatgcaggaaagagcgcagaagaaaagagtggatactctttcgtgcactgcaaggtgactggaactggaggaggaatctatttgggaagagcatggatgagccaccctaaggttgtctatgcctacaccgagatgaccagcgttgtcaaccccaccggatggcaagaaaacaagactcccgcacatgacaagtaagtacacttttcacactacatagaaaatgttgtgaatatcacacaatcggtccatctcccttatgatctttctatcaaaaatgacaggaccgtgttctacggagagtacaagtgttcaggaccagggtcacacaaagccaagagagtgccattcacacaagacatcgacgacaaagaagctaactgtttcctatccctcggctacatccaaggatccaagtggcttctcccaccacccgctttgtaaattctttaatatcaacctattaaaattaaaattaaaacgtaaaactaaaattaaaacttctacttacatccttttttcaccgaaatatgtttatcggtgtatattatttttgtcgatattttctttcaatttccagaaatcctctcttctttaaatatcatggaggagttgagatttatgtaattttggtttcattataataaaatgttgtttccgttcataactcttgtatatttgtttaagtagccccttttcttatgtttgatatattttatctcgagaacttaattgtttttcttatgcttgatatatttacaagacaatgcaatgaaattatcaattttaatttgtatatcacggagatggtgattatcacattattatccttttaaggtcatcgggggtaaattgtgtagcaaacacacattctaatcataagattgaatataaaattagggaatttaatgaaaaaaaccctcaactttggccagatccatttttaaaccctaaactatgtttttagtaaaacaaaccctgaactaaaacctgttaataaacttaaccccacagtaattaaatattaatggaatattaatttccaaaaaaaaaaacaacgagacatttgtatttagcgcaaaaaccacatgatgttctttaaaactgttttgaatttattacaaaaaaacgttctaaatgattttgaattgcttaattagtttggattttagaagctggaagaaagacacaacaacttaaaataatccaaagagtcatgcttaaataaatccaaccaacataactatcgaaacagttgcaacacaacaatatttgtcacaaaaaaaaacaatcgtttcagagggacaagatattgtaaagtaaagacttgtcaagcattaactttgaagagaagattgtattggctgagtgatagggttctcttcatccattgttttctgtttttttcttggtcgtccttgaagtttcttgggtggttttggcactgctttacgcttgcatgaacgtttgttgtgtccgacttgttgacagttgctgcaagtctaaatatgcaaatattaaattaaataatttgaaaaggaagatcttgtgaaacataattcattgttctctattttatcatttgaactttttcacgtgtataaggaactttttgaggtggacgatcttcagttggatcacggattttgtcattgttctttgatcgatttttggaaattaatatcccattaatatttaattactgtggggttaagtttattaacaggttttagttcagggtttgttttactaaaaacatagttcagggtttaaaaatggatctggccaaagttgaaggtttttttcattaaattcccataaaattattgtgccttactttaattaatatgaatctttaaatagtttatgttcatagagtgtaattgttgatacatataccatcttttacgtgacgactatacaatgagatagcagtgtaagaaagagacatacagagttggcagtacaaaaacatataagctgacgctacattgctacaaaaattttatagttgtattttacaattaatatatacaaaaatacttaattacatattgccatctgtaaccaccaaaaaatattattgtctagtataatcaagaccagtacaatctaatcagacatgagaaagaagaaaaaataatggacatgcacgcatatatgattgactaattggtaatgttccactctttatgtgaatctacgaagcatctaaacgcaaaaacaaacttgtacttttccatgagcctactaaggaaagctcgaggttttctatacaatgcagtttcggcaattatgtaattccttttatatgaaaatatttggattaatatatatgattcttatttgagtctctgatctctgattaattattaatgaatgataaccgtcaattatgtggatagaatatcgaataataagctacttgatttccaaattcatcacaattcacacaccaagtccataagaaatgactgcttcgagggatataaaccacaaatgagaatgcaaaagaaaaaaataccacacacgagaatagtaaaaagagatctatccggtcatgcatcgacgatcccgaccactgcaagtatataaaatgtcccttcaaggcttcttcatctcttccatttttattcccaaattaataaatatctttttttcttttattttcttttactttaaaaaaaaacttaaaaattaataaattaataaagatgggttacatatctctagccctagttgcattacttgtattttttgcctcgccggtggttctcgccgacgatataaccccaattccggcagacagagcccaaatcccacaatggttcatggccaacgttaaacccttttcccagagacggggcacgctagaccccgaacttgaagctgcagaagcatcgcgacgtgtcatcatcgtaagtaaatcacaattttatcatacctataagattgattaatgtattgaatccagttttcgtttttgagacaaagaaacctgataaaaattgcacaaattaaaatactttaaaccgttgtacttaaatttcagtatagttgtatttgctgggataaaaaaaaaaaagtaaaaccataatcaatttattctcttaggattgattcttgtatcgttttctttggtacggttttattgttttaactccgttcatattactttatccgaattggacaccaagcaatgcatactattaattccaatgcaggtgaatcaaaatggaggcggcgattttaagacaataaacgcggcaatcaagagcattccattagcaaacaagaaccgtgtgatcataaagttggctcctggtatataccatgagaaagttaccgtcgacgtaggccgaccatacgttacattgcttggcaaacctggtgcggaaaccaacttgacttatgccggaacagccgctaaatacggcaccgtggagagtgccacgcttatcgtctgggccacaaattttttggcagccaacctaaacattatagtatgtatacaaatttaaatctcagttactagtatacatactatgttacggattagttggacctaattaaattttctatctcctatagaacacttctccaatgccaaagcctggtacacaaggacaagctctagctatgagaatcaacggcgataaggctgctttctacaactgcagattctatggttttcaagacactctttgcgacgatagaggcaaccatttctttaagaattgttacatcgaaggaacctatgattttatctttggaagaggagcttccttgtacttggtacgttgtatactttgatctcctttttgcacacacacatatatatatatatagcatgaccgataagtaagtcatgttttatttatttgatccatagactacgcaattgcatgctgttggagacggattaagagtgatcgcggcacacaatcgacagagtacaactgagcaaaacgggtattcgttcgtgcattgcaaggttactggagtcggaaccgggatctacttgggtagggcttggatgagccaccctaaggtcgtctactcctacactgaaatgtctagtgtcgtcaacccatctggatggcaagagaacagagtgcgtgcgcatgacaagtaagtgtatcaatttcacattatatgattatgtgataagaaaccaacactaatatataagcataatttagtcatttccaattgagttaaacagtcataatttctcacatagagatattgcaatagtttcagtttgccccaaaaagaaaagatattgcaatagtttttacaagtttaaaatgtgatttgtgacagtgcgaaccaaccattaataagtaatattttttatataatgaatgataggacggtgttctatggagaatacatgtgcacgggaccaggatcacacaaagcgaagagagtggcacacacacaagacattgacaacaaagaagctagccaattccttaccctcggctacatcaagggctccaaatggcttctacctcctcccgcttactaaacagacccaatcatcactaaaattctgtatatgttacaattgtacgttttgttttcgaagtatcctctcttcctgtatataatggaggagtagagacttgtgtaattttggtttcatgataataaaatactcaatggttcacaaatgagaagcggataagaattcaaacatactgattattgtgcatggatagagtgacgcgactgattaatgttatgaatgacagtatatttgtatgcgaaattgcgaacacattaactataaatattttctagttaatgttaaaatgattggggacaatttctaaacaaaaaataatatggacattactttctatcattttttatgtttgatattagaactcgtattttggtagaaaattgttaacttgtgatttaaaaaaaaaaactgaagaatcacatttttagcagatggttgtgaaattacgtttttggttaaaaattgtagattcacaattttgtaaaggaaaatcacggatagctttttattggtggaacattttgtaatctttttctattattataaaaacttgataattgacattaccggtctagtagaaataaaacacaaaatttgaagagatatatataagttcgatcgaaaatcacggccaaatgtgggaagcgtcattgacgtaaagcaaatccaaatttaggaagtgtcattttaattaacattgaactactaaccactcctgtcatgtctagcaaatttacattcaaacataaattgtggtttaggtccttttcaggtaaatctatagatagatatatagcaaattaacaacatagttccttttggatgagtcaatattcaacatgttgattttgccaactgtaaattttccttttcgttgatggttacagatgaatgtgcgaatttatctccattcaaaattactgaatttgtaataataacaaaatcagatattcaaaaatgcttcaagaaatataaaccacagacgagaatagtaaaaatgagatatgtccggtcagagatcaacaagcaagacaagtataaaaaccccttcaaggcttcttcatttcttccatttttaaaagtaaataagatagtaatattaacacttagtttttcttttccttttcattattttcttttattttgtaacagaaataaaagaaaataaaagaaaataaaaagatgggttacatttcaatgtccgtggttgcattccttgttgtttttgcttcgccggtggttctagccaccgatacagatccgattccagaaaacagagcccaaatcccgcaatggtttaaaacaaacgttaaaccatattcccagagaaagggcacgctagaccccgccctcgaagctgctgaagcagcgcgacaaattatcaccgtaagttactaaaatctgatttttggtttggttcggttcatatcgatttgaccgaattaagtaggcgttgttaaatttttgcttatatgaatagtttacaaatgtatgttaactcgagtgaaaaatgaaaatctcattgcaggtgaatcaaaaaggtggcgctaatttcaagacattaaacgaagctatcaagagcattccgacaggaaacaagaaccgtgtgatcatcaagttggctcctggtgtatacaatgagaaggtcacaatcgacatagctcgaccattcattacattgcttggtcaacctggtgcggaaacggtcttgacttaccacgggacagccgctcagtacggaaccgttgagagtgcaactcttatcgtctgggctgaatatttccaggcagctcacctcaccattaaagtatgagaagcatatctatattcgttatacgttactacattacgttagagattaatcgctactaattaatttgattttgttatactatagaacactgctccaatgccgaaaccaggttcacagggacaagctctagcaatgaggatcaacgctgataaggcagctttctatagttgtagattccatggttttcaagatactctctgtgacgacaagggcaaccatttcttcaaggattgttacatcgaaggaacttatgattttatctttggaagaggagcttccttgtacttggtaaccttaaaattaaatattagacatcttttaacatggtacacatatatatagcatttttttgatattaatagtacatatatttgtatgtaaactcgatagaatacgcaattgcacgctgttggagatggattaagagtgatcacagctcaaggtagacaaagtgcaaccgaacaaaacggatacacgttcgtgcactgcaaagtcactggaaccggaaccggaatctatttgggcaggtcttggatgagccaccctaaagtcgtctatgctttcacagagatgaccagcgtggtcaatccatctggctggagggagaacctcaaccgcggatatgacaagtacgtaacatttcatatcatctcatttacatatagaactacattttatatatatatttgattataaactgaatttgatattgtgtgttgtataaatacaggacggtgttctatggagaatacaagtgtttcggaccagggtcacacttagagaagagagtgccttacacacaagatattgacaaaaacgaagttacgcctttcctcactcttggttacattaagggctccacatggctacttcctcctcctaaatactgaaatttttcttaagacaacttatttgttgtaacaccgttctttaatttataattgaaatgttcccatctttttagtttctttattttttttttgtattgcttaagatatgaattgatcaatattttttctacatatataaatcttccaattcattcatttctatatataccggatgtttgtggtgtttttgttttcctttatttagaaattcctataggatatatatacaaaatttgtttttgtaaaatatcataattatgttcacaccctattgagttaatgatttgtttttgtttttcttatgttaaacgttcatggtatatatgtttaaagtaccaacaaaaagaaagagtcaatgtctatccatgatatatatgcttttattaaacattttgattattttaaccaaaaaaaagtagaacacacacattttctagatctcatcattttaatagttctagttgcaaatgttaaacttcaatatttttcgtatatatatgaatcagcttcttctttctttaattttctcggcgaattagtatattttaatccataagagatgcatgcataaattttattgaattaagtgaagacccaatggtcaaaagaaaaaaaaaatatagatatgcaccgacgaagccgccgcgagtagccgcgtcacagccaggtcagcaaaaagtcgccatccaattaaagaagagaaggatagcaacttctgcaacgtgttctgctgagtctgacttagattcggaatctggttcttacgatttaatgaccatccgattttcaacggctaagattgtttagaaccattagtacaatattgtcacatccgcagagaatccacgcccctaaatgagctttacttccatgtttttcgcatctcctcgtgataacatcgacgatcaattttttttctttcacgttttgttgatatatataaatacgttttcggaaatgttttaaataaatattgttggtcatattctatagtatattcggattaaaatcatttttaatttcactaattatggagagatattcctaaaatgccttagtatttaaagaatgcgagtcaattgcactagatgcatgtttttattttgtttctaacgtggaccttatgtaagcaggtctgaagtttatccacaatttgctgtactaattgataacatttgtatatgtattccaaatatgaaatgtcattaaatgtctcataaaagtgataatacaatactgtatttgggaaaaataaatgagtcatacaacatagtaatcaacaaggtaaaaagtcatataacgccgtccccaaaaacagtctgtcccagctccatcctaattgggtatccacgtcccgatcctgtcacaggacaccagtaagaaaacggaaaccgaaaatttcaagaaaccaatatcgttttcttttcctcaattaaagttataaaaaaaaaaaaatccctgaaaatatcacatggttttttaaaacaattagtgttaaaatcaaaatttactaccttctccaccgttatttacgaatttaccatgttggtatattcttaaaaacttttgtagttcttgtaattactaaattttttttccgtaattttttcgattattatttataactttccaactcaagccaatatttttttagtaaattttaaaggaatgttaatcttctaaagatatgtttgacttaaaaaggagttaaaaatgatgagatagccaaaaaaaagattagagaaatccaaataaataataaggggtaaaagagtcattgcagtcgataattagtctccgtctgacgtaggatacgtcaaaaatatccgatctcattcaaattacgctttctcttctttcccctacaaatactcaattctttcttcttcaattcatcacaacaaatcaaaaactccaagttcttacctttttcccatttacaatcggtaaatttctccgatcacgagatacaaatttcactttctgatatcttggatcttccgatcactttgaattttttggtttgttgattttttttttttttttgttccataaagttcgaattttttatagagaagaaaccatgaatgctttagctgcaacaaacagaaacttccgtcatgcatctcgaatcctgggtttggattcgaagatcgagagaagtcttatgatcccatttagagaaatcaaggtttgacttttttttttccttttgaggttttactcttttgtttcgtttttggggaaaattcgtctcaatctttgtttggatttttttacttttgatttcaggttgagtgtacgattcctaaagacgatggcactctggtttcatacatcggatttagggttcaacatgacaatgctcgtggacccatgaaaggtggaatcagatatcatcctgaggtagggtcttttatcatttgttcttgatctaggatttaaagttgacaactttgggggttatagattgaatctagggatttgaattaagggttttgattttttggtttgaaggttgatccagatgaagttaacgcactagctcagctgatgacttggaagactgctgtagcagatattccatatggtggtgctaaaggtggaattggatgtagtcctcgtgacttgagtttgagcgagcttgagaggttgactcgtgtgtttacacagaagattcatgatcttatcggtattcataccgatgtgcctgctcctgatatgggcactaacgctcaaaccatggcttggattcttgatgagtactccaagtttcatggtcattcccctgctgttgtcactggaaagcccattgtaaggcttttaagattttggttatatcattctgagtccggaatctgttgtttattctatggatgttttcttgatttgaattaattcgatgtttctatgtgattaccatagttttgagctttttggtatagaagtaactgttggatcactttggtgtaggatcttggtggttcattaggtagggaagctgccacaggtcgtggtgtagtatttgccaccgaagctcttcttgctgagtacgggaaatcgattcagggtttgacatttgttattcaagtaaaaccattatcagctaatctcagatctcaagctttattgtgtatatgatataagacagaaatgttgagagatttggatgatatgtgacagggttttgggaatgttggaacatgggctgcgaagctgatccacgagaaaggcggtaaagtggttgcagtaagcgacattactggtgcaatcaggaaccctgaaggtatcgacatcaacgctctcataaaacacaaggacgcaactggaagtctcaatgatttcaatggtggagacgctatgaattcagatgaattgctcattcatgagtgtgatgttctcattccatgcgctcttggtggtgtcctgaacaagtcagttcaaaaacttcactcatcaaatcaacaccaatcatagagattcactttctgattcttatatttcccaatatttgttcagggaaaatgctggagatgtgaaggcaaagtttatagtagaggcagctaaccatccaacagatccagatgctgatgaggtaatgcatcgataacacaagaactcatccctgaaactccgaaaataaaaatcctaatctgtttggttttggcagattctgtcgaagaaaggagtgattatacttccagatatctacgcaaacgcaggaggagtgacagtgagttacttcgagtgggtgcagaacattcaaggattcatgtgggaagaggaaaaagtgaacttggagctgcaaaaatacatgactcgagcctttcacaacatcaagacaatgtgccatactcattcttgcaacctccgtatgggagctttcactcttggagttaaccgagtcgctcgagccacccagttgcgtggttgggaagcttaattcagttgaatcccccttatatactctgtttcttgcttgctctgttttccatttttttttttttggtttcattgttactgaaaatcattgagctttccgaaatggaaaaggaaacaaatggattgaataaaaactaacaaattggaataaaatatatgattggattaaacgagagtttcaaagcagaggatgaaatattccaggaaaaaaaaagcccaaattttagtttcatcagttgtgtggcttgctacttcattattattattattaaaacacaaatagtgaaaccaaaacatttattaaaatcggttacatattactggaattcaatttgaagttctcaaaaaaattgttacatttccgttaaaaggttccatttgttagatgatctagtattccaatgtatcaaacagcactggtgacttgactattacgatgatcttcgtcgtacaaattctttagaagattcttatgaaaacttctaactaaaaaagcaggttccaaaagtggagagtacatcgtcctcataaccatctctctttgaagtgaagaacaatagtcattataagtagaaattgtcacattcaattggaatccaattccaaataagaagtccagctctaacaagttcatctcctctgtggttattcctccaactttcgcatagaatgcattattgtaacacctatattttataaaaattcagataatatttgttagaaaattgtcaagaagaacaaaacaattctataaaaacttcaatttaaacaaagttttaacgttaattaatgaaatgaacaaaacgagaacaattttcactccaattaaaaagaatcataacttgtttttctaacaaagacgagaacttacaagtcatccatgaacttagcagagaccaagacgctggtgatgatgagtctatggacattagaggaatcaatgggcaacaatggctgcttttgtatgaaccgatccaaatatatatacgcgactatgtaacacgagtcgctgcaatctgcgtacttgaatatcctctccatatagcttctgattgatatagaaggtttggtcactgcattgaaagctgagatcctcttgtgctccctgaacggacggctcagatcgtcgttcgtctccgacaccctttgtagaagagatgacatcgccgttatgacatttggcatgatctcagccattggttcttgatcgtgaatcatcttctgatcaatctgataagccattggatttagagagagatgtgtaggttattacatagattaagtttgtgttggtgtctcctcttttgcctgtcgttttgggtgtttatatagaataaatagtaggacatgtatgtgtcatgctaatgattattgggttctcactacagattctccaaagattatctcttttgattaatggttttattgcaattttattctaagctctaaccactaaatttggaccatttggctaacatattggagacacaatgtttgttttagattaataaagtcattaggtaagtattatttaattaaaaacccttataaaggaagatatttttcacatatataagatttgtaaacagaaagcttatgaaagtaatgcatattgggttgaattttgttgcttataactcacgtcgctgaattggttagaacttcgaactgcagaacattaaaagaaaaaatgtgaataagtagtgttaccatgaagaatttctgtattcgaggtttatgaccaaattaaaaagtcataacttagaagcattagttacatcttttttgaagagatgataataaataagataatgctaacttgagagattaggttttcgttaggataaaattggttaaccaccaaactaaaatcccccttaattttgttctgactttcacttttcttgttgactctgccaatgtgtatactattattgtatacattgaataaatttaccctaatattaaggtattagtagtatctatgatatgctgttatgcttagaggcagcgtcactaaaagcgccatgtggcggagtgatgagccaggaccaaggtgctaaacacgttaaagagtaatgagcaacatgttgtctatattcaaagatttgtgaaatgtttaagatcactgaatcttaatgtctctttcacttctcattattattatttttttcgggtatcttataatccggatctgatgctcaagaacattgcctgttaatgatttagatgattattatatcacgtcttatattttgaatgtgaaagaaattgatatggttaaaccgagaagagacaacacaaaatcctatacagattagaaattggtgaagtaatctttacagactcacttaatcagatttactcgatataaagacaaatctttgacatgacactaaacaatctctaaaaatctatccaaatgcactgaacactctgttccaccacatagaacaactttcctcacgaacaaaactcacgaaacaatggaatgggtttatcaatgcttcttgattcgttcatgaggctaaaatatgggcttcttacggatggcccaaatgatataagaataaacaaaaaatagagataacggcccaaaataatagtagaaagagagaggagtactaatgacttattcaaatatttattagttgaatttggagtaacgaaaagaatttcacaaaggtgagatgatcccacatcttttattatgtatgatgagatgacaagtacatataaacacacgcacacacacaaaccaacaaagcaacaggtaaagaggtcctctgggagaatcctctgttttgggagaagaggaacaaaggcttttgattagccatagcagcggatagggtccttgcagctctttgcaggtgattgagcgtttccatgcatcccacctttgacaaggtactgctgatggtattcttcagctttgtagaatttctttgccggtaagatctcagtcacaatcttatcctccagttttttctgctctttctctagagactcgcgtgctagtttctcttgctccggtgtgtagaaatatatacctgatcggtattgtgctcccaaaagttctccctgcaacagtttaaagatcggttaggaattgaacgttgtcaagatcacattcactatgaaagctataattgaggacaatgacaagcaccatcaaatttcatttcaagataagaacacaaattcagtttaaccattaccatatacatgtctctacactactacagaaaccaaaacaatcggaagatggaaataacaagaagattccaccccaaaaaaagtcaactagaagtcaacattcttgagaagccactgaaagcagagcaagtctcaagactcataaatttgaccagaaattaacaaaattagacactaaaacactagatcctctggtaatcaaacagaaaatttagaaaagaaaccaacaaatcgaaacaagaatcgatacctgacgattcaaggtggtaggattatgtctagaccaaaacaaatcaagaagtgtctcataagtgcattctttaggatcatattgaaccctgacaacttctgcatggttcgtggtgttcgtacagacatcttcataagacggattgtgagagatcccatgagtgtaaccgacctcagtcacggtcacgccagggattctctggaaagcaagctccactccccagaaacaaccggcggcgaactcagcaaactcgtttcccggcgccggaacatcgttgtctggctcttgagctatcggagaaggaacaatcgcaggtttgtcagctacttgaggaggctcctgagctaccggagaaggagaagtttccactacttgaggttcctgagttttcagagaagaatccattgttaagtgtattgtttgatgatgagacctcgggaagctcgtttatatatataaagaagctagtcagagattaacacctaaaaatcatcgctaaataggaatattcatatttcaatgtaagtagtatttgacacacaagaaaaatacattcaatcaatactatgtgtagcatttataatttggtcaaattgttaatgaataatggatatattacgcgtcatttcttttattgtatatagaaatactgtatcaactatctatttaaaaaaaaaatccaacaaccatcattataatttggaaacataattcaaaaaaattggttggtctgaaattatttagatcaattcgtatttgagaaagacaatctatagattggtcagatataatattgatcaaaacttggaaaacatgtgtttatgaaatgacttttgataccgttcacattttttttgggtcaattactcaactagctagttctaagctctattatatgaactatgaaggatgacttaataataaacaatcatgcaagtatgcaacttgtaggttggtgggcacgtttgtttatgcaatcaaaactagagaatcattactctaataaaggaatggccctccaacactctttttttttttttttttcgttggctacatttaccatgttgatggctttttagatctagtaaggatcgcaatgattatttggtttatgtttatagagtataacatcaatattacaacattgcgaatgaaattccaaagaagtagttacatagcgtgtgaacaacttagtcaagttttacacaatctatttgacacacaagtcctttgatgctaagtcctctgttttcggagagggacagaggaaagcagcttattagccgtaacagcggattgggtcgttgcagcctttggcagtggattgcccttggccaaaccgcccaccttttgacagatactgttgatgatgctcttcagctctgtagaatttcttagctggcaagatttcagtcatgatctttctctccatttgttgctggtgacgttcaagtgactcacgggctagtttctcctgctcgggtgtgtagaagtatattccagatctgtattgggttcccacgtcatttccctgatcacagcaaagtcataaatcaaagtatcaatttagcatggaagtaggctgccgagaaaactgagtacttaaactaaaattatgatagtaaacacagagaattcaaactcatgagataaacagtcataagactggtcagtatatgctattgaaagtcagagaagatgcaaatgtaaattgtcggaaaaaagcataaataggattttttttcatcataatacacaaggttaacatcatcgagatagttgtcccgagtttgcaacaacagaaattgctaaaaccatataacctaaacagaccgcttacgatttggtttcgtacatgcgtagaatttgagaatacttcgctatgaaccccaacgagataatttgactataagctagtgaatttctcaaacaaaactagcagaaacttgcatatgattatagttctctgcgcacagatgcaagacaaatgataagccaaactaacatcaatataaacaaacatgaaatccaatgctaatcaatgatcatgaacagaacaagaagaacctctctgaaatccgtatctctacctcaattaaaaagggagcaacaggggagagattacagagctactacataatctggatcatactaagatcaacgaccaaagttaccaactcaagcctcataattcaacaaaaatcaagattcaatatcatttccttcctcatattctacttagatgatcaaggttccaaatttaaaaagtttcaaagtaaagactggtgatgaaaatcagaaagctatcagatttgagaaaaatcaagaaatccccaaagcacaacagactcaggcacatcccaatagattcaataatcctaaagacagaatctttctcaatccccgaacttgaaaggttaaaactttcaactcttggatccaaaaatacctggcgattcaaagtggtgggatcatgcctagaccagaacaaatcaagcagagactcataggtgcaatcgttaagatcatattgaaccctaacaacctccgaatggcctgtggtaccagaacaaacatctccgtatgaaggattgtctacggtcccttgggtgtatccagcctcggtctgagtcacccctgggactctctgaaacgccagctcgacaccccagaaacatccagctccgaattgggcaaactgattccccggcgccggtgtgtcatcgtcatttccctgagcgatcggagaaggatccatattggtttgcccacttgatcccaaacccaatctgttgagtatgttcattgagaaatttctaaagagagatatgaacagaggagaggagagagatgctgcgaaactcaagacgtgtcttccggtaactagcgtttgcgttttggtagcgatcacgattagatagtgataaccacaacttttaatcgcagtgaatcatctgtgatatagatacggtcaaacggtgaatttactacaccgaaccagataaaattacctaaaatataaaccgatatcggttattttttgaattttccgctatcgaatcgaacaaatacaaattcaatgtagtcaaagaatctaattcctttttttttattatacattgattgattaataactttaagcataacgttgtttacatgtcatttttgtaagaaatttgctgagcaaacaaaacgaaatttgtataacgaaccaaaaatttaggttttaatttggtcatgaactcaaacaaaaataaagaaattcaacaaataaatactctcactcattatagggcaaatatgaatacacatatacatgaaaacacttattatagatagtttttaatcagcaaaaccatatgaatggaaaagcaaaaaccataaaatatacaaaaattcccatggtacccctccaaccgctgtcgccaacaaaacgggcggctgagctagcgactccggtcgcagggttattctttttagaagatggttgaagaatccctgaagtggcggcttggggagatcccacgggagcctgagatgggccattgccttcaacattgactagtaacctcataccggcgaagcaatggagcctattaccgcatacaaagaaccggtttcccggtttggaaagagcaacggtcgtgttcccgtttgtgaacgtccggatcgcatctgttgtgttgcaattttggtagttgtctttagccacttcgtatacactatgcgtcgatgagtattggaacacttgcaaaaacattatacacataattaattagactaattagttcattaagggaaactgtaaattaatttgagtttttaattatgtagtatatatatagttggatgaagccaacatgatcaaagatacttacttagaacatcaccaggagagaatcgcttgcctgaagtccaagactcgagatcggagcttatgtcccaaccggagctgtctcctacaaagtatgtcgttgcgttacatcttcttattactacaaccccaaatatgatgcagagattgaaaagaaattgtatcttcgacgtcttcttcatagtgcacgctgtttgtattttctcaataaattgcgtttaattttcttgtattgctatagttgtctatatgcatatgtgtgaatggaattatggaaatatatatgtttttatataaggcataggttaaggttgctcattggtggataacctaacttcacaaccaccacaacatatatgatctgctttgttccctatagccttttttttgttcttaacaaatttttcgtgtttcacaattcatatgattcatatgctgttagttaaagtccacaaccctaaaatggttaaatcttgatggagatattgaagcagtaattcatatttattttttgttcttgattgcacaacatacaaatatagggaagattttaatggccagtaaataatgcttgtatttatatatgatcttgtggaatggtgatattagttgttatgtacttttccttttctcgaaaatacttgcagagggcttggaattggcattgaaggggtgttgaaccataactcctcgactaatcctgagtgtttctctttaccaaacctacctaataatatgcgtccagagaatttcccttgtaacactttttatagttgttggagcatcagaactagaacatgtatgatcgaaaaattatactagatatatggtttagccttttgggataaaaagttaaaatatagtcgaatttttaaaacatgtacaagaaaacaattctttttgtcctaaaatataatttctaggatgaacattttgtttgcaacttttatttacgtattacgtatttataaattaactaatatacccaacgaaaaatagtactaatactgtatatcactagaagctaggtagttgtatttcgatgaaaaatcgatgtaatattatttcttaattgctagttgtgttaaattatgattgaaaattctcattttaatgtcagtgacaatgtgacatcagacatttttttgtctttcccaaaggaagataaatgcccattgcatgaaggaacccggcgcaatacattttacctagaccttacgcatgaccgtatataacaatttcattattatttttacagaattgttacaactcaaacgacatatatatcgaatttatctgtacatgcattcacatatgtgtccaacatatttatgaaggcttgaaatccggacaagaggatgcttttttgcggaaagcttctttttgttttttagtagttgggactatgaatgagatcgaagtctccatttaaaaattaaatccatgttagtgttcctacttcctactatatcccaacatcttattaatatccctcgtcatatatgaatttggacattcttatacatttcgtacaacatatggatgttcattatattatcattttgataataaagtttagtttcttattggtacacgataaacaattgacagttacacatgctctagatattccaaaaaggaagaataataatttagtattcgaccgtcatattttaatatataactccgaaatatcaataaacgactacaagcctacaaaccttatatatagaggagccactcacactttcattttagttatcccttcacaatattaaccgatttctcaacactcaaattcaaataccaataatggagaaaggtgaggattcaagcacattcaaaatggggaattctgcacaagagaggagtttaccgtatgtacctgactgttacgtcgtcccgccttctagcaaaccatgtgactcaaattccggaatcgtacccactatcgatgtttctcggctgaaagggggagatgatgaacgtcgaggggttattcaggagctaagtttggcatgtcaacatcttggtttttttcaagtaagctattttacaagtaaattcatataactttgagtttttttccgaaattttggttgcaaggaaactgctttttcatccactttttgtttctttttatcaacgatatatgtaatgtagaagtttgcttacatttgataaccacggattcaacatagtattaacatacatatagttcgtgtcattatttaaaatcacgttaaatcagctctcgtattcgttgaaatcaaaatatcagctgtgttagtaacgtgacgtggctgtcacatgccgggggtctaaatgtagtttctggttaattggctccaaaatatttcaacattttccggtatatccttccactctaactgattcattttttccattctttttgtccgatgaatatattagatagtgaaccatggaatcaaccagaacatactagatgacgccttggaggttgcgaatagcttcttcgagctgccggcgaaggagaagaaacagtttatgtcaaacgatgtctacgcaccggttcggtacagtacgagtctcaaggacggtttggacacgatccaattctggaggatttttctaaagcactatgcacatcctcttcatcgttggattcatctttggccagagaatccacccggatacaggtattacatgtcactgattaggtcatacttatacattgcatctacaaaatatagcggcagattttgtcttttttcttgacgtgcatctaatgaactgaatcacctggaccgtcctaactaaggtaaggtttaagaaatcctttgttttacttgcaacccttcacttatcatttttctttttttctttttttgtccttatgttaaaaacaataaaataatatatgaatatatattaaaatactgaataagctttatgcaatagacatttttagtcaatttaatttcttatcaaatatgatcgtctaaatttaaagagctaattttctctttgcactatatatttaatttagtacgtaataacatcgttaagttacctaacagttaatttattcttaactttctttcttttttctaattgattaaaaaatatcacatatcttccctgtttttttgttttttgtacgtggtactcttttttgtttttgttctctaacatagaacacggttttgtttttctttctaacctatgggttttatgattaaaaaaaaaaaaaaaacagttttgttgcctgtgtattaaagaaatttagaactgacttaaaaataaactatttcatgatttgaccatcttttatcttaatttattttatataatggaataggttgaggatttacattgtataattaagaaagacataattactgttctgttttgttttacgttttttagaccatgtctatcacattttgcaagtactaatcgtctattatacgtatttaagtacacacacgtgtttgcgtttttgtgaataattcagggaaaaaatgggaaagttctgcgaggaagtgaggaaactatcgatagagttaatgggagcaataacggaaagcctaggtctagggagagactacctgtcgtctcggatggacgaaaacggcatgcaagtcatgacagttaactgctatccaccctgtccggaccctgagacggcgctaggcctgccgccgcattcagactatagttgcatcaccctccttctacagaacttggacggtctcaagatcttcgatccaatggctcacggtggatctggccgttgggttggtgtcccacaagtcacaggtgtacttaaggtgcgtttcaactgtaccggtttagacgtaaacagaaataattgaaacgtttagatccaaaacaaaaaatgtaatcaccatgcatcttcgctcttttttctttatttaggtccatattggtgaccatgtggaagttctaagcaatggattatacaagagcatcgttcataaagtcactttgaatgaagagaagacgagaatctctctcgcgagcttgcatagcttgggtatggacgataagatgagtgtaccgcgcgaattggttaacgatgaaaatccggttcggtataaagagagcagctttaacgattttcttgattttcttgtcaaaaatgacatttctcaaggggataggtttattgacactctcagaatcaaggactgattaagaggacaataaaataaatacagaataagaataaaggactgatcaggtcttagcccggtttggtttggtacacggtatgactcagtccatgtccttttggcgtttaacctgtgataacgtggagatgtatatcagagacatatatacgtgttaaattgtaatgtaagatatataattagcatatcattctctcgatttccaaatattcattgaaatcaaaataccacccaaatatgtatgtgcgcgtctaatttagattatttttattaaatatttttctatttacaaatagaagaaaagaaatataatatgcatggttaattggtttttttttttaaacataaatattttaaaaacataaaccctttaaaaaaaaaaacctttaaaaaaaaacataaatatatgtatataataattcgaaaaaatctacgtaattaataacgagtgagattcattcaagaattttgacaaagtcctaacatcgatctggtccatctgtatttaccaaaggcgtaggccctaaattcgccaccaaatatttaataaatttttaaggggtgtttgtttagtaaagaattacgatttttatctgatttgacacaaaagtatcttttagccttaattcgttacgttgtaaagacactgatccaatcccttctacacaacaagatcggattatatagacccaatatgtacagatccgcgagctggaaccgtgtgaccgaggattactcggtgccttggtccgcaccaaagggattatggaagggcttagacgaagacgagccggctccatacgatcccactggccaagagatgactaagaaagagaagtcacgtaccaagtttgctgaaaacgccgttcacataatcccttttgtccttcttgcttgtgctctcgtcctttggttcttctctaatccaggtttgtttacaattatacacattgtgtccctattcatgatcttaggctatcatatatatttgctcgattctctatgcgtgcaaacaaaccatctatttgagaatgttgcatcttctagtctttttgatccagttatttacttgtgatagaaggccatgaatcaagtttccttaaacacataatctttcttttttaaaatcaattcggaactcacatgatagatatgtgtaacgtacatacatatttgatactcttaagtagatttgtagcgtcaaataaaatgattgcacatttttttacgtatagatgtagatgttggggtgaaaggggactccattgcggctaggattgaaggattaacgatcgaaggagacattgacaatgacagcgacggaactcagaccggattcttaggagccgccacagaggtcggacattcaaaaaataaactaaaacgcgaggctaataaacgcaatcggaggatacaagcttcaaggaaagtgatgaaaggtttttattaatcacctttttgtttgataaatatttacgagataaactttcaaaacgaattattcttttttttctttctattttgattgcgcatgttagttgatcaggagatgtgtttctttggttaaacttttatatttagttcttcacattatcttcaagatccacaagaactactttcactctgtattgacgcctttctttttgattaatctgctacaacttggaggacagcggtttgatgtttaaaaaagactagggaaaaaagtttaaacgttaccatttgtgcatgcaattgcttcttttcttttcagaaaagaatacgcgtctttccaaaaaaaaccttgtaaactggcataaattctgattaaaaaccgtcactttatagatctgccaaaaataaagacattaatctagtgtgtaaaggctctaaacaaaaagaaaacaattatatccgaatccaatttttctataacatgattttagattcaactgttttagctacaaattagaaagaaattatttttttatctaaaattcatagctaaaacagttagaatctaaaaccatattttaaaaaaagtagattcggatatgaaatgatgaaaaaactttattttcgtacgattctcaatttaaaaagatgtatttaacgtaacaattttcggatataacaaaaaagcgatttgaatagtagatgcgaggaaaaagttttgtttttgtcttatcttcggtccgagaaaatgtatttaacgcaaaacttttcggacataaagaaaaaacgatacgaatatcaagtgcacagaaaaaactttatttatgcctgattttcgctccgaaaaaatgtatttaacgcaaaacttttcggatctaaataaaaaagtgataaataagctttttatggtgataatagtatgctgtataatcatttcctacttcgatcaaatttattacgactaaaatataaattatggaaatgacatttgcaaactatttctattgtctttggatttagcaatgctctcaccaacctaccaagattgcaaaagagaaacggctgtcgaggatttaaaggattcctctcgacacgtgtgccagatggtgctcctctcctctttattatttttaagttcttctgattatcacttacacgtgtgccttctcatgcaatttttaccactcgtgtgtttccaaatgtttttcactcttcttccttcacgtaaacgctgcccttattaacgtctgttaactttacctctcacgaatcaaacaccatttaacaccataatcaaatattgaaatattctaaaacgttgatcatgatgacgatttttgtaaattactgtaattgtatatactttacatacgatctgctgcatctggaaaaatatatcttcaaatcatattagtttatctttcaccatcttccgttgccgttaagatattatgtatccacagtatataagtgcatgcaacaaaaaataactgtaacgtttaaactttaaaatatagttttggcatttttcattgcaaaaggtaaaattattaaatattcgactttttatttcgtttttcttcctataaattcccctttcagtttcctaaattacttaagattttcctaagatgaaatctctgtagttttttttttgttcctttcttaaatttcgaaagaaagacatttattaaaccaaaataactctttagatcattgcaaggaaaaatgttgaaaagtgcaagtccaatggcattctacgatatcggagagcagcaatactctactttcgggtacattttaagcaaacctgggaacgcaggagcttacgagattgacccttcgatcccaaacatcgacgatgcgatctacggctcagatgagttccgtatgtacgcttacaaaatcaaacggtgtcctcgtactcgtagccacgactggacggagtgtccctacgctcaccgtggcgagaaagccacacgccgtgatcctcgccgttacacttactgtgcagtcgcatgcccggctttccgaaatggcgcatgccaccgtggcgactcatgcgaattcgcacatggcgtattcgagtactggctccacccggcgcgttaccgaacacgcgcatgtaacgccgggaacttgtgtcagaggaaagtgtgtttctttgcccacgcgccggagcagctaaggcagtctgaaggaaagcacaggtgcaggtacgcatataggccggtgagggctagaggtggtggaaacggcgatggagtgacgatgagaatggacgacgagggttacgacacgtcacggtctccggtgagaagcgggaaagatgatttagatagtaacgaggagaaggtgttgttgaagtgttggagtcggatgagcattgtggatgatcattatgagccgtccgatttggatttggatttgtcacactttgattggatctcagagttggtcgattaaatttgggaaatcaaagcagagaacaaaagaaacccgataaataaagtggattttgttaaaatccacaagatcaagattcaagatgagagatcttgtcatgtatatggtaaatttaattgtaatgatttattgcaatgtcgcaaaagaagttacttctctttgcatgtaaacagattcttgatcttctataagtctttgtattttctatcgtataaacaatgttataaaacagagtttcaaaagaaaattggctaagtttgtattttagtcactactagtcatgcaaccgttacgtagatattatagttgtcgcttgtcagtaactcggtatatccgtatatagctataaaaagtttgggttgttgatcgttgaccagaaaaataaaacagcaatttgattgacagtatatacgattattttgtaaaatgtagatgttgaaagaaaatttagttacaaataaagtaatttttaattaaaaaatttataattgataatttatcttaaaaacatctataatcaatttgctttggtataagaaaaccaaatatgaaaatagtaaaatcaatttttaatttaaaattgatataatatgaactacatgacggaacacctaagagcatggtactctaagttgctctgtttaaactgcgaggtactctaaagagatggaataaagaagtttttggtaatgtccaacagaaaaaagaaaaattgcttaatgagattaagaggattcaggatcaattggacagtactcccacggatgatcttctagagaaggagaagagtctacttaaggagtttgatgtgattctgaaacaggaggagatgaattggtaccagaaatcgagggaaaagttgttagcggctggggaccgtaatacaattttttttcacacatcaactatcattcgacgtaggagaaataggatcgaaatgcttaaggcagatggtggtcgctgggttacagacgcgaaggagttggaattgatgacggtgaattactataaaaggttgtactccctggaggatgtgaatccagttttaactcctttaccgcttgaggggttcactattctatcacaaagtgctttcacggagctgaatcgacctttcacgcctgctgagattgaagaatcagtacgaagtatggggaaatttaaggccccaggccccgacggctatcaacccgttttctaccagcagaattgggagactgtggggtcgtcagtgataaggttcgctttagacttctttgagacgggaatcctaccggagagtatgaatgatgctttggtagtccttatcgccaaggtagcgaagccggagctagtaactcaatttagaccaataagcctatgtaatgtccttttcaagactattactaaagctttggttataagattgaagggagtaatgcctctgcttattggaccagctcaatcaagttttataccggggaggttgagtacggataatattttgattgttcaagaggcagttcattccatgaggaggaagaagggagtcaaaggttggatgctgctcaaattggatctagagaaagcctatgacagaattcggtgggattttctagaagatactcttagagcagctcgactgccggttaagtggatagagtggatcatgaaatgcgtgaccggtccttcgatgactgtgttatggaatggagaacaaacagaggcatttcagccctctagaggccttcgtcaaggggatcccttgtctctatatctgtttgtgctttgtcttgagagactttgtcacttaattgagttatcaacaagacacaaagagtggaaaccgattagtatttcgagaggaggaccgaaactctctcacatatgttttgctgatgatcttattttgtttgcggaggcttcaattagtcagataaggattatgagaagagtgttggagaaattctgtgttgcctccggtcagaaggtaaacttagagaagtctaagatcttcttttcgggtaatattgaccgtgatttggctaaggagattagcgacgagagcggtattaaagcaacctgtgatttggtatgcctatcttgcacaagagaattaataaggatacttttggtgaagttgttgagagagtctcttctagattatccggctggaaggggtgtatgttgagtttagcaggaaggatcaccttgtccaaatcggtcctctcttctattccagttcactcgatgagtactatttctctccctacgtccacgttaaataggttggaactcgctctttcatttggggaagtacaagtgagaagaagaagcaacacttgatagcgtggaaaagaatttgtctgcctaagcgggaaggtggtctaggtatgaggcctgcagctctaatgaataaagctttgttggctaaggttgggtggagaattctgaaggatcgcactagtctttggacacaagttctccgggccaaatataaagtaagagacacaaatgatatgtcatggacggctgtaaaaagtaactggtcatcaacttggaggagtgtgggttcgggactgagagaagtggtgataccggggttgagttaggttctaggagatggcagaaccatcaagttttggaaagataaatggttgagcaatgggctgctgattgacgatgttgtgactactattccagaagagatggcagatttgaaggttcgggacctgtgggttgagggagtcgggtgggatatgagccgtattgaaccatttctatcaacacaggacagactgcgactcctctccatggtagtagatacagtgacgggagcgtccgatagagtctcatggggtccaagccaggatgggagattcagtgtgaagtcggccgcgtcgtttttacagtggaatcattccccgagaccaaatgtagagtctttgtttgggaagatttggaagtgtgtagttccagagcggatcagagtattcatgtggctaatagtgagtcaagtgattatgacaaattcagagagattccggcgacacttgtgtgattctaatgcctgtcaggtatgtatatgtggagaggagactattttccatgttttacgggattgtcctgctatgtcggggatctggaacagtttggttgcgcggaataacagagcacaattttttagccaatccctactcgaatggatttacgccaatgtgagtgacgggaagctgaaggacgacgtgccttggttaacggtgtttgggatggcagcgtggtggggatggaagtggagatgtgggaatgtttttggggtgacagggaagtgtagagaccgggtgcgttttgtgaaggatattgcaagggaggtctatcaagcacatgctccggtgttgggaggtactgaagcaattaccagagtagagagactgattgcttgggaaccgccacctgcagattgggttaagctcaacacggacggtgcttcacgaggcaacccagggttagcagcagcggggggagtcctgagagatagagagggacgctggattcagggcttcgcgctgaatatcggggtatgttcagctccacttgcggagttatagggggtttattacgggctctgtattgcgtgggagagacagatactgaagttggaattagaggtggactctgagatagtagtgggatttctcaagacggggataagtgatacgcatcctttgtctttcctagtacgattgtgctatggctttctttcgaaggactggacagtccgagtttcacatgtgtatagggaaggtaatcacctcgctgatggattagccaactatgcttttccgctttctttaggtttgcatttatatgatttttgtccagacgatttgtcgctttgtttgtctgaggacgcaagagggtctgcatattctcgtagagttcgattgtaattttattttctattttaataaatttttgtagggtgcattgccccctcatcccaccaaaaaaaaacctaagagcatctctattggttgaaaaaatgagatgtttttaaaatacatttaaaaaagaaaagaaaaaaaaggagtgtctttgaatagtagaagtttgtgtctctgcatagacattttagatccaaaacgatatggtgtctttaaagtttactattaatttatgttttgagtgatatttgagacaccaatagaggtgccctaagaatcgaccgtacaatatactctctttgttctcggtacattgtttataagttcccggttattcatcacgttatatgatttatactagaaaataataaaattgtagtcttgtgtttctttatttcagtataagcagctttgagattacatacgagcataaacgtatatatatatatgctacatgttggaacaacttgacttatttcctttaccatgtgggtggtgcagccggttcagctccagcggctggtgcagctccagcggcaggtgcagtttcagcgggaggtgcatctccacttgcggcccctgcagcccctggtccgaacatttttgagattttagctaacggattttcgcctcctcctaatcctccaagtcctccaggtaaacctccacctcctaatcctcctaatcctccaggtaaacctccacctcctaatcctccaccccctggttttccaaatcttcccccaaatctcctacctcccccaaatctcctaagtcccccaaatctcctacgcccgaacctacgtcgcaggctacataagtgtgtacaaaggttaattataaattgaaatcaaattgtaacgcttcttattaatcacgttggcagttgttctaatgatatatcatgtttcaaaaaaaggtaaacatgggttgtgatagaatagacaactcaaaagttagaagacgaaacattaaaagattaatactagaacattaatgtgtacagtgtacgatactcttaaaaataaatgaggtagtatgtcaaaagaatcagagatagacaaaagagaattaaacaagtttttttataaaacacaaaagtctttagtttttaaaaatttcacttaatgaagcacctgaggagagaagcggcggccatcgttccgagtgcgccaccagcggtgagtcctgtggttatgacagcagtggctatcgtggctggtacgagaatcggactgaatatgataaaaagcggtgtggttatggttaatgccgtggctgaacctgccagtgttagacccgctaacactaagaagactatagagaccacggcagcaataaccacctgaaaaacctccgacacttggaggatgagaaaagaaaacattttgggatagatgttaaatttcaatgactgagatttgttttgatggagttctttggctcatactttattattaaatggttgttaggggtctatacatgcaaaacaatgggagtaagtagagatttacgtcacgtcacctttgcttttttgtttttgtttttgagttgtcatgtttttggaccatcttttctttcttgtaagaagctcaaagattaattgtcgtgttgcaattcacgtttacggttgaaacaacctaaaataggtgcttcgaaagaaatccaaggaggcaaaattttgtggaattttgaatactagtttgcttgattttatcgaaactctcatgcttgatgaaattgcaatatgcctgtttaattttcaaatctcctaaattaaatttgtaagagattcttgtgaggttggccaagtgggagagtttagataattatacaaaaataaaatatcgtcgaacatgagaaggccgagcatattcgattttttcaggaaaactcttctaagtttgggggatatatatgaaacattgaaaaaaggtgatatcaagattcttccacttggctgtcaaaagacaatcatgcgtaataaaactacagaggggatctttggtgaatggtttgtttcaaactgtttctcaacacactaagtagcgatcaagattcaagatacgagatcttgtcatgtagatggtaaatttaattgtaatgatttatgtcatgtaaactgattcttgatcttctataagtctttgcagtttcgatcgtatgcacaaatgttaaaaaaacagagttttagaagaaaacagagtttattggctaagtttgtactagtcactagtcatgcaaccgttacatagataataaacttctcgcttgtcagtatataccatcaaaagtttgggttgttgatcgttgaccagaaaaaaaaaacagcaatttgattgactatatatacgatattttaaaatgtagctgttgaaagaaaatttagttacaaatgtaacgtaatttttaattagaaatatataatttattctcagttcaattattattttttctcttcaaatattcaataatcaatttgctttgttatagataacaaatttgaaaatagtgaaatcaattttcaatttaaaattacttagtatataaaaaccttaagaattgatatagtatgatttacagactacaatgccgactaaatgtgcaatgtacatggtctaagagtcgaccgtacattatacattatacgttcccatttgttcatcgagctatatgatttatactataaattaatgaacattgtagcatagtcttgtgtaagcagctttgaccttggagaatacatatgagcaaaagacgttttaaaaagcttttgtttccttatgaatcaatgcacaatatacatgttggaacaacttgacttatttcctttaccatgtgggtggtgtacttccaccagcggcaggagcagctccagcagcaggcgcagctccagcggcaggcgcagctccagcggcaggcgcagctccagcggcaggcgcagctccagcggctggtgcagcttcagcggcaggtgcaccaccagcagcagatgcatctccacctgcggcccctggtccgaaccattttgagatgtttccaaacggatttccgccccctcctaatcctccaggtgcacctccacctgcggcccctggtccgagccattttgagatgtctccaaacggatttccaccccctggtttatttccgaatgttccagaaaatttctttcctccccaaaatcctccatatccaccataaactggcaatttgagaagaggttgggctgacgaagttccttccgcagtcggcttagctcccatcctacgtctacatatatactcacaagtgcgtacaaaggttacttatgtattaaaaacaaaattgtaccacttcttattaatcacgttgacagtttttctaatgatgtttcaagaaaaggtaaacatgggttgtgatggaatagacaacgaagttagaagacaaaacattaaagaattaataagaccattaagtgtacacagggtacactaattctttaaaataaatgaattagaatatgtgaaaagaatcaaagatagaatagagaaaaaaaaagagaattgaacaagtttttcataaaacaaaaatgactatagttttacaaaatttcacttaatgaaccacctgatgagagcaacggccatcgctccgagtgcgccacccgtggtgaatcctgtggttatgacagcagtggctatcgtggctggtacaagaatcggactgaatataataaaaagcggtgttgttatggttaatgccgtggctgaacctaccagtgttagacccgcgaacactaagaagactatggagaccacggtagcaataaccacctgaaaagcctccaacaagaagataagaaaagaaaacatattgtgatagttaaatgttaaagtttgatgagtgagatttgatttgatggagttcttcggctcatactttgttatctgatggttgttaggggtctacatgcaaaacgatgggatcgtaaatagagatttacgtcacgtcacctttgctttcttgttttttttttccttttttttaggttgtcatgtttttgagccatcttttctttcttctaaaaagctcaaacattaattgtcgtgttgcaattcatgtttacggttggaacaacctaatataggggcttcgaaagaaattcaaggaggcgagattttgtggaagtttgatgaatactagtttgcttgattttacggatgatggttgcagtaaatctctattcggcttgatgatattgcaatatgctgtttaattttcaaatctcgtaaaataaatttgtattagattcgaaaataaaatattgtcgaaacatgagaaggccgagcatatacattcgacttttttcaggaatatatatattttggggagatatatgaaacatttttaaaaaggtgataacaagattctaccacttggctgttaaaatacaatcatgcgtaacaaaactacatagaggatctttggtgaatggtttggtccaagctatttctcaacacactaaggggcgcttaagaatgcaactaaataaccggaaacccgagaaccgttcacctattcttccgttggatggagagagagagaaggtttgagacggaaaaaatgttgttgaaggttcaccaaaaccactcaaccacacgactatattagagggctcttatgatacatatcacatatgaaagaaaaagggatgctgttttagtattagccccaaattcgagtcctaaggcttacattggtgagatatatgatagaaaaaagtcttggaacgtgagaaactatgtattgaaaactattcatataaacttaacacatgattcttagaaacctttaacaactaatttgcggtcacaaaaaattacttcaaacctcaaataaatattcataccatgcgtctctaagttcttctgtagcttatttttgttgtcaacaaacccaaactgctttgttagttgaatttttattttgaaccagaaaatctaatacaagatagaaaataactagggaaacatcctctttatattcattttaactataaaactatgcttacgtacaattgaataacagaagcaattctactacagaatggactaaaactgttgccacattattattgttcttaaaataaacattgtatcacatttatgtctttttatcataataatcagattcaacattacatataaacataaaacttattagaaaatatttttttctttcttttactttcccaatcatacaatcttgaactaatgcacaatgatctgcttaatgttggaacaacttgaccattgttctttactccgccatgtggccacctccacctccgtgtttacctcctccaaatttgtgtttacctcctccgattttgtgtttaccccctccactcccggacataccactttccgacatacctccttcacttccagacatacctccttcacttcctgacatacctcttttctttccgaatttacctctaagacctccgtgtttacctcctccaattttgtgtttacttccgctacccccagacataccacctccggacatacttccttcacttccagacacacctccttcacttcctgacatgcctcctccacttccggacatgcctcttttctttccgaatttacctccaagacctccgtgtttacctcctccaattttgtgtttacttccactgcccccagacataccacctccggatatacctccttcacttcgagacatacctccttcacttcctgacatgcctccggacatacattttttctttcccaaattagctttgagtttactttttctacttttggatttacctcctccacctccggacatacctccttcacttccagacataccttcttcacttcctgacatgcctccggacatactttttttctttcccaatttagctttgagtttactttttttacttttggatttacttcctccaccactggacatacctccttcacttccagacataccttcttcacttcctgacatgcctccggacataccttttttctttcccaatttagctttgagtttactttttttacttttggatttacttcctccaccaccagacatacctccttcacttccagacataccttcttcactctcggaccctccggacataccttttttcttttcgagtttagctttgagtttaccttttccacttttggatttacctccttcacctccggacatacctccttcacttccagacataccttcatccccagacgacataccttcttcaccttcggacttaccgcctttacctccaaatttactttttccacccccggacttgccttttttaccaccgaatttactttttaacatcttcttacaccaagccttaagcccacctttagactttgcctttgactttttgatcagactttgagctcctcctgctcctgctcccgaattcggtggaagtcctgccggaggtggattatccttcggctttactcccatcctacgtctgcatcacacaaaaaagtatgtatatatacttagagaccaattaagaaaacgaacgaagttcaatatttataaagtacgttaacaaatgaagttcaatatacttttaaactataggtttatgaatattatataattaagcataaatctcgagtgatctcaatataagctgttataataatcttacttaacaagccacatgatgagaccaagtgctgtcgctccaaaagagccaccggccgtgaatcctgtcgccaagacaaccgtggctatcgtagctggtacgagaacaggactaaatatgatgaaaaccggggtgcttacgactaatgctgcggcagaaccagcgagggttacacaggcgaaaccgacgaagattacggaggccacagaagcaataataatcttaataacctccaacagtggcatgagaaaagagaacatactgagaaaagaaaactttcttccatctctctctgaaagagatagagaaggaaaaaatctgccctctctctgtgacagggacagaaaaggaaacctatttctgccctctctcagtgacagagactgagctgatgatggcttttgacttagttcttcgctcatattttctgatcggattgttgtgttttggtgatggtaagagagagagggcttttatgaaggagttgtgtggtctctactacgtgcacggtacacacacatgcatgctccatgcaaaacgattggagtgaatggagatctacgctacgtcacgttacatgtccttctttatattttctcttttcgtgtgtgtgtgtgtgggttgtcatgttttgtaggccttctatttattgtttcttgtaaaattcaaatgttttcttccattccatatttccattgctttatggaatatcaaagcgtgaagaaatctttatcgttatattacgtatattagccatatcatatgtgattactaagttaaatatatgattttgatgaatttcgattgaaattacttgactggaagatggttaatataggtcatgaatatgagatcttcgaattactagtgacgagaggtcgctctcaatggtgaatttagtattacaaaactaattataagaaattatgggtccaagggttttgaaacctcctaatcataaaaaaaaaaaaaaaaaagagttatgtagctcaaaactaggtgtaggctcgctttgacgaaattatgatatgtatgtctagaaattcacgatttattagaaattcttgatttaattgtactgaaaaggagttggggtttggctaacgctaacggccgggttcaatttgctcttctaaaattggtccaatttatcttgaaggttgtatgaagatatatagcccaatattttggtttcgaatagaattgaaaaagctaaaagtgttacaaacttgaaccaagtaatacatgcccatatataagcccaatcaatgaattcgtcttcttcaacgtccaaccccggaagtcaacctcgatcggatacacacatacatatatacaagtagttccgtgatttttgttgaagaatcccttctaactcataaacataaccgtgatatataacacctagataaggtttttgttcgtgttgcagatataacaatagacgagagctgagaaacaaaagtactagtttctagcatttggtgtttaattacatgagtgagaaactaatacaaacatccattttatattacaaaaaatgcatcacaatccaactaatatatatctaatcataatcatgattgcaatttttgagaaattgattgttaattaataattatagagccgaaattaacaatgaaaaattgacaggtttcttaacataaataagattagtttttttttaataataaaattaaaaagcaatacttttgagttttaggtgaaacagtaacaaatttaattttcattttaaagaaaacatagaaatagtagcaagttcgtttaataaaaaaagtcttagctagctttcgatggtttttcttccaaaaaggtaatggagaaacgacaatttcaatgtctcacgattgaatcattcacatagtcacatacagttgctttggttaaactggatccattctatgtatatacgctatagtaccgattaattacttcatttaaacaaagcattgtttcatagttaatttctttgtaccatgctatacattaatagaaatgatatttgaaacatgtagtttcttctacggtaattaatatttactaaaaagagatggatacatgaggtttaatttatgaaacctaataattaagtttcaagttgctccatatgatcatccttaccaccacgcaagccgtttacctcctcgcgctccctccggtttatgtcctggctttttccccggtttacccccccatgctcccccgggtttatctcccggtgctccttccggtttatctcccgaagctcctcccgacgctcctccaggtcctcctcccgacgctcctccaggtcctcctcccgacgctcctccaggtcctcctcccgacgctcctcccgacgctcctcccgacgctcctcccgacgctcctcccgacgctcctcccgacgctcctccaggtcctcctcccgacgctcctcccggtttatctcctcctccagacgctcctcctggtttatctcccgacggtcctcctgctcctgacatttctcccggtttatctccagacgctcctcccgacgctcccggttgatctgctttggttggggctcctttcggagctggattgttcttcggttttactccaatcctatgtctacatcacacacacaagtgtacatgaaactatttagattttttttgtgtgctgaaaacatccattattcaacattagaaccaataaaacatgcattatgcaggttcgttgtagatgcacacatgccttataatatatgatatgtaagacgtttgataaatagtggatatatgagatgtgcacctcgagggtttgaatagggttttcaaaaaactttagtcatggaaaaaataatagtaaattgaataaataaattttacttaaagagccaaagtatgagagcaaatgccgtcactcctagggcaactgcagcggtagcccctccgactaggaaagtagtggctatagtggctggtacgagaatcggactgaagatgacaaaaagcggtgtggctatggttagtcccacaattgaggcaccgaaggttataccggcgaacactaagaagactacagatgctacggcagcgataaccacctgaaaaaactgtacaactgggataagaaacgagagcattttgtgagttacgtttgatctctattgttgctactctaatcggatgtttgttgaaagatagagggcttttatgaaaagagttgtgtggtgtacgtgcacggtacggtacacatgcatgctccatgcaaaacgatgggaagtaaatagagatctacgttaactcacgccaaattgtgcacacacaacacaaacaaaaaacaaaaacaaaaaaaaagtcacgcctgatttgcttcttcttttgtgtggcgttaacgtttcatgtattgtttaagataattttctatatatttaatgtacgataaataattaagaagttacaaggtccggctcaggtccgttgtacttgtttcagtcaaagcataattacaacttacaagtacgtaataatgacccaaaaaaaagcgatgacctaaaacattgaactaggtaaattaacctttgaggatgggtagttgtccgtaccaatcgcgatttctcacatttctcggcagctctcactcctcctcacttcatcatttggttcaaagactgacttttgtttttgatgaaatttggtacggacacttcgaacaactcaaacttgaccacaatatataattttaatatgtgtctcttgactaaacatttttctctagttctcatataacttttgtaggccttaattaacatcaaattatcttctgtgaaacaaacaaaaataactcaaattatatctttgatattattgtgttttgatgaaatagcagagcttgatttttacttttgttgtgatacatagatgttttgttcaattccaatgcatcaacttttaaccccaaaaaaagaagaaggcttttgtgtttctcctttttgccataagaatggtttctttttggttatatttgttattagctatatagcccatatgcaattaccgagtgacatgattaaggagaaaatccgcagagacatttaaaagttgtgaaggcgtaaactctgttttaaagatataacagtcttgaaagcctttacttttactaaaaaatttcatctatttagtattataacccttgcatatactattagcgattaagtgtagatatagtagtgaacttgcaacacatcccaaaacccatctatggcaatctcaatgatattacttcattaaaaaaatacaataaagacgattacattttattatactttttgtaacacacgatatacatcaatggaatgatattcggaggtaactagtatttttattaaagagaggatagatcaatttttatttttatttatggaaccccagtaatttagtatgatcaagttccttcatacatcatcccaaattaggaaacgcctaatcgtatttccccgattctgctggattagacgccggaacctgctgggttagacgccggagccggtggcgtcaatcctggaatttttggtaggtccctccctgtacgtttcctacatacaatcacatacttctgattactaaattaaattcgttgatttgtgtttgtataaactaaagattatgaatcgaacatgaaccaggtttaaaccaaacatgataaagtttagtaaggttatacattctcaaaatcaataactattaactataccatatataaccgaatgttcatcccttgaaatgtatattatatgtctaatcatgcatataaataagttcccatgtagatgcatatgcctaaaactacatttcaataaaagtaaaccaaattgcaataatttacttgtagagccacgaaaggatggtgaaagccgtggcaccaaaggaaccggaggctgtgaaacctgaagctagcaatgtagtggctatagtcgctggcacgagaacgggactgaaaatgacaaaaagtggtgtgcttatgatacatgcgaccactgagccgccgagggttataccggcgaatgtcaaaagagctagtgcaaccccggcggagaagaccgcctgaataatctcaaacatctttgggatgatcaagttaaacggctgggatttggtctgatcgaatggtttatgatttagtggtgggaagaagtggggttttatcaagaactagtggaagtctacgtgaacgctacgctacacattcatgctccatgcaaaacgatctgaatgaaaatggagatatgtgttacgtcacgtcattgtctctctttggttttctgtggattgtcacggtttttggccttttccttgttttaatatgtgttatgatcttgatttcgtatccctaaatttctgtttttaaagaagaaaatacagatttgagttcgtgactatcacattttcctaagaaaatttgtaacaaaaaatacctttaacaatggtaacaagaatttagagttcgataaacgagaaaaaattggatagccatatcgcttagtataataaagaaaaatctaaaaaagctaagattcgaccaatttttttttttttttttgatctactgaatcgtaatattaattttagtttatgattgtggctctttatcagcacgtctgtgaccatagaatattaagtatataaccgatcgatgtccgaatacatgaccaatttttgcaactgattctaattaatttcgatttaaagtacttgattgaaagataaaatgatgaatcgaatatgttaagggcttattattagccatggactaattgttcggttgttcctttgcgcaatggtcagtaatggtcaaagctttgactattttaaattgtatttaattttccatttgacccttggcggagctgcaagagcatgcattgtctcactgatttattgtcctttactccttttatttatatttatatacaggaatttatgattaatttgtttcgaataaatttgtaagtactttgaggaaaaaaaaattaggtttggctttctaattggaaaccagttacgatggtcgaaacaagaattccagtgtgcaagactcacttattcagacgggtgatatgatgcactcgcgtcaaatccaaatgtttaaggttaaaatcggttatatatataacctcgtttttaaaatattaaacaataaacatgcatatatatgttattgtttctgtagcacggcatacatcaatagaatgacgattgagaaatttagtttcatcagtacgtaataattagtacttagcaaaaaaaagaagtggataaatatctttaatttatggaatttcaatggttgtagagcaaatttttccatatcgtcatgcatccttgtctatgtccttgactaattttcacgcgcccggtttagctgctggtttagctgctggtttagcggcaggtgcagcaggggcaggggcagcgggagcggctggggcagctccacctgctgcggcagcacctggaattttaattggaaagtctctacccgtatatttcctaaacacaaaaaaaagtgtggttataaaaaaaattgtggtttaatttaccggcttgtgtgcgcatgcatacatattaaaaaaagaaattatgaatgtttttgggggttaattacttgtagagccacattaagatggtgagacccgacacaccagaggtgcctccggccattaaacctgaagcaagaatagtggtggcaatacccgcgggtacaagaacggggctaaaaacgaggaatagcggcatggacgcgaatagtgccacggctgtgccggttagagatataccggccagcaacaagaggcatattgcagcttcagtggcaaaaaaagccgtcataacacccttgagcgtcggcttttgtcttcgtatctcgtcgtcgcgacgacgttttttctttccaaaaatcaaagagagtggaaagggcgccatagcttgtttgatatcggatgattgtggaatttcatgaattagaagagtggattttaatgaagagagagtggtgtggtctacgtgcacggcacctgcttaccccatgcgaaacgatgcgagtgaatgttgagctctacgtcacgtcaatgcctcttcgtctttctttcttcatgcgaaaatggtcacactttcttgtaaaaaaaatagttgtaggtattttggtttattttcggatttcggtttgggtaggtaccgttggttggtttgattagttcagttttcgttaaaatttgattgaattataacctcaaagtcatttttaatcggttggactatatatttcgtttggttcaattagatttaatttgctgtggttttgataagagtttgtttcggttgtgatattatagcttacatgttttaaaaatcgaatacagtgaaataaatgaataagtatgattaactaattgaaatattgaggattgaaaactcgagtgctctcaaacatagcgatctgaatcttcaatagagcaaataggataattttcggcatccaataaatggaatgttataagatgttaaagaagactcgtatattaataaaatgatatttgagaattttagtttcttcaacacgtagttagtaattatcaactagatttaattttggaattctaatgattacatgcatattaaaaatatccatatcatctttcattgtcctccgtatcttttcatttctttggtttagccggtggttttgctgcgggctttgcggtcggttttggtttagatgttggttttgttgttggtttcaattttggtttcgttgccggttttactgtcggtttgataccggttttgatgttcgctttgctgccggttttgctgctgatttgaccatcggctttacaatcggttttgatagtggttttgctacctttttagatgttggtttagatgatggttttgctaccggtttagatattagttttgctggcggttttgtaactggctttgctaccgactttgatgttggctttgatactggttttaccataggttttgatactggttttgatgttggcttgcctgctgttttttctatcggttttgatacaggctttgcagttggttttgctatcagctttacagtcggttttgatgcgggttttcctaccggcttttttgtcagtttagatgttggttttgttgccgactttgtaattggctttgctaccggcattggtgttggttttgaagtcgattttgctactgactttgatacttgttttgccaccggttttgctgtcagttttgatgttggctttgctggcggtttttctatcggttttgctgctgattttgcaaacggttttacagtcggttttgatggtggatttgatgcaagttttttcgtcggtttagatgttggttttgttgtcggttttgtaactagctttgctgcgggcttagatgttggttttgccatcgattttgctaccggctttgatactggttttgccttcggtttggcttttggttttgatgttggcttcgctgccggttttgctgtcggttttgctactggttttacagtcgtttttgatgttggctttgcttctgacttttttgtcggtttagatgtcggttttctaactggctttgctaccgactttgatattggttttgttgttgactttgatattggttttgccactggttttgttgtcggttttgatgatggctcaattgttggccttgttgttggtttacctgcttctttggatgatggtttagctattgattttgttgttggtttagatatcggttttgttacaggtttattcgttggtttagttgatggtttaactaccgatttagatgttggtttagttgatggtttagatgacggtttagatgatggtttagatgtcgatttagttgttgttggctttgttgttggttaacctgcttctttcgatgatggtttagctatggtttttgttcttggtttggatgttggtttatttatcggtttggttattggtttagtagatgggttggctgttgatttagatgtcggtttaggtgttggtttaactgttggttttgttgatggtttagatgttggtttcgatgatggtttagatgctgatacagttgatggtttagatgtcggtttagatgatggtttagacgtcgatttagttgatggtttagatatcggtttagatgatggtttagatgtcggtttagatgatggtttagatttcggtttagttgatggtttagatgtcgatttagatgatggtttagacgttgatttagttgatggtttagatatcggtttagatgatggtttagatgtcggtttagatgatggtttagatttcggtttagttgatgatggattagttgtaggtttatttgatgttttcgtaggcactggtttatcttgggaaatacctccacccggaaaacttccacctgatgcatctccactaggtataggttcatttggtgtaggtccacccggtgcaagtccattcattgcatctccatccggtgaaggcccacttagtgaaggcctgctcggtatacgtagttttggtataagtcctctaagtatacgtcctctcggtattagtcctctcggtataagtccacccaatattgaaccatccaaggcagatgcatctgatgctgatccatctaatgcaggcccactcggtataagtccactaagtattgatccacctgttgctggtgcatccgatgaaggtccacttggaaaactaccacctgatttatctccaccaggtaaaggttcatctggtgaaggtccactcgttgaatctccaccaagtgaaggtccacttggtgtggacccacttggtgcaggcagtcttggtataagtcctcttggaaaaagtcctcttcgtatacgtcctctcggtataagtcctttcggtaaaattccatccaatatcgatccatcaagtgcacttgcatctgatggaggtccacctgatgaacctgcatctgctgaaggttcacccgatgtaggcatatttggtataagtccaccaatcatagatccacctgttgaaggtgcatccgatggagatccacccgaaaaactttcacttgatatatctccactaggtaaaggtccatctggtgtaagtctactcggtgctggtccacccggtgttggtccagtcattgcatctccacctggtgaaggtccacgcgatgcaggcccacttggtgcaggaagtctcggtataagtcctctcaatattcgtcgtctcggtataagtccttctggtataagtccacccaatatcgatttgcctgttgcaggtacatctattggaggtccacctgatgaaggtgcatctgatggaggtccacccgatgtaggcccatttggtataagtccaccaatcatagatccacctggtgaaagtgaatccgatggagatccagcaggaaaacttccacttgatatatctccactaagtaaaggtccatcttgtgtaagtccactcggtgttggtccagtcattgcatctccacctggtgaaggtccactcgatgcaggcccacttggtgcaggaagtctcggtataagtcctctcaatattcgtcgtctcagtataagtccttttggtataagtccatccagtattgattcgcccgttgcaggtacatctattggaggtccacctgatgaaggtgcatctgatggaggtccacccgatgtaggcccatttggtataagtccaccaatcatagatccacctggtgaagatgcatccgatggagatccacccggaaaatttccacttgatatatctccactaggtaaatgtccatctggtgtaagtccactcggtgttggtcctcccggtgttggtccagtcattgcatctccacctggtgaaggtccacttgatgcaggcccacttggtgcaggaagtctcggtataagtcctctcaatattcgtcgtctcggtataagtccttttggtataagtccacccaatatcgatttgcccgttgcaggtacatctattggaggtccacttgatgaaggtgcatctgatggaggtccacccgatgtaggcccatttggtataagtccatcaatcatagatccacctggtgaaggtgcattcgatggagatccacctggaaaacttccacttgatatatctccagtaggtaaaggtccatctggtgtaagtccacccggtgctggtccacccggtgatggtccagtcattgcatctccacctggtgaaagtccactcgatgcaggcccacttggtgcaggaagtctcggtataagtccttttggtataagtccacccaatatcgattggcccgttgcaggtacatcttttggaggtccacctggtgaaggtgcatctaatgggggtccactcgttgtaggcccattcgatatgcccgttgtaggtgcatctgatggagatgcactcgaaaaacttccacttgatatatctctaccaggtaaaggtccatctgatgtaggtccacccggtgctggtctacccggtgctgctccacctggtgttgatctatccaatgtaggtgcatctgatagaggtgcatcaggtgaaggtgcatctgatggatgtccacccgatgtaggtccattcgacatatgtctactaagcatagatccacctgttgtaggtgcatctgatggaggtccaccagatgaaggtgcatccaatggaggtccacccgatacagattcatttggtggagatccactttgtgcaagcccactcggtatagatccacctattgtagatgcatctgatggtgatccatttggtgcaggttcacctgatgaagatccatctaacgaaaatgcatccggtgaaggtgcatctggtgaaagtccaccttgttcagatgtatcttgcaaaggtccatccagtgcaggtgcatccattggatgttcactcgataatggtgcatctactccaagttctcccgatacatttctttcaaatgtatttccatccgataaatcttcaccggatgcattctcacccgatgtagctgcactagttacattaccatctggtaaagatccatttgatatatctccacccattgtagctctactcgatgtatccccccttggtaaaacttcatccgatgcatattcatccggtatcagtccaggaattttcgaaaagtctttccctttagtaaaactacagacaattgaatacatgtagttatagaaagaatggatgaattaatcttgaaagtttggtcgatactgtttcatagtgtctgatattgattatactacgtttaaaaggtaaacgatcctttttaattatggtcgaactaacgatcatgagtttttactgatgaaccattaaactaccaagtaaattgttcaaacggaacactgataaatgttatatgaatgctttatttggtccaaattatttctccaaagacataatcagttttttttttcttgctttgttttgctttgttttgttttttggtaaaggaagacgacctgttgcacatgtagttcacgtattctatgactacgctcccgcctgatatatattcataaatagagtcacaaatcatgaattgtagacgttaattaatttgtctatgctctcacatacggtatttagtttgaagttatacaggtataataaaacggtaaaaattcagatatttgtcgtcaccaagataaccccaaatgctagatcaacgcctaaatgcgcaaacagattaatatagaaagtgaatgttttgtaggttagtgttacttacttatagagccaagttaagatggtgagagccgtcagaccggaggtacctccagccattaaacttaaagcaagaacggtggcggtaatacccgctggtacgagaacagggctgaatacaaggaagagcggcatggaggcggctaacgccatggctgtgccaactagtgataaaccggccagcaacaagaggaatactgcggctgtagaggcaaaaaacgctatcaaaacacccttaatcgtcggctttggagatcgtaatctctcgcgttttttcttgcgaaacaacatttttaatggccagaaaatattccttgttttatcggatggttatgttgtgggatttcatgaattaggagagtggattttatgaatagatctagagaggtatggtctacgtgcacggcacgtgctttacctcatgcgtaacgatgcaagtgactgttgagctctacgttacctcaatgcctcttctcctctcttttttctgtttccctagctaattttgttggtttaccacattttttcgtcctctattccttgtttcctcgctttcttgtaaaatagttgtaggtattttggtttatattgggatattgtttgtgtaggttggtttgactaatctagttttcattataatatgattgaattataagttataaccaaaatcattttgattcggattgactagactttttttcaaaaaaaaattagttagatcttggtgtggttttgatagagtttgtttacgttgcgtattcttacatgtgttaaatttccatggtaaaatgaataagtattgtagctaactttgaactgttataaggacctaattaaggtacataaattgttagtcagtttcaagttaggtttagtaagtgttaacaaacagttttaaagtcgagttctctcaaacttcttttttttgataaaaactgctctcaaacttatggcgatcagaatcatcaattagaccaaagagaagaattttcgttatccgatttccaaatacaagaaattcatcaaacttacacaaacaaagtaactaaagcaatgcatttaatattgttattaaaggttcagtagctgtagtagtatgtgcgagatgagtcacttgatacaattcaattcatactgaataatgttggtggttgaaatagaacagtctcttctgtttgatgtttccgatcttttgtttattagtacaaaaacaaaaaaaaaaatacttcgtttgctatgtatatcaaaatccttaaataatttattttcttacgcatagattatggatggatcatatttttctgataggaggaaagttcacaattttgaattttcacaactgttagctgaatgcaaaatacaggtgaaatgttcgccggtaaactttttatctgaaactagttaaaactaacagactcggtaagcataaaagtgattagcatatcattgacaaccaataatggatgatggcgcaaagacatccaagttaatcataatctatgttcacattattatagagattactattattattttggacaaatctatgttcatattattatttatgcaaaaagagggtggattaggtttaactgttgtggagccctaaaaattaattaagaatccaaaaaatcaagttgcttcaaatcatttcccaccaggagaggcctaccaggaatacaacttgattgagctgtctttcctcttttaaaatttatccattaggaagcttttcatataattttttttttttttttgggtatgaaaatagaaaagtcttttgagattagtatccaaaaaaaacaacgattatttaatcggacgttgtttgatcagaaatggtttacgagaaagtcggcatattattcgatttttcattattttctcgatacatttttttcattcgagtctaattcacgtatgttaaaaagttatttgatgtacaaataatccagattattcgacctagtcgtatcagagtttcgagataaagttgtaaagttggttagaaatccttatgatatcaatagatcaaataaccctagttaaagcatcaaaaaatcaaatccacctacgtaaatgcttagagttacactcaaattttgattttttaatgacatctcttcatatgcagagattgtttttatgtggaaacacatagactaaatggcttatctttaaatagaaagtaaaagagtggaagtgaaagaaagaaagaaaaaaaaaaaccaatttatttgtcatttattattctacagaatggcagaatgactatgtaaaaatttgattctgtgaaatttcgtcattatgcataataccaataattataaatagcgaataaaaacaaaaacaataatgggatgtttagcaaaaaagaaataaaaaagcagtgccgttgagaatcaaatggtttttagtagtcagcatcaaaggtaaaagacaagttgagcataaatcatatgagaagattcatcgttagaaccaaaatgtaaaaaagaaagaaaaaagcttagcttttgattacagttttgtgcagtgtgaagtgtcacatcacacaacaacttgggtgaaggaaggtcctttcaaaaagttggacgttgtcttcataaatttgtattaattgatcacagactcatgaccccatctctaaaaccactaagagagcgacaaaaccatagctttttttttgtgtccctaccccatccatggctgctaaaatcttgtgattaccttcttgtctccttcctcttctctttccctcttttatataagaaccaaaacatccacagcttttgttccatcatcacttgcagattctttctctctttcgtaaaaatggcgagttttgaggaaagctctgatttggaagctatacagagccatctcttagaagacttgttggtttgtgatggtttcatgggagattttgacttcgatgcttcttttgtctcaggactttggtgtatagaaccacacgttcctaaacaagaacctgattctccagttcttgatccggattctttcgtcaacgagttcttgcaagtggaaggggaatcatcatcatcatcatcaccagagctgaattcatcgtcatcaacatatgagactgatcagagtgtgaaaaaggcagagaggttcgaagaagaagtagatgctagacattaccgaggagtgaggcgaaggccgtgggggaaatttgcagcagagattcgagatccagcaaagaaaggatcaagaatctggctaggaacatttgagagtgatgttgatgctgcaagagcctatgactgtgcagctttcaagctccggggaagaaaagccgtgctcaacttccctcttgacgccgggaaatatgaagctccagcgaattcaggaaggaaaaggaagagaagtgatgtgcatgaagagcttcaaagaactcagagcaattcatcttcatcttcctgtgatgcattttagcatattaagagtgtgagcagtttccttaagttgtataaagtaattgtacagaggaaacgaattgtgtaggtttagtgtgcttgcaagttgcaacaaatgtgtatggatgttctgtttcttcatgtccctaagatttagaaacatcttcttatttccaagaaagttattcagtttccaggtctctaaacaacctaactagttattagatgttgtaatccattagtcaatggtttatgaaacaatcaagttctcaatctcacacatagaaacttcactaaaacagctacaaaaagtgagtgtaccaagaggagaaggggaagtgaatcaagatgagcaagttacatgaatgtagcaggctagcagcaatgtttgtcttcataggttaggtacaagtcaacactcagtgataaaggaactggaccacaagctacagagacttgaaagagagatgcacaacttgcaaatgcagaataaacaagtcaacactcagtgataaaggaactggaccacaagctacagagacttgaaagagagatgcacaacttgcaaatgcagaataaacagagcagagatatttagttaaatatctacttctctctgtttactaaatggttgagtattaataacactgaaaccaggataccatttcctaatctctgtctggtttcctagtttcagtggtatttttccggtctagacccttgctgggtggacgaatcctaggccaaaatgggatctatatatttttgaagtgagatatcttataacatccatagtgagctaacctggtttggttttagattgaagagactttcttcaagggttgactgagttgtcaatgcaaggcccaccatattggacctattggtcaccactgcaagagtaaacttgtaaaacagttacaaacaatggcatataccagcatatcccattagtacatggaaaaggcagaacaagtcactcttctctaatcaatcattctccatagttccaacgaaatacttgaagaaactcaatcatatctatctcacttttgacaagcataacacttctttagtctgaatacttttcatgttactacaacataatggatgcatcattattcattaccttccaacacagagttttggtggatgcctttatctgttgagtccgccatcgaccaacatcaagcaggagcctatttcctgaaatgagaactttagtttgttgggtcaaggactcaacggttactcaagaaagctt

SEQ ID NO: 1411 - DNA, 89988 bp, Arabidopsis thaliana
ctaataagcagttcaagacggttcagaacgattatgagatgaccctaaatgagaattctgaggttgaagaagctagtaatgaagaaatgtttacccctgaaactaaattcaactttgtacccattgatgagttgggtacatacgtgaatcagaaagaccttattggtaagagctgttatctatattgaactctttttgtttgtaaacattggtttatgatgaaacttagttagtgactttaatgtttctcatttccagatgttatcggtgttgttcaaagtgtttctcctaccatgagcattagaaggaagaacgacaatgagatgatcccaaagagagatataactttggctgatgagacaaagaaaactgttgtggtgtccctttggaatgatctagcaactggcattggccaagaactgctggacatggctgataatcaccctgttatcgcgattaaatctcttaaagttggagcttttcaaggtaaatctatacttttcattttagtgttaatgctatatatgcattatgttaaaccgggcgctgatgcaaacctggatttctaggtgtttcattgtctactatcagcagaagcaatgtggtgataaaccctaattctccagaagctacaaagttgaaatcttggtatgatgctgaagggaaagagacatctatgtctgctattggttctgggatgagttcttctgccaacaacggatcaagatccatgtattctgacagagtttttctttctcacatcacaagcaatccctctttaggcgaggagaaggtacttcaaaacacttttaacatattaagatatggaaaaaagaaaagttgatttatgagtctcgtatatatattgcagcctgtattcttcagcactagagcttacataagcttcatcaagccagaccaaacaatgtggtaccgtgcttgcaagacctgtaacaagaaagttactgaagcaatggactctggttattggtgtgaaagttgtcagaaaaaggaccaagaatgcagtttaaggtatgatgatagtgagattcgtaaatattcaactcaagaaaagattttggttctggtttgttgtgttcttctttaatcatgtgtacttattgtgtgatcaggtatataatggcggtgaaagtctccgactcaactggtgaaacttggttatctgcattcaatgatgaagcagagaagattatcggctgcacagctgatgatctcaatgatctaaaatcagaggtaagaaaactcaaaacatatatatcaactggaacacagtccttattctccatgttctgatttaagatacgatgttatgttggttttctccaggaaggtgaagtgaatgagtttcagacaaaactgaaagaagctacttggtcatctcatctcttccggattagtgtttctcagcaagagtataacagtgagaagagacagaggataactgtaagaggtgtttctccaattgactttgctgctgaaacaagattattgctccaagacatttccaagaacaagacatctcagtaattctaacttttagcatgttttgtctggttttgtcaaagagtcccaaagttgtgagtttttctgcagtcggttatagtagttcatgtcattagagaattgacttttaaatctttgtaagtgttccaacaatcaattcagagagccatttggaaaaagtagaagcaatatattatgaaatcgaagaaaatggaaacatccatgggtttgtaaaaaaaaatcctaagagaacataaactagcataagaaagaaaagaacaaattcaattggagaatcactgttgctgaggcaaaggagacttcaattcctggtaattgtgtagacttccagtgaaatcagtgaacaaaccatcaacaccgatcttattgagccaataatcatactctaggtaagggtcctgattaaactctaaatgcagaaactggttctcattacggtatgtgtatggatggacctagcaaaaacattattcaacgtgaagtttaatgaaacaaatcagtgatgatagtaagagagtggagacaggagttcaagtcctacacacaaacctgaagattacgcgaatgtgctctcgcaactaaatctgttggtgtcatgagacggttattgttcacaggaacaattgtgtctttccatggaccaatcccaattacatatggtttaatgtaatccaaatatgcgtctgatgtgatctctgcgtaagtctgcattcacattcattaccttatgtataagcaattttgacataatgagaaaggaagaaagtgaatatgtaaataccttattagtgtcttcggtaagaatagtgacatcgtcgatcaaaaacaattttggtgagtctgtcatgtttgaaatgtaaactagcgaagttgctgcaaaagactgaataaatattggctgttttaaccaatcttcagacagatatgagcctttgtatccatatttcttcaaagtttccacaaatttatcttcaaattttttaccatccgcccacttcacctgcacaagtttccaaatacaatttaacatcctctccatttgttatcatcaatgactaaaagttgaagctaagatttgatggtttgcttacttgctgattcatgaaaaccggattcttgatctctggatatatcccaaccactctaggtgcatccagtgctatcgaaatatactcgtcgaaggtaataatcgggaatttaccattgtattgttgatccctgaaaggatacctctgctttgcaccaagtgttttcagctctttgagagtaaaatcaactgttcttggaatgttcaatctcatcgtcaaaatttgaaaaaaatgaaactatatcaaaacaaatgataatggaatgtttttagttaccagtgaagaagccggtcatgttcattccttggacttcataagtcctcttacggtctgcaaactccttatggtctgcaacatcggttgtatcatcgagattaacatcgtggtgacatataagaacaccgtctttggaagacaaaatatcggtttctataaaatctgcaccctcctctatggccctctgcaatcaaaaaaaccttgtgaaaccagacaaaattagtgtaaaggtaagagacttttgtatagatccaataccatatatgcaggagcagtttcttcagggagctctccgtttgatcctctgtgtgcaaggttgtaaggacgggaagtctgaagtggtttcttggttgcatgttttgcttcgcttgggagacgatacaaaggccttgaggcacaattagcaaccaacaatgacagtaaaagcaatggtagaagatctgcaaaaattataacaaaaattgctttaaacgaagaatcaacttagacatagaaacaatggagatttgacacttacacttgaaggccatgactgaatttgagctagaaaaattcctccaacgaccacactgcatgaatccaacattatatagatagacctgcaacttatctttagaagatttagccaaaaaatcgtaacaacccaatcagcattaagaatattcctctgagaaatctagtatgccaatagaagataaactccgtgttgtttgaaagtatattcttcttctattcactaggttttagttttacattttaaatgatcgcagatatcataaggcagtgtagttttagaacgaagtgaagttgcagatccagattgtattgctatgttctagtcttttgatcctttgttaattacaaaatgtacttgcttgtcgatcatgacaagccaagtttgtaaaacaatctctggttgaatgaaattgtcgatgataaaatgcaatcacgaagcggttgtgaatggaaaattaactcttttatagcatcccaagacacaaatcagaaacgagttcacaccaattctagagaagaaaatacaagagtttgagagagtgaaaactaaagagaggctcctccattcttctcaaactcccatgatcctccattcttcttctcaaactcccatgagatccccatagctacgcatgaggacgactcctcctgcaaacataccaagtgctcgcagaagtttctgcaaccaaaaggaattcgtatgagacagatttcgatccaaatacttcaaaggcatgaactataataaaccctaaatctctaagagacccaacatccccaaattcccattcgaacatccaaatacttcaaaggcatgaacttaacttgtgattgataaaccctaaacctctaagagacccaacattcccattcgaacacacaatttcataagaagaagacacagagataagataaggtcatctgatttggcctatcgaagcataggagagaaaatcaatcctacgttaaattctgaaacccaaaacgaactcattaaattcaattcccattcgaacacacaatttcataagaaagacaaaagaatcacattgtacgctcaattgaatcaatttgtaaatcctaaaccgtaattcaaaatcgctgtacaactcattaaattcagccgaaagcccagaatctaatcatgaaacatacaagagaatcgagacttcgatattcaatagacaatcaagtcggaattaaacgaaagagagaatgtatgaaggttaccatgttcaccgcccatttttgttcatcatgaacctcggagtgccagagtgctttcatcttttcgatagagacaacgttgttcaccatcttgctgctgaaaaatcgaaacttttgatcgtcgaaaaaagaagaagctagggcttttaaaacgacgaattgggatcgggaaattttagtcggttaacttattaagggtttacgttttgtttaattaccaaactaacctttactaatatactaataaccggtaaaaagtgatgtgatttggattgatttcaaccggagaagagttaaccactcgccgaacgacacgtgttcaacacaatcctattcctcctagcaatctcaaagcttgtgtgatctacaagctcttggtttctccattgaagaaaaagctttgacaaaaccagggaaagagacagagagagataatggcggctaaactaatctgttcgtctttaacagtgcattcaatggcaaataagaagccatcaccttctgctgcaacaagaacaataacctcaaagaaggtaaaagttgaaaatcaaaatttatcttcttatatgtcccaaaatctaatctctttgttatgtttggcagagcacagcgactccacaggtgaaactgctgacaagagtcgagcagctcaagcttctgaccaaagccgagaaagcaggacttttgtctttagcagagaaatcaggtttctctctatcgaccatcgagcgtcttggattgctgaccaaagcagaggagttcggcgttttgtctgccgccacaaacccggaaacgcctggaacgttattcactttgagcctcggtttactccttcttggaccggtttttgcatatgtggttcctgaagattacacttgggaagtagtgattcaggttcttgtggctctactctctgttcttggtggctctgctgcttttgctgcttctggttttgtctccaatttgcagaaatctgattagcccgatcgttttttttttgtatcaaatatatttacccggtgtagcaagagacttttctgcatttaagatgaaaactttataatgtatttgatctacattgtatcaaccagtcattttcactattttctatctatgtaaatggtttcatatacagaatccaagagaaacgttttgaatttcaatacgtttacttattgtttttgttatgtgcaacaagaagaagttgtctgtcacaacagaacatgaagggtttgaattttccaatagactagacaaaacgttacagtataattagcaaaaacaagtttttttcatcaacagatcaactaaaattgtggtatccattaggtataaataagaacaacatatatctttctttttatctgaaaacaaaccaaacttaaacacttataaaaatctaaaaggactagtaacaatggccagtttgaaagttttttcttttgctttgatccttgttctcactttctcagttggtacgtcttctctcttataactaggggtattttctcgagtgtttataacactaacaaacttatttttgtgtttcaatacaaacttgttactttaattacaaaattccatgaactcatattaggcaaaactgtttcaattttgtgtgatattggcagatgttgaaggatataatgtagagagtggtggttccttgtgttgtaataaccacccgaaatttggaaagtgcaacacaaacaatgacaatcagagatgtaaccgttggtgtcacaatggatgcgggaatggaaaaggcgattactgcaaagctatgtctcacggaggactatgtcattgttattgttaactcacaattaaaaaatttatgcatgcgttaatgcgtttgtttgattactaacatatgtatgagtatgaaactatgaatatcccatgacttcataagtaataagaccacaaagccaaagagtttattatatactctcaaaatctcacccaacttgatgtcagtttcaatttataaagggcttttataaaaccatgaatcatgtattctgtaacatttttataatataatataattgatttggtgttaaaaaaaaaaaaaaatctcatcaccacataatctcaatttttgtaaccaaactagtagacttggatgttaaatctcggtttaaatgtttgaccaatccactatctcagaccggtgtaaccaaagatgtgtaacaaactctgtgatgatgagattgttaagtaggcccaaaactaaaattgaatccatacacatatttcaaaagaataatatgttattttgggccaactataattgacaagatatgtaacgatatttgactggaagtgtaactataaaaccttaggcccaactataatggattcaaattttgtattgggcctactttaacaataatctcatcatcacagaatctcaaaatcattgacgacgtgacgtctctcttctctccgagtttttgtaaccaaagcagtacactgggaggttatttatcggtttaaagtattgaaccaatccaatatatgagaccggtttaataatccttcgatttcgattcgaactttggtttcatctccccaaatcgaagcgaaggtctctcaacaatggcgaaatcagtgtcgacggcggcttcctcgcttgtgcaaaaccttaggcggtacatcaagaagccatggcagatcaccggaccttgcgctcacccagaatacctcgaagctgttccaaaggcgacggagtatcgtctccgatgccccgctacgattgatgaagaagcaatcgtgccttcctcggatccagagaccgtatacaacatcgtataccacggcagagatcagcgcagaaaccgcccaccgatccggcgatacgtattgacgaaggacaacgtggttcagatgatgaacgagaagaagagttttgacgtctcggacttccctaaggtttacttgaccaccacagtcgaggaggatttggatacgcgtggtggaggctacgagaaataatcaggtgattatcaaatttgagttttttttttcttgtgttcggattcatttgattattggattatgagctgatgtaatcaggttttggaccttgtggtggatatattgatttagtttcttcgtaatggcattggaattttcgactttagttttagggttcgtatctaatctcaaggctgactagataactgtggggaattctggattctagatttgttgcagttaaagtttcttaattggaaaatgaatcttgacttctgcaaggttgaaattttaggctttagtgttttcccaagtaatatagcatgagtgatgttgtgattaccgattcgtgtaaggctctaggtgaatgcttttgaatttaggaattaggaatcaagctttgttatatggctaagtgcattattggcttctggtttgatttctaaagttgtacactttcttaccaagttctttccgagtgactgaataacgtttcgattgggaattggggatgtcacttagtgaaattggggtcataagctagtgggctaggtcataacttaaacttatgctcaagagtgagccatcgttataccaattcgattctactaaatttacagtatagtaagctttttctaggttttatggtcgtttttgaagtatttttctctctgtgaggttagaatccaaacattgatgagcagttctaaattaaagctcttaggtggaggaagaacatgatggcatcagggggggaattgtttggaccttttgtcctgcactattagctgcaatagatttagagttagtgcattctgtgcttactgtcatgtttattgtaggttttttctatttctccctgttgctgtaattttccagagagtgtgagttttcattttggtcttgactagatgaactttgtgatgctcaggtagatagattgtttgtatgaagagatttagctagcttctgagtcctgaccagttttagcttgctacaagttaaaactgctgcatctgttttagtaattcaaatattcttgtttggtatcgccttgcattcactttacttactgcaaaaacgcggggaaatctctgtctccaaaaacccatttaaatggctagtattatttgagtttccatttatccagactgagtatgaaaatttatccttctttgcaggttttttgctcatctcgtctttctcttgtaacgtactgatgggggaaagactgcgcgtgacacatctctaccgacaaaaaatatctcccttgtttgattattcaataagatatctagtagctttatgaactacaaaacacttcattttccttcacaagaaacagattgttgttcagttgtattccctatctttatgatgaacccgtgatcgtgattgtttcaagtctgagtgatttagaaatggttaataatgtaatacaaagagagaaccagttagtagtagtctctgtgttcttggggaccctttcttctctccatcagtgactacctttcttctctgcatcagtgactaagaagaaggagaagaagcagaaacactatgtctccatcaatttgtgtttttatgaattttaccccaaactactgtttctttcaccttttgctcctgtctcttgcaaggacatgtcactatttctctctctcggcatgagccttttgcatttactgccgtacagaccgagaacgacggctcaggaatttgggtccaaaatgtgtctgtgtgtaagtgacatgcatacgtcatcatatgcacgtattccaacttttggtctaaactgggacacatgagcgtttcaattgcactctgtgttaccgttttgcactcattgtggttaccgttttgcactcattgtggttacagctaggttgtgtgaccaaacttaataagattctctagcgatcagagaatatggtccggtttgcagtggtaaaagataagcagggtttacttgaaattgattgtggttttaggacaaatcagtttgaaatcattcgtttgagcttctaaccgcttatttcaagtccaagtatccaattcaatattggtaaccgaattaaaggttcgtttttaaccgccatcactagtatgtgatctaccgctagtatgtaatgtatttgacctctatgaaattggaatcgttcatacttaacaaatttctaggaaaaaaggttaaaactattttcttgtatatgcttcaatcgtcttgaagattacataatccaacgcactaaaggctaataaatttttgaaactgaagtccaatcatcgttatctacttcagccgaccttaggtcccaactagagaaacttctcaatctctgattctctgatacacatacgcagaggtctacttatacacattgtatacaagcagctaataattagtcataaattgtgaaacgtttaaaagaaaagtaaaacagtttattataagatatatagtgaaatttggcagtatggcaagaattcactcattgatataaaaccccaatgtcattgttattgaattacaagaattcttatgaaatttaataattatatttttgttatatgaaattctgttattgtgatatcctgacagtgtatataaataatgcttaaaagaatgaactagatatctcactgccatgcaaattatatagtggtccaccatgaatctgtatataagcatattacatatctaagatgctttattttaacaaaaaaaaacatgtactctttaatttggtccatcctccatctaagaccaaccattttagctgtcaatctatttgcctactataatatgtacagtattatggagctcaattgggatcatctcacgaagaaaatcgaaaggaaacccctaatttttaaaagttttgggtcttaacatttactgatgcacatcacatactatatataatggaatttgccctataccaaatgtaatgtataagttggttctcagtaattttgaactattgtttcgaatgatatatagcaaaagatccatatgtagtgtgtaatgaaaatgtaattttcttacattagtattttctattgaatggagtcaaagatatcgttaagaatgatcgtatgcatcatcaagattcaggactagacattctaaagaatgatctctaagtaagtagatacatgtgtacacattttgattatgtatatgtgtatcagtgtatgtatatgtttttatttattatctactattagtatgggtgattaatgaaaatcatagcatctttctttccgtcagaaaacatgtggataagagtgtctatagtctacacactacacaaattgctctttatacctaactaaaaccctagggattggagcgtatatatatatagatatcatttcttgctcagcctcaaccatatgttatattatacacttttagttttagataacgagagagaataaattataactgttcatcatctcggttcttatcattttcctcaacctacgtgacaaagaactcactcgatctgtctaaacccaacgacttcgtcaagcttaccagtttttctgtgtaagattaatcatctttttttcttgcagtaatataatttgaaacctttgttttcctctttggatcctcagatcttcctattgattcaattgtaatctatttcgatttgagaatcactttcctttgatcttttttaagtatatatacacaaaatatctagtaaattaaattaatatgcagttcgagtaatatacgttttcttgatcttaataggtttttgttatttactctattgaagttgctttcatctaattaaagtgatcacgcttcccaaaaatccacaaacattccgaatttgaacactttgtgatgacaatattgattttgttcatctgttttttgttttttagatcgacagaggacatgggaataaaaaaagaagatcagaaaagttccttgtccttgttgacgcaacgatggaataatccgaggatcgtgcgagtctcccgagcatttggaggcaaagatagacacagcaaagtgtgcacagttcgtggtctccgagacaggaggataaggttgtcggtgatgacagcgatccaagtctacgaccttcaagaacgattagggctgagtcagcctagcaaagtcattgattggctcttagaagttgccaaaaacgacgtcgatttgcttcctcctttgcaattcccacctggttttcaccaacttaaccctaatctcaccggccttggagaatcttttcccggggtcttcgatcttggaagaacacagagagaagctttggatcttgagaaaaggaaatgggttaatcttgatcatgtgtttgatcacatcgatcatcacaaccatttctcgaattcaatccagagcaacaagctttatttccctacaattacttcgtctagcagctcttatcactacaaccttggacatctccaacagtcactactagaccaatctggtaacgtcactgtcgcattttctaataactataataataataatctcaatcctccggcggcggaaactatgagttctctattcccaacaaggtacccttcgtttctcggtggtggtcaacttcaactctttagtagcacaagctcacaaccagaccatatcgagtagttccagctgcagattatttttagacgatctttaacaagttgaagaattcaagtcatgtgacatgtaaggcatttactatatgtacatagagagagggagatttatatggtttaatggttattgttggattgattaatcgtcacatgcgtgtatttatagtagacagtcttattaaagattatataatagacgccaaatctgatgcgagcaaaggtacatattcataattcatgttgtgattgagttggtagaatatctaattcattgtaccgctacaatcaatataaataatatctctcatacaaacttttcacatttgtatgtaaagtttgtagtgcctaaatatgctataacacaggcctcattgcacgccaaaccctagcttgtactcatatgtccacaaccacatgcatgtgtagtatacaaggaacacaacacatatgatatcatctacaaatagaaataaacacactcatacacacaatgacacaaatatacgttgtatgtatatattttgggcttaacatgtaaactaatcgaaccgaatatttattttcttacatttccgaaaccaaatatgccgcaaaagcattattgaacctattggaaggatttacgacaactaaaacgttttatcctgaatattcatatataggtatatgatttgttgtagcagctttccggtaattggattaatgtaaagtgagtagaatcatatactccaaccaacaactagctatatagagatagatttaggtgatgagtattgccttattgggattggcgaatgagagaaggaaaatgagaagaagatgaggcagttaagacagcaactgaatctgcagtcaagtcaagcactgatccctatatatcttcttttaattattcttctttttttcttttctcttttgtcgatcctcttttcactttctattaattctctttccctcacacataatataccatggtaaattcgaaaacacataaactttatctttggattcttctttgtatgcgttttaaaatctactccaaacaattaagatgatggctagttactgaaggtttgatactgcgtaccttgttttcgtaggcatgcgcttgaccgaccacaataccttttttatttttcgtaaaatctttgaattgtatgagaaatttatatcaaattggatataaaatggtccacatgactacaaaatttgcttccatcaacggcatggttcaaatttaggtgaggaacaaaataatatagagacaaaaagggattcacacgttgtttcattttcacacaagtcactcacttacttatacatatataggcatgcgcaaatccttcttctttttctcccttttcccccacctatcttccctttcttgttgctactactttttcttatttcacatcatttatatatacatcagtataaaaccattgttctattttacaaataacgaatttcaactctggacgtttaacttttttcatatattttgtagatgaagaactaaaagaggtgtagaaattcactcacttacttggttaagtggcctcggaagacgtagaattactgcgatcaaatactgtctcttataatattactatatatacgctttataagaaaatatatttttatttttttactatgcagctcagtctatccaattgatgcgattattacgcacactacatggggctcctactaaaaggatttgcctatttgggcgagtctaaaggatcaattgtatttcatcataaacaaatggaaacaaatatgatatgccgaatcttctaaccttagaaattggctccatgacattaaaaataaccaaaaatatgttcttccgtagatcaccaaattttttttgggtggtatatggaaaactgtcaacattaattctattctgatttctgatttatgttgtatttttttttttatatataaaataaaacagttttctggtacattacaaatgttataataatgatcaaatccatacaattaaataggaagattatcattcatgtttttaatctttaaatcacaattattgtccattaatcctgaccatatttattagggactagtttttatcactttaatgtattttggtaagagatcctacaaaatttaaaagcatatcggacgtaaatgtttcatgcctggatgtaacacgtgtaaataaaaaagacaactgatattttaaaaaatggaggtgcggggaatcgaaccccgtgcctctcgcatgcgaagcgagcgctctaccatatgagctacaccccctttttgttgatatcagtcactgacaattcattcttaaataaactatccgagaatatccgccgttgcatcacacgggtccgtccacacgcatataaatgtctgatattccgaaatcgactgctcacattccttaggtgtatcggcgtcagtgcacatgagtcgcacatgatgatattcctcacgtgatatgaaatgacttaattacccttttcttttttttcctaatatattaccggccgcgaaaggaaagttgtctttagctggacaaggacggcttgtcggaaaattccttgttttacactaccaaaccgaaccgttcaagatttggtttcggtttacaggtattaactgttgttcgattctcggttaagttaggttttcgaacaataaaccgatcggtttggacattaaaatccctagattgattactcaatttcttcttctctcctctcattattttgcttgagccacagatccgtttctcctctcgatttgtcttcttcactcagtttctcgcttgttctgtcaaagatcgaaactttccggcgtctattgtcttcgcactattgcactcgtcttcttcttcgttcttggtgtgaaccgaaactaaattctatctttttgctctacacgatgaacgatcttctgaaggtgagagttatttcttctttagctccttgtagaatattagggttttgttgagtttgaattgcgttgatcatctaatgtggatgctgatttccaaaattgagactttttttttaaaacatcttcttttggttttcgtcttacattactgatataattcaatcatgaatgccgaccactgttgataatactatctgtttattggatcttacatttatctataagggtttattatgtcaatcgattgttgtgttaattttgatggcttttgtttatagggttcgtttgagcttcccagaggtcaatcttctagagaaggagatgttgaactaggggaacaacaaggtggagatcaaggattggaagattttttcaaaaaggtaatctaaaaagaaagagtgtatctaattttccttaccaatcggtgtacctaagtgtttcctctttgtcttgctaggttcaagtgattgacaaacagtatgataagctagacaagcttctaaagaaactgcaggtacaaaccaatgactttcttaccttacgctacaattttcttcatgaaacgcagtgttatatatagtatgaatgcatcaaaagaagagtaagaactttcattgcatattgtctacgatgattgttggaattcctttaaagatttatgattctgtggcttctcagttgccctgtgtttttatgctaaatcacatgtttcagttgtgactattcaattttactgaagtggttgttgttgtaaaccctataggcttcccatgaggagtcaaaatctgtgaccaaagctcctgccatgaagggtaatttttttttattttctacatgtttttgtatgcatatttttccggaactagtacaagctagtgaaagtaattaggaatttgttgactagcgttaggattaatgttagtgatttactataatcttacatatggtttggtgtgttgtgtgtttctccttatgtattggacagcgataaagaagacaatggaaaaagacgttgatgaagttggaagtattgcccgtttcataaaggggaaactcgaggagttggacagagaggtaggatcactggctcttttatcctttagttagacagttgattgaatatatatgtttctttttgtatgactctcattcaaatgttgtagaacttggcaaatagacaaaaacctggatgtgcaaaaggatctggtgtggatcgatcaagaacagcaacaacactgtgagcattcttatttttcaataagataatttattctgacacctttgtttttagggtagggttcagctgttgttaattcaaatgctgtagaacttggtaaacagataatgtatatataaatattctttggtatgacctttatgagctttcattctgtgcaacagttccttaaagaagaagttgaaagacaagatggccgagtttcaggtaggaaggaatgattaactattcaaaagtttatggaaactgttattctaaactaagattgcgacttgttctaggttctacgagagaacattcaacaagagtatcgcgatgttgttgataggcgagtttatacaggtatgtatgttgatgttatggtattgctttattcattgccttctaccgtaacaatagtaccgtttcttctcgcttattattttgtgtgttttccttgaattagtaactggggagcgggcggatgaagatgtaagtaaagtagtctctgagtgttgttatgctctcagaagtttgaataaaactcatgcttgaccatttcttgtttttcagactattgatgaattgattgaaactggaaacagcgaacagatcttccagaaagcgattcaggagcaaggaagaggacaggttcgagctattccgtttaattgtgaagcaaaatgctttggacatgttgacattttattatgtgtcaagaaataatacaacattaaatcttgcaaaaatgttgaatgttcctcccaggtaatggacaccttggcggaaatccaagaacgtcatgatgctgtcagagacttggaaaagaaacttcttgacttacaacaagtatgttggatttcatatttccttatgaacatctttgaaccagagtttgatgcaatctgttaatcaaacatttttttcttcgtctgttaagtcgttgtatgaattcattcgcctaaagacagatctaagaggttccccttttcttgcagatattcttggatatggcagttttggttgatgcacaaggagaaatgcttgacaatatagaatctcaggtaatttggtactttttctacaatagagtcgttacctttcaaaaactaagtagtctaaagatcaaggcactgtaatagtacatactgatgggatttgtggcaaatataggtgtcaagtgcagtagatcacgtgcaatcgggaaacacggcacttcaaagagcaaagagcttgcagaagaactcaagaaaatggatgtgtattgcaattatcatcctcctcattgtggttgcagtgatcgttgttggtgttctcaagccttggaaaaacaagagtgcttgaggaaagaaagaatgtacaaaagaatatcaaatccttattcacggctttgagtgagagtgttttgtttatgatgtgtgtttttttttttaccaagaaacgaaaaaaaaaagaaacaaaattctacattcttttaattggatcaaacaaaccaatttccccttatgattgtgcaatttcacgtggattaaaggaggtacttctaattatttcaatttctatgttttgtgtttgcgttatttacaagacatgaaaatataaaaatgttttgtactgggtaattttgtcaattgcaaatatcaaacgtaagagaagaatgttttcgtttgcgtttaggaaaaaaactaactattatcaaaagcttagaacatgcatgtaaaagatgataagaaaaagtcataatatattctatatcttgtaagttgtaacagactacaaaacaagtgtttatcctcaacctaattaacttttatttcgccttttttattattgaaacaattaggttaaaaacctaaaacctcagccgccgaaaatgaatacataatttatatatatatactgagctagggataaaagaatgaaagaaaactagagacaaaagttaaccatgagcggtaaaggcttcgaagaagacaaccaaacacttgaaatcttgaggctcgcgttggggtggaccaagagtgaaatctacgtgttaacgatgcactggctcattgtcggcgtcgagatgtacttgttctggcctttatatccaaatttcccacacgtttggggagatagtgttatgggaatggtgatgattcaatacgttactggcgtgataagctatgcttcgatgtcgcatcctttaacagccctgttaggacgcgttagccatctaagtggtaatgttgccattgccatgcttttgttccataccgtttctcaccacatcgttctatggattgcaataccttcttctttatggctcggttccgttttgctctttactttggttgattcattctgtatcataaactcatccccacctgaacaatatcagcttttatgttagggtttttattttgattatcttgagaactttttctcatatagctactagatacgtttatctctactctatctatattacttcctctgtcgcgtacatcctcttcctgatcgtcgctgaagtcgaagacaacgtgtcggtcgattggattagtcatatgcttggattgttggctctagcattcctcgtagcaattgtgtccgtggaattcgcaattggatttggttcttttaccagtcttgtttgtttctggtatatcgtgaaacacttcaaggaaaaggaaaccctagatccgtcgttagccccaatttcaagcagctcagagaagttaaatcttgttatcttgatggctcttggaggagccattgtgtttgtccagattggattagctatgggacttgagcaaactaaactttccccgatttattttggattctcgtttgcttcctatgttttcttccgattcattgaagtgttggaagggaacatcaccgtcaaatcaatctctgctcatatcagccgttgtgcaggaatactcagtctttgtttcttcgtcggattgatttctcaagagtttgctataggtatcttcgtctctacccttgtgttactcttgctctacctttgcaagagttggtgcaagagttggttgaccaatccaactgcccaagacttggccgacgaagttcagacgcttctccaattcgaagatatccctcattccagcggtggtgaaatcgtataaatagtttttgttgggtcaaaacatttaagtccttttttttttgctattatgttggataaaggccatattatagtctacgggccggtgaaaatgaaagcccaaatagaaccattaaacaaacagtgattgttactttgcttgtttttttctaacaatttttgatccgaaaacccatcattccaaaccgaacaatcctagaccgaaatcatcaaaccaaatccgaagaactaaaatactgcaagactgagtcatataaggttacaacttacaaactgaaactaaagaagaagattaaacagagttgcttaataatagacaaagccattccttcgtctagtgatttcaattgtttggccagattgcgatctcagagtaaccatcttcgctagcacaagccctgaacattccggtagtgttaaacggcattgtgacttcaccattggcagagacagcaacgagtccacagcttcctctgggaacagattggtcaacaacataagccgctgcctcagtcaaagacaagcctttatattccatgagtgcagccacgtctctagccacggttccacggatgatatcctctcctttacctgtggctgagatggcacaaaggtggttagcgtaagttcctgcgccaatgactggcgtatccccaattctgccaaccattttgttgacataaccgcccgttgatgtagccgaagctagatttccagcactgtccacagctacacatccgaccgttcctatttggctgtcaccgcaattgtccggtactttcggactagggactgtgtaatccaactgtaatcaaggaatttaaagatcgttaagaagcacaaggcaaggggaggattatatcatcatttgatgaacacaaacctcgagaaaaaacatagtacctggactcgattgaattctttggcctgctttagccttgcaatgttttcaggagttatgaaatggctagaatctaccgtctcaacaccctataaaaccggaatccatggaaagatctacaatgagcagagtttaataatcaatacaagtcaccaaaagaagagagtagaatacactgacatgtgctcttgcaaaagcttcagcagcatcgaatgcaagatatatatgaggagttttctccatgacgaggcgagctaaagaaatgggattaacaacagtggtcaagccggagacagctccacatcttttggttttaccgtccataatggaagcttccatttcaacagtgccttgtgcagttaagacagatcctttacccgcattgaagtccgggtggttctcaagttcacgaaccttacaaatggtgatcgtatcaaatttgggactagttaactgatcactagagagagtgagttttaaaaataaatctaaaattggttccgaattctctgtttcgtcatcgattattccaaactctagacaaaattatcaaaacgcatggatccgaccagctgccatatgccaaagaaaaaaaaacaattatcgagaaagagaggcgtacgacaagttcggcgacgtccaagggaggcttgccggatttgagggcggagatgccaagatcgaggcagtgacggagggcgctctcacgagggatacgtcgctcgtcggggagatcgatcggaatgtctccggcaccgccgtgtagcgcaatcgcccaccccaccatcttccgccgtataacttaaagacacgttggctcacttttcccagactattttaaagccttttagttacagatcttttcagattcaaactttatattattattgaattacaagttttttttttttttttgtgtgtgtcaattacaagatttttattagtaacaaaaatgtgttgttaactagtcagtcaatcaaatctattttaaccttttgaatgaattagatttacaaaaaatgaaaaaaattgtaatcttgagatgtctgatgattcaatcttccttcgcgtccaaaacgccctaaacgcaatattagataacaatgatcaggctttatagccaatctctttttaaaagtttttgtagtaatatagaaaaaaagtaagaaatcatttagtattttttttggttacctgcatgatcatgatggctgctttcttatgtaggagttcattgtaccctcggcaaccaaaagtctgagcgcacttggggcaaccagtttcaggtgggcatttttcgcaagaccttaagagatcacgagcatcttttagaagctcaaagaagagcggacagatctgcagaacaaaatgttcaagaattagtcatcatattcaacaattgaaacttgagaatttactttcacagttttacttccacttaccttggcggatatgccagttcctccaggatgacgatcatatactaagattcttgctgggaaataccgttgctcttgcggatttggacattctggagctatgtctgaatagttgcatgtcactcttgttggaacaacgttgacaagggcgtgacaagctgcgtgtaaaccagcacggaatggcaagtttgccgtctccactgctagttttaccgacatcggcacttgaatccaaacagcctattatccacaataaaaccagacttaaaattacagcggaaacagaaaagactgtatgtgtgttgtgtgaggctgctgcatgtttaagaataacctgtgattggtaagtgtaacttgggagtgaaagctcaacatcatcaattacttcattgtttcttcttcggatacgaagaaatccaaaccactttgttgtcactctacatgcatgagtttgtggtgttggcttctttggagccttgaccgggtaagcctgaaacatgaacttggtaatgaattttacacaaagatgcacaactatcaaacaagagagccacagttatacttacagtgtcaccaccagttactttgatatcagtgtaatcccgagtcctggtgtagtaatccacgtttactagttcacacagagctaccttttcttttatatccagactcgtgaccaggtagttccttccttggttcatataaatagctccttcatatacgtggaaaaacgctttgctttcctcgatttcatcgagaacatctttactttttttttccatgactctgtatcttactgtctctatggcccgtatagagactatcctcgcaggatttttctgagaaaatgttgaccagcaaaggtatttagagcaaggaaactcggtttcgggttgtatttttcaaagtaactgctcggatatatacctctcgaccaatatagttccatattctagaagaagaatcacgggatggatcaaaactcaagaatcctttgttcctgagctcagcaagagggtcgcttaagccagaaccaaagtgctgttgatcatattgtaagctcaacggatgctcaagagcagcacaagccaaatgttgcataaggacctacaagaagaaaaagtatcaaagcaagttggtataatctcagctagagtattaagtattaacagttggcacaagaacccaaacagtatatactactaacatgcttattttgagaatcaatatggcaacactcaattgggctaccaaagagtttgtccggaaagctcatgtagtattggtcaagcgggccgagaaaggcaacatatacagcaagagagggcttttgtcgccttccagaccgaccggcttgctgccaaagactgaaactcaaaattgatcagtcattgtcagcggcagcttatagaatttcagttctaagagggaaaagaaaagagtaaatcacactcatttacctggcaatactcccgggaaaacctaaatgaagagttacatcgatgtgaccaacatcaatccccaactcaagtgcgtttgttgcagcaatgccacaaagctttccaccaaataaatcactctctattttcctccggtcctgcaaaatattaaaaataccaatctagtaaatacaattcatctacaaacaacaccaaagttcagacacataaatacagaaaatgtacctcagcaatgtagcctccacgatatgaggttatggcttcaaccagatgaggggcagtctcagctagaatttcacgtctgcggcatattttatggatcttaaactccataaacattatttaatcatacactcttgcgtgatttttttgtttctatcaacgattaacaagagaacttacgtcaaacacagaacaagttcacagagtttgcgagatggacaaaaagcaatacaacgtaatccatgctgaaccatctctgcgaaaaggtgtgaaacttcagaagctgggctgtaaagaaatgaaatgatatttaatgttagctaaagattgatgaaaataaattttgatttcttgtaaggcaaataactaaattaccctgatagtgtatcgacagcagctccagatggtttatctgcagcagcttcactactactcacgacttttgaacttttttcagatttctgtaatacaacagttgaaacaaggagtaaataaagattccaaattggttcaaaaataaatctaggaaactgaaccatacacttgttggaggagctgatggattccacaagacaaaaagcttttcagaggaaggacttccatctattgttaccagctcgagctcagataggtttgcaagctcctacaccaacagcaaatcatgttttgatccagtatgatagaattggataagataatattttatcaagataatcggtaacgtaagcctaccatgcaatgttctcgaggattagcagaagttgcagtgcaaaatatgaaagaaggattgacaccatatactgaaaagtaagatatgttcggttattcaaagtataaatggacgaaattcataatgaatactactggtttgaccatgggatcagtactgcaccatgagagcacaggcggcgaagtcttctcaatataagggccatgtggcagccaaatggtcctttgtaaatatgggcttcatcaatcacaatgtacctgcaatttttaacttagactccacttaattcatgaattataaggtggccttgttcctctttaaaaaccaattcatgtcttgcaatgattctagtgatattagtcaatcttaaaatgagaggagaaagatgtgttacctaaggttagataaaatccggctgaattgttctttatggcgacgcaaaattgatatatgtaacatatcaggatttgtgatcagctacatgcataaattccaataatgttagtaagagaaatacgtattcgggaattcagatgagactgagggaatgaattactattctattggggtgaaaaggacagtaagaaattaccagtctagcattactcctcagccttgttctatccttgtaaggagtatcaccatcgtatacacccatgtttatgcttgcttcgaatccttttatcaaatcagacaatgctcttaattgatcctgagctaaggcctattcaaacaaacagcaaatctcttttagttatagcaattttaaaaagttttgagatctctgagtaaaaaaactcaaaagaaaaagagacaagctgagtaaccttggtcggaaataagtacaaggcacaagaatttgtatctttgcacaattcctcaaagactggcacgttatagcaaagagattttccactggaagtcatagttgcaaccgcaacattctttccagccaaggctgctgaaattgcttcagcctgatggctgtataatgtgttgagaccaattcgtttcaaggcagacttggtggtttccgagagcttatctgacatttcgacgtaggcagattttctggccttgataacttcaacgtgaactacctgtcctttagatccaataccattcctgagatgttcaaccatctccgatggtagcagtgaatttgtggcatgacacaaagtctggaatttacgagaaccagaggtaggacaagtgcctttcccagcctgtctagcttcgtttccaccatcagctcttccttcactggcaaatttaagcaagccctccaaggaaatagctattccactctcacctgtatttttgttcagtagcgatctgatggactcccagaaatcagacttaaaggaagcctcccgttttttcatggcactaaagagctttgcaagaggaatttttttacgacctgatttttcatccatctccagatagtcagctataactatagcgttctcatagttcacagcctcatagtcatcagtgataacctttactacctacaaacaaccattggcggttacatataaaaacttcttgtcacagaataagtaggtatacttaaaagatataggggaaaaaaaatcaccttggggcatataacagagagattcttaacgtcttgtatacgaacacgaactccagacatagctaaccgggaaagagattccttcaagcgggttaaatataacttttctccatgtgattgaagaacatatgaaaaaatattcaaaaacgcgaatgtctccatagacaatttcacccaatcaggacaagaacacaaagagctacttgaatcccatgacatcaagcattttgtagaacctggagatgtcaagcaattcctggactttaaaacctcagcaagcttctctgtgttctgacccttgaatgcatctttacactcagactccaaatcatcattaaagaatccatatggacacgcttcttcatcccgttttcgtttctcaccaacacaatgatcctcagctcttttagcgttttcatctttcatagttgaggttcttgaactcaaggaggaaggttttgataaatcaggttttggagtctgtcgaagttccttcttcttaaacggaaataaacccaagatatcaccgtcattaatagtaatcgcagccactctagtgtccaatttcaatttctcaccctacaaaaagagagaaattctaattttatccttgaagagctgatttagaaaacgaaacttgaaagcaatcgcgaacgagtgtagtagaataataagcattaccttgatatacagatggaaattggaagaagaggaagcgggagggaaacaggattttagggctttctttaggtcacgaattgtcccgtcagaggaaacctgaacggtcgtcgattcgccgttaatgcttcggacagagatcggaacactgtctcctccgccgctgcgtctctcgttctccattaccggattttactttttccttccattaacaaagaaagaactttttaatgtatatatagttttaaaactttgttgggctttgaactcgacttcgtatcgatgggctaatggcgcggaatttttgacacagccgaattcggcacgtgtgaaatattattattattttgtattttttcccacccgtgtgaactattattagattaagattatcactaaaaagaccttaccttattaaaaggaattcaatgtgagcccaaactatattttgttaactaattaagcccaaattcatcattccacgatttcaagttgaacaagtatggctgctttagattccaaagttgatagatttccttgttaagagtatatctaaagtaaactattgaacagatgcattatacaatctgattttatgttcccaataatgtagaagatcatatagatacatacatgctcaaatgaagaaacaaaaactcagagttgcgttcattggtttaggggaaaaccataactttatgtttctcacataagcttttcttctccaatttcttcatggtacaaatctacatactcctaaaacaacccaaggagagaaatatcctataaagaagtaagtacctgaagatgattaatatgtaaaggctagtgattgcaggtaagctcgagcttgagcagccatgaccagagattcttcatcttctcgttcctttgcggtattcactgctgctacataagctaatcttgcttcttccattttcctcaggtcagtttcatctacatcgtcctgtttttaacgcattttgcaacaagtttttagatattaaccaaaaaaaaaaaaaaggaaaaaggagagatgaggattgtggtttctttggcttactaaatatggaagatgatcaaattcatatgggactgcatcataatccctatcgggtttcttggaatcagtttttgccaaagtttcgaacacccgtgtgaatgtagagatgtctccttcaacagcatctagctgttcttgaagcttgattgctcttgttcctgttgtctttgcttcccattgagtcttctcaagggctgcttgcttgtcagcaagtttgatctagtgaagacagtgaaaggaagcaattaaaatgtgaggtacgtgtagaagcaaactgaatattctccattttgtttaaaaccagattcaaagtaaacacaaaggagaaatctggagacacataagaggaaaaaggtttacctttgtgtccgataattgtaactgcatagacttgatcaacatatccttctcagcaaccaatcgatttgttgcttcaagcttttcttgtatctcgtttacctgattctttgacatctccattgactttaaaacctcttctttctccgataattttgtctgcaagtcattcacttgctctcttagtctactcatttcttccttttctgcaccagccaaagcctttgcgttttcatcatcttccctagaattgttcataacatcgtcatttccctcttggtctctcttctttcttcctgggactgtttgagaagcatttcttccctttggatcaaatacatgcaaatacaagtgaataaagttatacagccgagcattagagaaacagattcatttgagaaatgatgcaaacatttggcgagggaaatcaaatcccccgaaccacccactgaagtttttaaaccaagttatgaagacaccagtactccagaaacagattccatcattacaacaacaacatttactgcatataataattgaaaaacatctataatcccttctaaatatacaatttttgattaagccataacgccaagctgatatcagctcataccccaaaaggaaaagatcacaaactcaagccattatctaagcaagttagcaaactaccagtgttaaccaagtcgaaacttattgatacctatgcaaccaagctacagtgtatgaataatgttaaaattgccataaagagatgaagaagacaagaagattgacatcttacccttcgggacaaggattcttttgaaggcatcttagtgtagatcatggaaccacgccgcttaaacgaactcctttctttatgttcctatatatcgtttcagtgagagaagagagtcaataaatttcgagctaaatatgaaatctacagtctttatctttcagaaatttcaaattttaatgtccaaatcaatctgtcaaaaaagtttcaaaattgctgcaaatttctcaaaattaagaaaccaattccgtcgaatctatcccagaatctgcaatcccctcgaaacccaaacattattgagctctgataactcgacaaaaacggccaagagagttagaaaggatttaccatgtaatgctcgataaggggaaccatctcgacgagatcttttaagagacgacgatctagattctcattgccggagttcgtaccggcggcagattggtgaggagagagacgaagatcgtcatcgccggcgagccaggagctatcgtccccaaacccagaatcgctttgcaaatccatgaaatgttgctgctgctcatacatcttcttcgtcctccgtataatagatctgcttcagtgattagtcttcaacaccagagagtctgagcagagagagagatagacgaagagaaagacttgatttttattttctttaaaaaaattcgtttcattcttcgttccgagtctgagctttggatctcaatctccaacgttcatctgaaactatccaacttataattaccattttaccctcatgtttttcactattctcttgacttgcccttgctttttgaatttctttccttcttctatgatcccttaaatttaacattatgctttgtttaaaatttggaaattgagattttccattttacaatttttcaattatatgcttttccaatacgggttattctgatcgaaaacgttattgggtcgtgtctttcaatcttgtccggtcttgagccgttttggttcccgattcgagaaaaccggttcacgaacttcatgaatctatatatctatatatacatttttggaggggatttttgaagataatgttgaagatttgagccataattcaacaattaattcaaatgggtgaattttacccggtttaactctgttcggatcctggataacatgtttaattctgttctgatctggataacattaatttttggaaaagttatctaaaaactaataattaaaaacgaaaattaatgatttaattaccaaatttaatataaataatatctctaaactaaccatatttcttatttaccttaactaatttcctaaaatatttctacctaatttaaacataaatatataattcttctttcaattttatttgatcttatactttatttattttgaatttatataaaatatatatagttaataaaatattatatttttttctgaatatgatgtaattcaaattttttaaaacggacatatattattcaacctatgaagaaataatatgtgtacaatgtcccacatcgcttagaaaaattggacaatggttcagacccatattataaaaggaccaaaataattctgattacgaatgagcaggaaccttgatttatcaggcgtccaaaattaaaatagttatccgattttactcgcattttttattttaaagaattgaaactttaaaatgtttcaagaaattataaatattataactttatcaaaagttaaatattataattttaaaaactttttataaagtatatctttaaaaaatgctttaaatatttataattttaaaacttataaagttttaaaaattataaattgaattttacaagaaatttaaacattataaatatataaaaaatatattaatacgagacgatatattacaggaaaaatcttaaatataacaatcaaaattcaatgatgaattttgggtcgatattgtattttttttaagtttcaaattttataatattgaaatttataagaaaatgacaaaattatgtttaatttcacgggactgggttatatggtaggacgggtttgggtggataataattacgattttagaatgtcccatatcgcttaaaaaaattggacaatggtcaagagccatactataaaaaggaccaaaatgatttcgattacgaatgagcatgaaacttgatttatgaggtgtccaaaattaaaatggtttgtttactagggttatttattttaaaaaattgaaactttaaaaagtttaaaaaattataaattaaatattacaagaaatttaaacaatataaaaaatattaatacgggacgatatactgcgagagaaatcttagatataacactcaaaattcaatgatgaagtttgggtcaatattaatcttttttgaagtttctaattttataaatatttgaaatttataataaaatgacaaatttgtgtttaatttcacgggacgaggttatatggtgtgacgggtttgagtggataataacatgggatagtatgctatggaaaaaaacatataataacaatcataatataattatataatcttaaacactaaacaaaattaacaatattaaaaaaaaaaaacttaaaactttaatttttttaaaacacattttgattcttttataagaaatttaaacattataaatatttaaactttatactacgggtgaaattttataattgactgtttgggttgataagaatttacaatagaactaggagttaaatcctagaatgacaatcaaaatataattatacaattaaatactaccacgagtgaaatcctataattgacgagtttgaatcgatattaatatgggatggtgtactacgggtgatattttagaattgattggtttgggttgataataatttacgatagaattaggagtgaaatctgataatgacaattaaaatataattatacaattaaatactaccacgggtgaaatcctagaattgacgggtttgattcgatattaatatgggatggtgtactacgggtgatattttagaattgactggtttgggttgataataatttgcgatagaattaggagtgaaatcctacgatgacaattaaaatataattatacaattaaatactaccacgggtgaaatcctagaattgacgggtttgattcgatattaatatgggatggtgtactacgggtgaaatctgagaaacaacaatcaatatacaattatacaatattaaacatttaacaaaataaacaaatataatttaaaactttaaaatttgagttataaaatttcgtctcgcggtgaattatacatttaaatcaaacaataacataaatttattaaatcatcctaaaaattattcaattattttttatttaataaaaatataggtccgcggtatactgcagattaatatctagtataataaacaacattccaaactaaaaaaatactacaatcacgaccaaagtttgctctaattccagtcaaagtttcaaaccctaactgtaaaagctctagttcgagaaagatcataattgataaagacaacgacggcgacgaaactccacggtaaaagatgctaccaccgcgtctctgaagaagaaactcctgagttttggaggcgacgacgaggagggagaagacgaagcttcccgtgtcaaatcctcttcgtgtccgaggaaatacaggcggtttgttgtttatggatataaattatggttaaaagaacgtaattgatgtttgttgttttatcccattatatatgggatctcgtttacttcaatagtttggaaaatcaagtattgaagttgaatatatagaagatatgattttcatcattttaaataaaagtaattaaatgctagttgatatatttttcaatggcatatcttataataccccacataacatttgattattttgctaacaacattgcataaataatagtacaagatagctcttgttgctaaagtacacttgatttaatctttttgccgtgctccagactttgtcctagagagttgggtcatacaggcttttgattggcattataattaagtgtgtttctctttttctttttcaaaatcgttcatgcgctttggtttagtcaaatacataaaagatatctagtattacattgaaaaccatagaacaaagtaagaggaagaaacaaatataaaaagtgtgagatgatcaagtatataagagagtgaaaaatgttttcacttaacactggacgcttccagaaaactttgaaagccttccttaacgatatattcctcaaaagagtatgttctaaaatgcggttagcataaccgggtcgccctagtcttcttaggtctcatacgattatggacccacgagatatatataacaggatttcggatgtacaaaagaaaaaaatcaaagatataactataataataaattataatccctttttgagataaaatgatttaaagaaaaaaacagaggaatcaattttggtgtttaacttttaccggattgtgtgtttgggttttgtttttataacttctactgtcccgtcttgagccgttttggtttccgagtttgcttgacattgtcgtttctggttcgagaaaccggttcacgaacttcatgatcctatcgagatgtgaacaaaactataaactatcaagatccaactcatgaaaatgtgtttgaattgaatcaaacgtaagtaaagaaaaagataccttgaaggaagaagacgaggattgtttagcgagctcgatttcaacggagatgcttgctttcgttaagtccactcctgaattctccaatgcttctctcagtgttttcactaatctgctccacacacaaaagtaaatgtataaaaggttaataattttttacttttacttaactgttgcaagatcaaaattcaaaagagagttttttagttttacccttgtgagtaaacacttgaaattctgatgttaccctcaagaacttcctcatcttcttcttctttttgactccgggaactcggacttggctctacagcctctgatgatgcgactcttgcgtggaactggggtacgggattacccgcaatcacaggagagaaaaaactgttgctttgaatcgacaatggaaatggagaggtcgtcgcggttgttggatgatcaataacaacaccttgtgcagttgcaaggaccgaaaccggaatgttgtttttctcttcttccaattttggagcaaaagcaactccttcaggtactagctgttggttgttgttactctgctataatgtaaatggatcacacgggttaacattacatggtttgtttgttttcagtttccaacccggggaataaaaatgaagtatggtcggaaaatgtgagattatatttacccaattcaatagcttcgcaggttcgtgattccatccttggtaagaggtcacatacttgtctgctttctcttgtaagaattgaatatactcgataacctgtatgaagttgtcaaaaaaaaaaattggagattaggagcagatgtgattgaatcttactgtcacaaaattttcggccaaaagagtatagttatacctctagtaagaaggaggccttatcccgcttttggtcgctgttaggtattagttgtctcaacatctgaaatctgcagagggatccattaacaatgtttgattagtatctccactctgctaagctatataaccaattctggtggcttttgctacatattcaggacttacctatcattgatcttgctccttctccgttgctctgtagcagaatgtttagacctaggtgtgttcagcttttgatcgttaggagagcctctcacatctgcttttaccctcaaatccactgtaaagaagcaatcaatcagatcctaagctgttactgtttagactttagatatcatataggtggaatctcggacaatacaaacctctatggctctggctagtcgaggagctttctttcttcatgataaaatcttcttcatcatctaaatcatcttcctgtgaacttccttttgctgaccttatcatgtccatgaagctctggctcttaagcacagaccctctgcaaccaaagtaaaactttagttgatcactctttaaagtccatagaccgagttatataaaaaagagaagatatgagactaactgagaggaagagagagaactgaaaccgctcatatggttgtttgtcaaagactgggaccgtctctccgccactggccattgtcccacagttgctgcaacatcagctacacattcaaaaaaacttatatttcatcattccattgatttctaaatactactttaaaactagtctaaataaacatcacgattcaagttttcttgttacctctcatgtttactctctccccaacactattctccttccttgtctgtcccttcttcccagaagcagattcatcccacagagtgaacccgcttgatgcagcggcgtacgagctgcaattagagttagaattctcatccaaaacgtttctctcattagcattgaacatcattggtggtgacaactccggcttaggaattctctgatgatgatgatggaagtaaggaatggggctaatcgtataagtccctataccaccgggaagcacgtgctgcaacggtggaggtggagcagggggcggtggcttctcggacgctgtagtggtagagttaatcctacttacgtcttctttagcaccaacacattctaacggttgaagaaaatcatgggttttcaagtgactacctgcttcacgtaccatcaaaattaaaaacataaactatatgttagagaagtaaatccctagataatacacattttcttatacatcaagttgtatgcatttaaacgcttatagtaattaacaacattttgttatttatgtgatgcaattctagggatcaacatcatgagggttgaaagatatttatttaatcgaaggcaaggtttaacgacatgtgtagacgaaaaagaaagaaaaaaacggtcccaaaattccatgggctttaaacacagatgggcccattaggacccaacaaaatagcaacattttgatccatgattcgtcttaaagtcagatcagatgcacgcgcgaaaaaaacgtgaccccttttaagagaatcttaaagaagaaaaaagggtaaaatggtaaaaaaaaataccttgagaagaaggtggtggtgttggctttggatctgggtggacggttgaatgactgcagagcgataaaaaatcatgtgttggttttctccctgtgcgaaattcttcttaatatatatatcaaaattcaaaaaaatacataaatttaaaattatgaatcttgtagaaactaaacactctgttttaaaataaaataaaggaattggtaacaataatatctgataatggtgtttaccttgggttttgaagggacgaggttgaggaagctccatgaacgacagagcttcgacggtttttgaattctttttaaattattctattactaatctgtgcgcgggaattatcgcaaaaattggctagcagctcagatctgcgacttgtagcagctgattcaagagatattgtggttttcgatggttgaagaagcggaattgagctctgaagttgctgaattatgctttctctgtatctttttaccgataaaaatcctcgaatttggtcaaattctgctcgatttaacctaaatcagcctccgccgcaacttttctcagcgaattccacagaattcaaacgggagaatcggcagaagtcaccaaattcgtggaatcgatagatctgtcatcagaattgggtagaaattcaagagaataaccataattcagcggaattcatagctcaaaccaactcaatttcgcataattcaagtcaaccaatgaacatggagatacaaaaactagaatccaagtcaaatctctaaagaacacgaatggattagatttgagctaagaagcgtaccttcttcgacagcaaattacgtgaagcttttggcgtgtcaaggtactgttgaaattacgccgactactatcatgcgtcgaagtaaatgcaatcaaaaggaaatcagttaactaattaaaatggtaagatatgtatgattaattaagaatctcatgtatctgatattcaagtcatcgtacattcttctatagcctaataccaccaaacctaaatgaacagtgcgaaaaggaaaaataaaataaagaagattttgtgtctccgtttagaaaatcatgcttataaaaacctccatgtaaataatgtaatcagaccactgtattacgtggtctatgttcgtgtgtactgaatgcgcataactagacgacttgtttaattggtaaattggaaggtaattggtaagtttgacaaagatacgtactactaattgatagctaggcttggctgcaaacaattaccaatttaatagtaaatttagtagtagaaattctgctatagatgatggaatatagggggacaagtatgattttgttcgtacgtgtatgcgtctatgtatttgtgtgagtggagatatatgtaatgtatgtgacattaggtggaacaaagacagctcttccgcctttaacaaattgtctaaaacccatagttaagaacctgatcatgtgagctaagcgcatttttatatttagttgaatgccacttgttacaaaatcactaacttataagtaaaccaaatagacgacttacaaattacagtacttattttaaaagtcttgttagcatttactaaactaacatatgtctagtactgtatataatttgaattatatattcgaaaaaagtcatctcttaaaaccaaaaataaaatgataaaatatctttagtccatttgtattcaagcgaaaatagttatggctttcaagtttttgcaagtacgtatatacttgattaaattacttaagattttcagtagttaagaattaaatttacttacgagtaatatttattgccctcccctaatgcttacaatctagttagtttctgagtactacatctttccagtagtcatgagtttaatctgaagatagaaataataaattgaaaacagagatggagatgatagtgagaaaggaactatagctaaatagtgttggatcacatgaagtgaaaaattgtacaaaatagggaaagagcaaaaacaattacacatccccacatgccttccactttgtctcgtgagttgttaggttgtgcttaaacacgctttattctctgtattttatattaaccccatgaattgtattatattgatttaaaatcactcgcaatctcgtggttctttgatgaaatgtattattgttattcgagattcggtttctctagagcacaagtaattggttagatacattaaaatcaaaaacaaaaaagcaaatggaattgttaagatttttacacgtttagatgagaagaaagaaagaaatcaaggaaagtaaataaaaacgaaatggtcaattcaagtgaaaggcgaataagaggttagtgtgacgtcgttttcatgatgtagtgggaccacgtgaactgactctgcaactcacgtgagagaaacactgtagaaacataaatagattttcgaaaacattaacatcaagggcaatttagtaacaatacttcttgactagaaacttggaaggctaagggttttagtcgatcgaagaaagaaggtttccattcagtctcataaactgtttattgatatgccacaaaccgacctatccttaaccattcgtggttcggttgggcacatcatgttcttcccgtcttacgtaattcaatcaataaataatcattcaacttgagttagttaacaaaataagaagaagcatatcaagtaggtttcaacttcaaaagattaagatcaaaataacttatataatacaaaacatattttctttaatttcctacgcatattataaaacatatccatggaattaattagaataatgtataggagaaaatcattcgcggagtcacaagatttcttaaacatatttttacatatttaatccaatttgaagtaaatcaatgcgagatctcatcacaactactcaccaggttcatgcacacgctaacaactgttttaatatcaagatttgataatattttaagggtgaacaatattaaacatctctttgcatataagtatataactatatatcaatgacatttttttttttttggttttaatgttagatatcaatgctctctacgttgatttcttacagaattacagtttatcaaacattctcttttcagaagtttaattaaaaaaatataaacccttaatttatttattttgttgttaaagtgtttttaaataaaacattaattacagaaactttatgcatacacaaaagagtgtgtgggagagcatctcatctgaattagctgtcttctttacttcttttttccttataaagaggactattagttgtctctaatcattgttattttcttaatagtatagtaacagattaaataatcataaagcaattagaaaagaagaataagaagctggacttgaagaaaaacaaatgtatttgtaatgcggacattcctctgtacatttgcacaggaatcctcttagggatcagttaacaaatagtttatctatctagatatcatgtgacttagggttaaaacacgagattaaacaactaattatgatacattgaaattaaatatgaagtttttaaccaaggagaaggctacgtacgagactttggatctaagaggacacgtggcagttgcgccgcgtaaatcgcgccgtatcacgtgataacgaaaccttttggggtatttttggctgcctacctcacagcctcccccatccatcacgtggccaactcacacctctcgattattgcgggtcccacgtttcttttttacgctatcccgttttcactattttttattcaaaatataaattaatttgctaattatagatataaaagctatcttaaaacaaaagctgttaaaatgctttgttagcaaaggggaaaacaagaacaaaaactatgtactttgaaaataacggaccgtataattttgatatgaaaaaagagaaattctaaccattaaatgcactgaaccagatcactgatctatatattgttttttaactctttttttcaacgtgcaactaatttaattcttgtactggaaatgagttatgatgacaaacaaaacaaaacaaaaataaaataaaaaataatttctgaatgttgcagtttttatgtaccatctatgatctatgataaatatacaaaaaaaaaaaaagtgttcatgatgctggtttctggtgtaatctttttgtttctttgatcggaacacgaatctttgcaagattattgggataattaactaatataacttgcgtgagatatggcaaaaatcaaagatgattattgattagggtttggatatagcatcttccgatgacatgagttgaagatgatatatattttgaactagcttggttaagaggaaccacaatataatgttatatatgttcaccgtttaattagatctatagtcttatgtttataggaatataggatccacgactctaattttcacatgaggtaataatgaatttattggtttttactttttgagttagagctccattttattgagttttgaggtgaggtttaccattatgtgatatttgttgtaaacttttgatgatatcatatatgcttttttggttaatagacctttaacttagttcacaccgtaaaaacatgcatatatgttgctaaattcggctaaaaacaatattaatgtttccgaaagatgatatacaaaatgcgtgagaatcattttgtcacgaatttaatgtttgttctgttcaccgagtccaagcgttagatggttacgtgacaatatgatttcagatgacacactaatgcatgaaaaccacaagccactagagttcttcctatatttgatatccacttgatacataggaggcgttgatatctaaataatcaaatttgctcacaacaattgacatggattatttcgtaagaaaatagactgctagttaattaagccgttaccctttaaaaaaaaaagatactaaatattttatagactgtgtaacaatttttttttccgtagtttataactcactcgacatatttcaacatactgtatacttgttatcaaaaatatatttacacatagatgtttgcgtcacaaatctatagaatttgtttgacaaaaagcttattttaattactttttatacgagcatatgagatgtttgccacaaagattatcgttggtttacacacaatcgcacatcattggtcgtaaaattgtgtgctgtaatccaaataagactttgatattaattaagtgaaacaattctaaataaggatttcgaactgtcagaataaaactaggttatataggccgtaaaaaaaggaaagacaagaaggtgaaagtgagatttggagaagaggaggaggagcagagaaggatggtcacgtgggtgcccattccctgccgttaacaatttgccttccgtctcgcgtgcggtgggtcccatatcatctcctaacgagagagtcgccgcactgttggacactctttgacgccgtttaactccaaacgttgccgttaagtagagagtgagatttttatttggtacgggcaaatgggagaggaagagtagagacgtgaggggcacgtgccctgtaagagagagagagaagcggtggcgaccgatcgctttctcgtgatggtatcacgtgagggcaaatttattcatctttgggtcccacttttttttcactctgacaaataatatcagagattagaactcgaggtaaagtaaaacttgtgggccctctagctatgaatattttattttcttttttgtgaataaatagctgacacttatgaatccgacatccgtggtaatgcgctcatttaccactagaactaaggttgaagctgccaatttaaactaaatcgtggataattgtatacatagtagtaaaatgatgattttaaaaagtggattcgtactattttcaatattcatcaaatttacgtatactaaactatttttccttatcatattaaaactgttatgtttattaattaaccgatatgtttacatatgacatgtgttacttattaaaccacataatcaaaagctgtttttaattttacaatggtgtgataaaataattttttgactaaaatttaggtaattaatgtcattgtctcgttatatttctctatctctaatgacgttgtttaggaattttaatggtggatgaaaaaaagaagaagaagaagataagataaattatgttgggaatagaaggagagggcatgtggtgtcctttctcgagtgacctgtcggtttatgggtcattgataatacgtgaaagcgaaagctctggagagagaagagaagagactctctcatcatgtcaaaaataaaaataaaaagagaagatgtgttttcttttgttctgttcccacactagttttcgcttacgtggcctctctcacgtgcttggactctttgggcttctctattttaattattttttattcttactggatggcgatttcgattaagacgcggcccattctttattcgacaagtgtcccctctctatttatttatttctattttcttgccgagatacttttggaccaaccaaaaagaagaaaataatatattttttatacattttcttctttttggttggtccaaaagtatctcacaataaaaataaattcctttttctagtcaaataaattttaaaaacgttatgatatataaatgttgacaaattgaagtaaaccattataatttatgggccgcccatgggccgatatggtgtaaatgtgcatctaattccaccgtactgagaatacaaattggttttctttttttgttcatcatttcaaatagaactgaattcaagtcaatctcaaatttggtttgggtgctcaagagattctccgtgataacaggccaatatttcggcctggcccattcaagcgattctcgagccgagaatatgactgagggacaaaatcgtcattttaaggttactccacaaaaggagtaaatatcgtcaaaattgatggcggaaattttcatgtgtttagatcgaaagcgacgtcgtattataacaacacatgagatgtgagattgttagttaacgaagcagacctcgattcgatttctcacaattctcccccgataactgattactcttcttcttcttcctccgtcgttgtttcatgcgacgaatcggtttcagattcagtcgtggtatctctcgatcttctctatctttgtcatggatgatctgttacaccagcgagtcgagcagtctcaggtaactcctcctcatgacgattctaatatccatggtgattttgataacgaggctacggatgaatcgcgatccgaaacttgttctgttgtgatagagggaaactgcgacatggtgattgaattaggattggaatctggaagtgttatcgttgagaatttaggtgatagtgatattgatgttagcaatgattttgatgaacctgatgacgacgatttctttgtggggaggactgattttgggctcgagttccgcgatattgcatcttcggggaatgatatcaggttgattacggtggaatcgggttcagatgatgatgatggtgttgagaatgagagggaattatgggggattgatctgaatgaagaagatgtatatgtgaatgatgatgatgaatatgaagatgatgatgttagtgtgactatccctctttgttgggattcactccaattagaagatcgtgaggtaactgctgatgaatttgattgggaagaagttggtggtggtggtggtggcggcgtggatgatgagagagagatacgaagtggctttgcacaaattgatatgaatgacgaaagtttgatttctgcttcgccaattatctctttagagggtttagtgacaagggaaagagcagagggttcgggaaatctagggtgggaagttttactgaatcacactctagagatcaactttgatgtggataacagagagctgtacattggtggtgatcatgacgattatgttcaagactatgatatgttgtttgaacagtttgccgatgctgaggtatccgttattggtttacctccgacttccaaatcttttctcaacaatctcccagtggttctactagaaggtgagaacgatgatgatggtggtttggtttgtgcagtttgtaaagatgagatgaatatcggaaacaaagcggttcaactgccatgtaatcataagtaccatagcgaatgcattgtaccgtggctcaaagtaaggaacacatgtcctgtttgtcgttatgagttgcctacagatgatgcagagtatgagcagaggaagactcagagaacaacaaatacttttggcatggttctgtaaatggtaaacatcatcctcgataagtaagatttttgtcttgactagttaataatgtagatattctgtgtttggattgtgtcaagcgttttcttagttggttttgttctagtatttggcctcattgtgtgacccatgagatggtctaagctttaggaggctagctttgcagagaagaacatatatgcatgtactttgaatctttgatgtttgttttgcttttgtctcattttattggcctggtttatacatttacctagaacttcattccaaatgttaaaatgttccgagttatatacttacatgtttcaatcgaataaagtaaactcaagctgaaaagtaaaaaaaatcatctcaaaataaattattctggatatgatttgcaaataatgactagtggagctaagaataaaacaaccatggttttcaatttctgtggttcgacatagcttttatgttagaaagagttgtattgtccttttgtggaaacaacgttgccgtctggtaattctaatcatactaattttgaaatctgttacacataacaatcaccttttttttggggtccatttattcttcaatagactaatcttaagttcattgttacttcttgtttaagaactaaacattaatgttttgttgtatagcatttacaacacgtaaagattttcttcgttaatgaataaaagtgttatacaaagactaactatgagaagtaaagttgtgtgaatgataaattgaagatagcaataacgtgcacaagatattatcaccaaatattccaatgattccttttgctatgaatcactaatgttgttttagtttaaaggtttattgtgttgattgttaaaaacaaacacttcacagagccatgtaattaaattctgacaacacagaaacattgaaacagagatgaagcaagtgtagagttcgaaatacatatagtgtagtgaaagttataaatgataaaggacataaaaccaaaagctttaaagaaacaagagctcatgagctcatgagatgaatcaatacaagacagatagaaatatacattttcaactcttgtttctatgttttatgaacatggatatgcgttttgcattttaattttgactatattaaccttgacaaagatgtgaaactgcaagtgacattttgtcaaaaggtgtcactagaaactaaaatgagttggtgaaattttatccaaatgcataaaggaggctggacaacaaatcccacttaagtatattaattactactaaatgcttaattacagctcatgcaattaaattcatgtatctcattaattaaagaacttaaacttggcctacaagacaacttgacaagatatgtatatatgttctttctttgatcaataagattgctattgcgtgtgatatcgaaatccaaaaatctccctcttcctttctctatttctttcttaaattccatcatctagaaatttcaaagcctcataatttcaatcttttagaagggactccatcgcgtaacaataatttcaactcaatgttccaacaaaacttacatgatgaagacgacgtccatgttcaagaccatgtctacaatcatgaccagtaccatcatcaacaaccgaatgttgtgacggatgaagagaagaggttaaggagaatggcgtctaatcgagaatcagcaagaagaacgcggatgcgtgagcggatgatgaaagaggggttgcaaatgcaagtaaaacaactcatggcgtacaatcaattcttgtataacaaatatattagcttgttggagtacaatcaccagatcttgcaagagaattcacagctcaaagagacagtttcatcctttcatgatcaatatactatatcttatggaaaccatgaaggtatacttggaaacaccaatgatttcgatttaaaccaactatcttcgtatcaaccatcttaactggtaagtcgaaaaatattatttttagtggaaaatggttctaatgtaattagcttcttttattatttatctctctactggattctatctatatagaataataattgtcaatacatttgcttcatgatttctcaatatatttctagtttccttattttttcgagtatcttgctacgttttgtctacccttaaatttctactttcccttgggttccaaaagcctccgtagtttgacaacaaaaaacacttccgcgtgagaaaaatttgtaggattctacaaatatgtcatgtgtttttttttcctttcacttttaatcttttaatttaacataacaatgactagacaagtaaacatagataacaaggtccatattaaaaaaaatactatatcaaaaacttggtatatacagtataatactgatcaacaacttcataaaatattgtcgaggaatttgccatccgtcttgaaccaattgtgggtttgagtttatgaaattttacgagtaaaacgataatccagtaaatctctgttatagctgtgataattatggtgactaaataacacttgaggttaagaaaaaggatcgtaaaaacataaataaaatttcacaaaatcttaccccacagaaatttaaacactaacaataaaatgttgccatataagatgtgcataaatttagactttctaataagtaacaacgagttttacaaatgacgctcaacaatttgccacaaactgaacaaactacctatgcgtcttgttatcgaagatatatgatgatacatagtaaactccattggaacgataccataacctattgtgtataaacaatgagactttcacttttaactctatttaatagaactgaaaaccttatgaaatccatagatttttttttctaaatattctctcggccggatcaaatcctaattaagtcgaataagaagagttggaaaacgaaacttgggcgtttcagaaatgattcgacgttagtctcaaactattgatcaacatgtatagtgactgcagggggatgcatgtgaacaaatgtcaaagttttgggggtaaaaggacaaaaaaaaaaagaattgcagagagatacacgtgcagaagagatatgtcccctatggtcacaaaacatgtttccctgtctgtactaaagatacaaccaaagatgatgggttcttattctgtgtctcaatttctcaattatatacaactcatactgtgtgcacgtgtgtgtctatgccaaccaaatctatgcaacattatttctaaaatttattctaattgttcttataattcttgttactacataaacatttttgtgcaatcaattagtatagtggtctttactaaaagacgtcaagatttcttcagtttttgcgtggtaattaagttttgtgcaactgcttatacttcatttgagaagaacgacatttccacataagattatgaaaatactctttgcttacatttttttagcggcttggccggtaatagggtatttggtccactagtttagacattagcaaaagtatgcttttgaaaaattgttaactaatgatttaagttacttcatattcatactagttttattttagcaaattgtactattaatagaaatatttatatctaatttgatgttcattcatatcgatgacatccgtcatatttttgttaatttatcactcaatgatgatttattgaattgtttatctatcttaatcttccaacatttgtaaaatcaacaaaacttgacaaatatggaaatgtgggtaccataaaatcatcataaaaaatagaaaattaaaaaaaaaaaattgggttaagagatctacgatttgtagaagttgctgtagagattctgatagtttgcagatggattcgtcagttgtgttagattatactatattggaagtgaaaatgattccactagtaatgtataaagaatagaaattgattttaagttagaaattcttatttactttttatagatagtaattcttgtttagaaaatgttcaaatgcccactcatgtgatgtagtaaacaaaaatattgaaaaatggcatcgatgagtataataaatactcgttaaactaataccatatgttagactaattatatacctatgtcaattctgccacatgaatacatgattagtgggtagatatcatcacaaaaaattaatgtaaatgtatatttacttagtagtagtagtaagatgactgaatctagaaattataggtaaaataagatggcatatctgtatttccataatggggtactatggtgaccataaagaaacccataatggaatgcattgatgtacatctcaagagacccaagccatcatcatcatcatcatcatcgatcatcactgtatttgtactatgatctcgttttaatgatcacacaagtctctaacatagacagtaattaatcaaatataggctacacaattagcaaatcatcagatagaaaatacgtttccacaattaaaacagaaatcgtagtgacacaaggacataacatcgatcgagtaagaataaaaacattggaactggaatttaaataaagcatagacacaaaatcattatataaaatcaaactaaccctttttgtctaaccgaaccaacgtagctatgaactacactgtagctatcattaccatcatcataatcatgattatccccatcatcttcgtcatcatcatcatcatcatcatgattaatgttgttgtgaaccctagtagtctccaccaaaaccatctcttcattagtctttttcttcttcttctttatagagttttgctcctcaatctcttgagcaagtttgagatatgatgtggcttccatgggaccagaagatgcatcagaatccattgaatcaccaccatcgctatcttcttcttcttcatcatcatcaccatagtaacaatcgtcgtcacgatcatgggactgtgaggctaaatacatcgtccatccagattcacagctgcgacaatcctcatcggatccaaagatgtttgcagactccattttctttataactatataaaactcttttgtgtgtgtgtgtgtgtgtttatatttaagatataaacagaagaagaaacaaagagacccccaaacaaagagaccaaccaaaaaagccctaaagtgagacagtaacaagaagaagctgagatattaagtaaacaatccaacaaggaacaagcaagtactgtatgtgtatatcagtgtatgtatgtaagcgcgtatatataatatgtaagcgtgtgtgtatccgtgtatgtatgtatatgcatttggtgataaaagacaaaataagaaggttacttaaaaaaaaaaaaaaaaaaaatttagaatttgggaaaaaggggaatattctgtcaaaaaagagagagaaaaaatggaatataacttgattttttttgggaaattaaaagataattagaggctgacttttataaaagataagaggagggagttgggtggaagagatagagatggagaagaggttgtatttaaaacacctgagaattgctatttatctctcatcttctttctgaccaaagaacagctcactacccaaatatatatatcaaacttaaataatacaagacaaacatacccatccaataatttatttttaataaataaaaactagggaaaaataaagaaataacaaaaaatatcagtgttgtcgaaatagtatataacatgatatttgttaaaacaatttgtatgaaatatatgttatttgaaaaaatcacaaccaataaacgaacaaataagatggttcgctatttgcatattctcttccaaatattgctaaaacacatgagttagtctagacttaaaaaaaaaacatagcaaagttcactaaatgtgaggtttcggatatttgagaagtataaaaccattattcaactaataaaaaactagtctattcaacaacaacaacaaaacacgttaatatgaatatctaagcaaaacgtaattcaagaaaacaaaatgaaagaaagagaaagagagggagagagctataaatgaagagagttgatgagaacagcaagagtccagctagtagccgtgagggagagaaagtgaaatttcttatctcgtataagtagcatcttttaaatgcaataactttaaacatcatgtatcttgaagaatctaaattactaaaaatatagttgtaggtgtcattgagttggaatttggaaaattagcctttctcatgtaggaaagaagatgtaataaagagtgcttaatgagaactgattttgttttattttgtcgacatatagaaagctgattagctaacttactttgaaaagaaaaacaaaagactacaaaacgttcatatcccttcttcttctacgtacacacaaaatcgttatactgttaagtgagtgaatttctataacacctagaaaaaatcaagaataatttatcggttgcaagagtgtgacttcgtaaagtcggtgcctttagggtttggttttctactctagttaaattcgtcaagtggatttgggatacggatacggcaccgaaaaaaaaaaaaaaactcgataaggaggtaaataaaatgattgatagtatatgtatatgtccaattaatgtaccactattaatcaatgctatcttagttttttaatatggaaaattatatgacaacactcatagcgaaagaaagtgcaagggaagaatgtttttcaatttttcttaaatataaaaatttgaattgatcaactcaattgaatcagtatggttgaggaagaataatgtttaatctgaggagaaaatattggaaaatgtgtaatgaacaataaataagggagtaatagtagtaccatcccaaaattattatatccctgtgacttgtgctgttctgtctttctttaatatttactgcttgctgttaagtcttttctcttcctttaaaagttcaaacatctctcgcttcctttgtcacaacagagaattaaatatccttttctaacatgcacaaaaacttacctatatgagggattagttcagttctaacattttcttcacatgttatattgacttagcttgctctatataccacttgaatttcagttcatgttcatagaaaaattatggacttaacatgatctgatataaagaattgaggatattgaaaaattcatgacaactgatgaactgaaggataatttgtaagatcatatatatagatgactacatatatctttcaaatattatggaaacaatcgctttagctagaaatctacattaatagatacactaatataatactgctataagtaactcctgtgtggaatgttttctttcaacaatgcaatcgtggaatgttaaaactgcttttgcagtttaatttttgtaaggttactagtttttatttttcatatataaatcaagaaatgtttatgatatttgagtaaatatgttaaaatatcaaaagtttctgaaaatggaaatatagagtaataggtatgatcataattttggtggtaggggaactgtagaactttcaattttagagttacagaatacagaagtgaagtttaaaataataatattactgagagtgaaataaatagtgatcagacatttatcttccagaaattgacttacgtaatttatttctaatgtgttctatgaagtgactcaaatccgtaaaagtaaaaggtcgtacacagacgcgcatacataagagatatgtggaattctttcgtaaaataaaatcatttccattatcagaaaataataacttcttcaacaacatgttatgggtatctacggatatgtatttatgtgtaccactgtacctagtgaacaattcttctttatacagatcttcaaaatgtactatataccttacaagttgtatatgtcaatcaagtcctagttgttgacaacataaatatcaacttgtggctcccatccttcattggttgaaagattgaagatgtctcaaatctaaataacattttcaaaaaccctatggttataattaaaatatgaatcagcacaaaattataatagcattacagcatcatcgaccagaattaggacaactacgagatatactgtcttaagtaaatttattggttcacaacttcccatagtcaaaaagaaaaccccgaatcctaaaaagttcaaaatacattacgaagagcaatgtaatactattaaatatatgtatctaatatgggatttttgaaaacagctaaggatattagaaaaaaaaagagacaaagcaatgtataaagagtcttcttttctttcctttcacctttttttgaaaaccaacataattcgggaatcatttggtgaatttagcgatcaatttgtcgacatggatgatgatatcgtctatgcgcggtcgaacagcagcttgtggttgcagcatccaagttacgaactggtgaagagcttcagggtaagaagcttttggtccagtgtttggccatttgatctgagcgttcacgattgcaagctgaagacttccaccagattctccaagcgcatactcgaatggagacacaccatacctgcaacaaaaaaacaccttcttatattaagttcaagtcaatgaaattatttaatcttacaaggaaaccaaatattattgtattacattattgcatataatgtgcagcctagtgaccagatatctgttctctcatcaatatcagcatggcttgggcaatcccagagctcgggagctcgaaacggtgctgagcaatgctcagatgtccattcctaagacatgaagaattttcagagatattaattgtaagtagttattctcatctgagagagaatgtcgatgattcatggagaatatgtagtagtaaacgatctcaaaagcttgggatgagtataataaagggatagatatagaacctgtaactgtaaggcctcttgacgggaacggatttgcttccgtgatgggcgagcacttccaaagtccatcaatatcgcaagaggaggctgtccttttctacgtgttaaaaggacgttgccaggtttgacatcgttgtgagcatatggtggctccagagagtgcatgtgtttaagtccatcacaaagctgcagtggaaaatcaaacgactttcaatttatgactaatcatacagtaactcacatggttctcagtaaactaaacataatagttagttgcaaaagaagaagagagtttcagaaaacacaagttaaaaacagaaatcaaagatagaatttgttacctgacggaatatgtgcaaaacatcagttgttgagaaagtttcttttttagccttcatcaaagtgaaattatccagcaaggtcccatccaagtgaacaggaaacagcaagaaggcctcgtgtttccaagctccctcttggccgtcctaaccaatcaaaagtaactctttctaaatcggatttttacataagaaaattacagagacaaatagcaaaatactcagaaaaagcatcaaccaatgaaagtccagattaccttaacagaaataatggcatgatcaaggagtggaagcaaattagggtgattgaacaatgaagaaacacggatctcctcacgcaccaattccaattgctccttgttctgaatcaaaactttcttcatagcataagttccgtcagctacaaggaaatcacagatataaaaaactcgaggttagtcatcggacaaatatgaaagaagttaaagaataccaacattcagatgcacagtgaatcaaaattggttgattcacagtcaaactttataaaagaggaactagatgctaggtcaattaactcgtcagcaagaacctatcatctccagtgtcgatgaacaaatgacaaaccaaagtttcagatgcaacgcagtttaaacaactaggaaagatcgaaagtgtttaatctccagtcaacctatatagaacaagattctcagaaaacaaacataaaattcctacattgttatagtttgacttctatgacaaacaatctctcatagcccgagctgatctacaatttcaagtgtccaatatcaaaaccacaatcgaatggggaaagggaaacgaaagcaaatctaatcagaaacagcaattcagattcggtcaacataaccggagatcagcaatcatcgaaaaaactaaccggagagatgagccggatccttgactttcttagctagaccaccaccggatgcggcggaggaagcgtcggcgacaatttccttgaccaaaaagacgaatgcgaaacctccttcgccgagctgcctcacgatcctgaatcgattctcattgatccatacgtcacctccaccgttgacggcgtcgtaaagtgcgttcaatcctgaaaacgaacagcccatgctcacgaatcacacgcacaatctcctcttgaccaacgaatcgatagaaacctttcgatctgaagattatggaattcgtaaagatccttcagattcgcattattcgagatctcgattttcttcgtctctctgtgttttaattatatggaagtgtagagatttggagttgaagcattcatgtcagctatacgatacaatacatacaggcacacaattccgtgtcacttaattaattaattcattaaatttatttgcgttttagctaattggttcgggtaaataaacataacgctaatatatccaacaaaatcattaacgagaaaaagtcgtaccaacaaaagacaatcagtttataatccacaatttagtagtcatcatgtaatatggaactaatataacaactaacaatgaaatacttcaaaagtagagatttgaatggccaaattaagaaaaaaaaaatgaaaattctactaaaaaaatacaaatgtaaattaattattcaaacttgcataattaacagaacaaaaatctaattgttatgccataatgcaagcaaagtttgatcggaatgatgacccaataatatatttcttagtcaacgaaccataaaatacaggatccaattaatgaacggctctcgttcgtcctcaagcttcaaatctgtattttaaaatatcaacggccaggattcataaatccctcggtggcgcgcagagacagtcagtggccattttcggcgacggaagtaggctccgccggctgctgctgcgttatacaatgaatgtttcctccagcaagaacgatctctcttgcattctcgattcccacaaccttcaaaaaaaattcagaagaagaagaagaaaaatcaaaatctgtttttgtttttgatccatgaaatgaaacagagatggttttaataccgagtgatgaggaaatgtatccgagaggacacgaatcgcttctttatcacgtattggatcaccgaattgtggagcgattattcctccattggcgatgtagaaattcacatacgatgctgcgagtcttgtccctgcaagtcttggtatagcttcaccatcctgcaacaatgaaatcgatgaaatatttgtttcaaaacaacttcaaaagattgagttttatctagtcagtattcattacctgagtgattccagacgattcttcttcagtcatataaaggggttccgggatataaagtttaatgacttgaatcttccttccacgagcatcaatcgaattcgacaaaaccgaaagagcttccacagacctttcgtattgaggatcggtttcatcgtctgtccaagacaataacacaactcccggtctagcgaagcagcacatgttatcaatgtgaccatttgtgtcctcatcccctgacaaccattaaaatttctataagattgacaattatttctttcgaaataagcgatggcaattgtaaccgatgtagcaagtggagtaccgtaaagaccacgaggaagccagataaatgattgtactccgaggtacttcttaagttcttcctctatttgctctttactcatatgagggtttcggtttttgttcaagagacactcttctgtgacaaggcaggttcctgaaagtagaataagcaaagcaacaaagtgggattgtgaacaattataaactcagataatctgtttttttgcaagttattgcgttttcaagtcactatgaaatgtatgcaaaccttccccatcgacatggatgctgcctccttcaagaatcatcgaatgttgaaatcttggaattcgttccaaagcgagaatctgatgggtaggagaagaaagagcaaatcaatatttgtaatatgctaatgttagtgatatggaaaccaataatgactagaaggtttatttctccaaatacggtacctttcgtgaaactaaaaggtcatgactccaatcattgtaacagccatcattagctcctgccatgggaaaagtgagtcaagcagtgactacaaatagttgagaatgtaaaaaggtttccaaatccttacctccccaggcattgaaattccagtcgatcccagcaatgtttcggttaagagaactgagctttactggtcttttccgtacaatgaactgtataaaagagagcggtaacaacaaattgttagaaagctttgtaagatggtgagaaaagggagaagctaaagaagtaaactcacagttggtccagagtcgcggaaccaagaatcattcatgctcatctcaacaactcttatatcctctggaagctgtttccttgcattttcccactaatgcaagcacaatcatgtaagccaaaaacagaaagtaaactgagagactacttggtatctgtatgtagaaactcaaagatgttttcttatttcaggtatgattgtaaacaaacctgagcagggctagcacagacagtgacaggctcgaactttgagatggcctttgcaacatctgcaaacactcgttgtgcgggtaaagcgttgtgccgccagttatcttgccgttcctgcagccatattatgacagaattataatccagatttcaaaatcacaaaagtggtttgaggtttgattcatgtattcagtgatgaaacaaatcgaaacaaacaacctaactgaaaatgctttaaattctgatttggttgcagaatctgtaaccatgatagattgcaatgtaaaagatctcatctcatgtcacatctagatgctaacttgacatacagaagctatacaaaatttatcggaaactctacaaaaacgaaccaggaagcagagaaatcatcaaataaacagaaaacagcaattcgaacaatgataaactacgagcaggatccatataaaaaaaaaaaaaggacaaaatcgaaatcgaagtttgatttttgaacagcgagattgagttctccagaatcgccgtcaatttttactttatctcaggttaatgaataaaacatgaaaaaaaaagaaaagaggaagagagatagagaattacaggccaaccgatccaagtttgagcatgagaatcccattccgccggcatgtagtagccgtgttccgccggcgattctcgtgactcctccattcttcacgatgtttttgtgagagagaagtcagatgtaagctttaaactgatgtgtataccgtatgcgttattgattcctaatacttctttttctgaccaagaagagaaaaaaaaagaaaggtacacaaaaagattccgaaacaatttctcagttttcttaagagacccgtatagaatatattttcttacagttggaccccatctttttaactattcgactgaaacttatgctcattacacgaccgggcacgaccccactattagtggtgagcggaatcagaatccagaggcgagcagaatcggaatcctaaacccaatctagtgacccaaacacgacaaaagttgttttgatatttttctttttcttttcttgtttttattgtcatttcaaccgtaatctttcatttcaacaaacttctaacataacaattcaaaaagatatatagctatgccaaataaaagttgtgtataacttaatgttgattattaacaaaaactaaattagtctgtataataaataatgatgtaataaccaatcgatagcacgaagacatgactaagtactgaccacgtaaggagacaatgactaaacacgtaaggaggagatttaaaaaaacgccataaagagagcactaaccagatgaaaccataggattcatgattcaaacttttacaatcgattagcgctacaatatcaaaaaccttaaatagtccaaagtaatatccgatgccgtaaatatgatgatattcattaaccatcaaaagcacaagaggaacacccattctagtttctaatcagattacagaagttgctagctccttaatatcgtcagagacttgttcgtagtctgtctttaactttgcaagttcttctgcagttaaatctcctttcgcaggtttaagcattaccaagacacaacatgttggtcgtttcgttgcccctgcttgcgcaagatcctgaatttcataaaaaaaatattgaatatcttagcaccacaaaaccgattaattggtaagatgatagaaatcaagaaagaaaattggcttacttcttttgaaggaacgtatacataaggaacaccagcctcctcacacaagattggaagatgagtaataacatcaataggtgaaatgtttccagctattacacataatctgcacaaacacaaacgtatcacatcagatacaacattcaaaacataaaagaatttactgtttgcgtagaagaaggaaaaaacaattagaaatgtaaaaatgtgggttcaaatcaggcccgcaaatcaaagaaccaataaggaactcagagcaggcacagacatttgaaacccatgattcagtttccgtgcacagtaccatgctacaatcattctgtttaatccagagcatcggcttaattgtacacggatataacatcaactatgcaaacaactatcataacatcaatgaaaacaaacataataagtaacaaaaagcagagaatgtagatctaaaccaggccgtctcatcacgaaaaatcagagatggcagacatgtcgatctatagtttagtttccgtgcacagtaccatgcttccttcattctattttaatccagagcatcggcttaattgtagacggctttcaaaatcagctaaataaagagcttacactagtagataacatcatgaatgatcatagaagaacatgttaccgttttcacaaacataatcacaacacaaacagagaatgtggatctaaaccaggccgtctaatcagggaaaaaatcagagatggcagacatgtcgatccatagttcagtttccgtgtacagtaccatgctacattcattactttaatccagagcatcggcttatttgtacacggatttcaaaactaactaagcaatttgcaggacaataacatcaactaatcaattaataacacaaaacatcaacacatatacatcagctaagccatctgcaacacaaaacaatcataaatcacactcaataaaaagacaaagaatgaaaaaactaaccctttctggcctcgtcttatgctcttaaccacttctttaactcctctcttcaaacatttcttcccagcagctgacaaaaattacagagcaatacaccaacatgagctactaatcaatatataatgagaaataaagaagatagagagatgtgaagcgagcttggaactgagattggtacctttttgaatgagtttgaaagttctcttctggagttttttgccggcgagaggtttagcgataggagcaagagtaatagcgtacttcttcttctccttttgaatcgacttctctgcttcggtatcgcttcccatattttttagctagctagctccaagtaacaaaaataatggcggaagagtgtggcggaaaaaactagggtttaggcggttgttatatgaccagaagtgttagggtttttatagagaagtgtattattgaccagtaaaatataggaaccctaatttcatatgggcttgttaatgaggtaaactggttgcatataatggcccaattatttgggccttcatacagactaagatttgctacattcattgacttttgactttgagatattgtatgttgtttagcttgaaaatcaaaaaaatcaaatccgaccaaaaaaaaaaaaaaaaatcaaattttccttaagataatgttagttactgtagctggtgaatgttatttaaccacattctcgcaaataaattccaacgattagtatgaggttttttatcggatgctcagatgaaaagacttttttaaaaacttcaccaagtgattttgctttatccatgacatccattatctatatatattaccaaaaaacagtatgattctattaccaaaacgtgtttctaacttgcttgaggaaatgtacaaacaactaacaaaaagccataagtgaagattgatgtttggagcttgaatgtcattgtcgggtcaataagtacgtaggaatatcatggggatggagatcagtgtttgcgttagcaattaacaattttcggtttcatcatatatagtagaaaataatgaacttaatcacaaaacaaaacagtggataatccaaaaagcagctcaaggcatggcagagtttacatatttttggagtgaattgattcttgttgttaaaaactcaacatcaaatcagcttcatgaacttgaaacgcttctaaagcatagatatcagagtgaaggattaagaacaagtacccacagatgtcatcctcgcttcaccactgatacatcgcctactacaatatataggagactgcaattgatttcactggtccagagaaagcaaatttagatgccaacttctatctcacctacaaatgtataaagggcattgttacaagaacacaggaaaatttgtaccgatttatacaatggcaaatttgtaccgatttgtacctacaaatgtaccgatttataaagagaaatcttgcatgttggaaaaaagcaagaaaattttgaagctagactttttgatacatgaaacaaaacacaacactttttcaggaacattgtttggtcagacgaagtaagcaacctacaagaatctgaacttctttttaattatccaacgccaaatctacttgataaacattaagataaagctaaggcgcttatcagtcaactacacacttcaataacaagcacttcattaactgaaaaaacaaacaaactaaagaggtcgaattctcaccagaaacaacagtcacctcttcatctgctctctaagaacacaaaatcctcagctttcccagaaaagtaatcggacttgactctgttttccctcacttttttcttctttcaaaaaccaataaacaaaaagattcaagtcaataagaaagatacaagaggcaaacgctggatgcagaggtttatcgatctattcatgcttttacatttttaatgtgttcacaggaagagatcgatgaaccgctgcctccagcgactctcactcttcttccaactaaactccaaaatgtcaacgaaacataaattttccgaatcggatcaaacgaaacacatcagatctgaaaattcaacagtcaaaatctataccacaagtagtaaatagctggatctttattgccttatgaaaccaaatggacaaaaacatataccctagattacacacatgcatctgcagacaaactgggagaaagagaatcagtgtgatgatagagatatgtcaaattaatgaatccaacaaagaaagaaaaaggaaacagagagatgaaagttttaaccaggaatcttcttgaccagataccatttgtgattctctgatttgcctattggcctactacatccctcctctctctctatcttttaataacaaactttatagatctggttttttcttctagaactaaaatgtatttgattcatatttataactaaaatgtatctaaaagtctcataacatatttgtccaagaaaaaattgtagtaacatagttattgaatttgaatatcataagatttaggaagacattttaaaaatcatatttgaataacatgtaacatgaataacatactaaaaagaagaatgacatggagttggaaataaatcaaactcttacaaaatacttcaaaattcaatacatcccctaatttctctgattaaccagtggactaaaaagcggatgatttgttcaaaaccaaaaaaaaaaaaaaaaacttgggctgaaatgggtcgtgtctgctgcaagcaagcctacatatgtaatgttcggtaaaaagcccatttcatttgtcttaaaaaataacgaaattagatcttacgcgccgtcaatcactttaaggcaaaagtgaaagtcacgcacttacttctggtcttatgtttttttgccctaatcgacttctgcgtagagaaaccgaaaaaggagagagaaaatccgccgataagattccgtacgactgcacgtctccgatctcgccgtgaatctgtctcgagagtctgttaactcaccggatctccgtcgttgatctgcctctgtttcgatccgtgttaaactcggtaaagtctatctctgttttctcctttgttcttcatcttataacttcgcggtctagatcttccggtaatctgattttccttttgaattctgatcatgtagatttaaaactatggatccgatggatatagttggaaaatcaaaggaagatgcttcgcttccgaaaggttcggtctcgtttccttctttggatcgatctactacttaatttttggttctgtcaatttcttggttaaattgaaagattttgtaaatctagctctagctatggcttcaggttactcaatgcaatgactctgtatttttgtctgataaaaaatatgtttgttctttcagctaccatgacgaaaattataaaggagatgttacccgcagatgttcgtgttgctagagatgctcaagatctattgattgagtgttgtgtaggtaatgattattagtcttgagatttatgaatgcgaacattgtttcaaatttgcttatttcattacttatgatgttcaaatttgtttattgtagagttcataaatcttatatcgtcggagtcgaatgaagtgtgtaacaaagaggataaacgaacaatagcccctgagcacgtactcaaagctttacaggtttggtgttacattcagctcagtctgatacatctatgtgaaatatatacatgttttgtaatcttgattttgttaaacacaggttcttggctttggggaatacgtagaagaagtttatgccgcgtatgagcaacataaatatgaaaccatggtaaccatcatctcctagctcacaataagatccagacttgaatgaaattataatcagtatcatttgtgttattgccaattctgcagcaggattcgcagagaagtgtgaagatgaatagcggagcagagatgacggaagaagaggcggcagcggaacaacagaggatgtttgcagaagctcgagcaagaatgaatggaggtgttacagttcctcaaccagagcaactagaagaaccccaacaacaacaacaaacaagtctacaaagctaatcaacaaaaccgcaaaggaatcccttattttaacattatccttttgacttctttttctttctagcaatatctctgtaaagtgcaaaattcgtcgcgtcttggtgttgatatgctctttacattttttaacttagggttgtgttttttcccctttctttgaatctaaaatcacttaggtgattcagatgtaattagtaaggtttttattgaatcttagcaactagtgtcattcgaatccaaatccccttaaattatgtgtaacttcataattctgaagtcttgaatccatttctagtctgatcaccaaatctggattcctttgtacggcttcaacattgaagcatctaaaccggagaaacttacccggtttcttttcccaaaccatggaattaaaccaagggctagaggagaggagttggaccactcttggatgtctaatcaactgtttaatttattagttaagagtaattttggttaggcaaagaagaatggatttaactctctcgccgacattttgcggacttcttctttgtcaaacacacacacttcgttttctgcctttcaaagttttttattttatccagtaataagtaatctaataatttttataagtagataattatttctacgtaatcagaatctcacaatattttcgacttcatttgtaaaaatgtatcgagcacttttatttttttaatattataattattcttctagaaaaaaaattacttaaaacttttataaagatctgatttcacccatttctgtcatcaattaattaaataaatttttgctgtttcagctcgatttaatttgcaaagcttagtcttaataatgcaataattaattacaatacgaattagttttgctttgtttctctttttaagcgtcattaaataaaaattatggtataactccaattccaccgctgcgacgagagaggagcacagagatctctcgtttcgtttttcccggaaaatctgaggaaataaaattaagcaaaagtttccatcgatcctctgagaaaaaattcgactctctagtccacgagttttttttttgttcacctctctctttttcgttaatctctctcaaacaacgcctcttcatcatttccttgtaattcactttcttctccgttttttttttttttgaatctctcttcgtccttcgccgtttcgatttcttgtttcctctacttgatgatgaaattttgatcagatctagtgtagaatagttaggatttacccagagagattatgtttatggatcgagagagacggagttctggtcgtaatgggactcctgaatatagcaatggcaaattccgagatgataatggttttggattcttagatcgattggaaaattgccgtgagaagagtcctcctagatcgaagatccttcggatcccgtctccgacctcgtctcctccaccttctagctcttctccgccatttcatggttccaattcgcctgaccgtggatatatcgaacaccgcatctccaagtttgatactctcgccggcgttgccatcaaatacggtgttgaggtataattctgctaacgatttaggtttggtttgtgtagtgatggctatttccagctccagaatatttgactttggttaaggttgttgagtaatattgacatacaacggtatttttattagaggcaaaaggtagaattaatggtactggtaaaaagcattaggatttttttttgtttgtgtgggaattgacgcatgatgaagaacaacacatgaggaaaaagttatttgtcagagagagctggattatttctaaattgtataagcttcgcttttgatgctggattattcctaatcgttgttcttatttttttctttgtgttgtgaaactttctacttcaggttgcagatgtgaaaaagatgaataaccttgttactgatcttcaaatgtttgctctcaagtctcttcagattccgttacctgggagacatcctccttctccatgtttatctaatggctccttaaaccatgggtactaataaagcttattacttttaaatgatttattatttgctatcatttaagttccagtgatggattcttatagctgattgttgttgatgctttgttgcattttgtgttccaccatcagcagagcagttgttgatgctttgttgcattagtttgcattttgttgcattttgtgttccaccatcagcagagcagttgttgatgctttgttgcattagtttgcattttgttgcattttgtgttccaccatcagcagagcagtttacaccatcagcagagcattttgtttcttatttcttaatttattcaaagagccctataccagcttttcttgattggtaaaatggttttggtactttgctgtaaaagtctcagcgaaggtagaactaggatcctattttctttatatcacctgcagaactagaaattctataggaaacatctcaatttcgagacaaacaactagtgcctttagttgtgttggactgaaactgcatattatcattatggagtaatcctcttttcatggctctaatacatggaatcttatttgcagagagggatgttcatgccacgaaccggaatcaccaaaccatagcgaacaggaagtgtttgactcatttcagtctctgagattgaaatcttcggaaaagaaagtttctccagccatgtactcactgcaaggttattacgggctaaaaccagcagacagaacagtctctgatggaggatgcttcgagatgggaaattacaagacggaaacttctcatcatatcttcaacaacggtgataacggatatctcagacctttcccatccacaaatactcccttaaatcaccacaggaaatctagaagcttggtcaatgcgcttatcgaagaggttaaccaatcacctgataataatactcaagaaccaacatctgataagtttatgagaagacgccaaaaatctgaggccgatttttcatcccggactccagaacttgtgttgaaagaagagaacggtagcagcaatggcggatttttatcaatagctggaaaaggcttagctttgagatcgaaagcgtcaagcagaaccaatctagcagcagaatctgagaacggtaatttcaatccggtatcaatgaacttgatggatgctccagtttcagacagctttagcagtgtaagaaaatcgtcgagtgcatcgagtctacaagatccagatggtaacagcaataatggttcgttgtcgctatggccaacgtcaaagtggagcttgaaaccggatttgcttacacctgcggccattacaagttccatctttgatggattaccaaagcctttaactggtcgaagaaacaaaacggctctggactaaacacaaggtcagtttctggttatttataactgccttattcttttttggggtactatacaaatcaattgtcaaaagaagctatttagcttaatgcggagtaaatacaaaagtaaagagattagaggaaaacaaaattgaaggaaggaagaaagaaaaacttccggaaattgaaatttataaggaagcttctgatgatgtaatgattgggtcttttttgtaagttatattctgtaccattttctgggtgggggttgtatcgacaaaatctgtagcgtagttttattttatttttgatttaatgatacattgtcacaacacatactaaaatgtatttttaatgcattcattaaataatgcttttattaaagtacaaaggctctttgtatgtttggtgtacccttttttattcaaccacaactcgaattcagccaaaatgaaactgttctttatgctttttatatgatccatttgtttgtttactataaagtttctctcaaatcattgtctgattgaagaagaaagaatattgctttccagacataatcggggttgtgctatctaatcaattgactaaatagtaccgagtctaccgacgcacagtgtgaacgtgttagctccaccgctatgaaaatcctgaaattcattgccttcttctcaggctttattttgccattggctttttggcagttagtattatgaatttatgatccagtctaatttaagaacatatgggtcagttttctgcgagcagatctaacttatcaaattctctcaagaatcaataataaaatgttaatccaacaaatctacaaaaatttgcaagtgtttaaaaatataaaacatctaaccagacttcaatcctcgacctatctactatgtcaaatagacatgatacaaaaatagaaagtccccgttgatgactgcttctgacaccaccaatgcttccattgccgctcacgctatcggcattaccaccgctactgctaccaacgtgtcataccagctgctactatcaccgtttccacttgcatgaattttcttgtgatggccgtaatagtggtggcagcaacggttaaaaggatggcttaacatgttcgtagcagaagcggtggtgattttggctgtcgctgaaaaaaatgatagcacaactggtaacatatgttgtatttattgaggtagaagtacgaacctttatcctcacaatcagaaagttaagactaagcgttgttttacatttagccttaaacaattgaacgaaatagacatttttggcaacatggaacgatacagtttctggtaaattacatttatgcttataatctacgtttacttatggttataatctacttttaattcatgtagaaagcactagttactgaaatcactttctactttctaaaatattctattagatcggttcactattaataatatacggtttaaccagtttgggctcttcgttgctatttatttcccgaacatacgattttaaaaaaatatacttattgccttaatatccactaaacatctgattctgatctataagttttcaatcttccattttcattaggctcatgttttattttcagctcaacgcttttcattcaagatcattttaaccaaaaaacaaaacgaaaaaaaaaaacgtaaaacgagtatatgtttactaaatggtgaatcttcgacacactgtgcctttcaaagagagaatgcaaaagaaaaacctaacctgcagacttcagagaaccaatcataagcttctaagcctcacttagttcccaatcactttggaactctcctccggttccacaaaatttcccaataccctgaaacaagcacccaacaaacttgagattgtcgctagtcaattgtagcttaagacagtcgaggccagtttttaaactttgaagtaacatctcaattctcagatgagcacggttctcgaattcacacttcgtctttagaaataaatagtcaaagactagtctttaccttgagattacgccaaaactttgtccaaccaagacactcatctccaccaatccaagtccaaacgtgtaaacctagcaagagataatgcactgagtgttttatgtactgggtgtttgatgtcaacatacaaaatcaggaaaccagatatagaaagaccaaagcgatctacagacaacataaagacaaggccgatcaagaaactaaatcattcatacagaaaattacagttgatatcataaattcacaatgctggttaaaaggacatgagatttatgggagctggaaaccttatagattgaactagcagccatagacaagtttggtttaaaagactaaaagatgtttatttcaagacacaaagaggaaccaatatccaatacctcaagtcctcctcaacaaactctggataagcagtgcgcaaaataacgatacggatattcttgtaaaactggctcaatggagtggcaattgcttagaaatgcatccgtcattgttcctgctaaggctttcaagctagacaacctaggttatgcacagaagagacattttgtcagaaacaacaatgaagaaacttaagtcaatgagaagaatggcatcatctatggtttaacaatatgagctctcatacagtaatctcgtctacgaggaactgaagagacaagagacttcaccaaattactccgaagtgactttccccacaaacaaaaagaaacactagataggtcatcatataggggaccaataataagagcatattgacatacttgcacataataatttggaacttctcattgcctcactattgtaacaaccttagagcctaactacttccgtgtgcagacactatacatattggatgtacatttttaaaaaaatcgtgtttcagataacagtaaagaaagtttttaattagatggttcttatcagaaaaagattgcacccaatatattaggacttaaaagcttgacattcgttcaaggagaaaaatctgtgtatggttataggcctaattacaagatctgaggaacagaagtactaaccaaattagaacctagggcatatactgtgaagaacatgatccggtgatacattcgtcaggaacaattacaatatatagcaatatcctgacaatagtctgcagagttttgaacttttgatgcctctggatgtgaatataccgccaaaaagtccttcatggaagagaatgcaggttctcgatttcgaactgattgataacaatccagaaataagaaaatcagagacgaagaagcgaaaaagagagagaccactcgcagcttgctaatcaaagtgtaaaagaatatacaaaaggtagtctaccttaacttcaggatggcctgtactgagccgcggaaggtacatctggtcgagacagaagcatctgcgaagcaatattaccttgaatggcaaattaaaacgttaaacattgcagtgaaacgcataggatcccccaattacaattgaaatagatcgtctcacctgaaatcgtagagccaccttgtaagttattagcagcaagctgatacctcactgtccccgaaggtggtctttctggaggtggctgaaagacacctgtcgttgcaaataaaacgaccaatatcaattgaagaagaatcataaccaactgaagtagtataatgcccgcaagcagacatgtatgtgaacaaactgacatacaaaggtttgagatgtttctcgcatatgcataccgtcggtaactgtacgagagcctggaaatgggtttcttacacctatccaggctccatattgaggatctgcactacatccatttggaggcatccgccattcctcattcatatgttgtcgcccatcaactggctgggaaggaaaatggtaaggatgtggaaaggaggaccgctggggttcagattgaacaattcgacatggaagcggaaaatggctggatggtgctggggcaagattcctaatcataggtctctgaagaaaagaggtattgattggccgaagctgttggttctgtgaagacgcttcttgtttaaaaagcacgtcgctatttccatattctagttgcttggaggaaataaatggcaaaggttccccatagctgcacatccctaccggagcaaaagaagatgactgcggcattaaatattcagattttacacccccatcagcatgccttccatgtgcagcgtttacgggcactggggcaatttgattactctgcataagcaaaagtactggaaaatgtagcttgagaaattacaagataactaaatcacgaaataagagaaatcaatgggcttacagtggcaatgctagaatgatcccgctgcatagatatctggtattcatgttgcaatagtggatatgctgggggagcgaatcctggttgaagtggtaatgaaggatggctaggcatggacggtcgagttattgatgatggtggtagagcgatagattgtgcaggtgccaatggagctgttggtggaggtaaacaatgatcagagggaggtggtgctggtgccagttgcggtggagatgatgggggtgggggggaagaagggggttgaggagggggagatggaggcgattcgtgaggtagaggaggagaacccgctggaaaagaaggaagctcagttgcacaggttgtagccggtgagtcctctttcgcttcaatcccacagacatcatctttcagctgacaagacgcatcttccatttcaagcccaccattaacatccactacacagtgaggtttatcacttgaactatcatgtgcctctaacttgcctaaagcaaggactggctcttccatgtgtgtgattttaacttccatatgtgtgtttttaacttcctgtgatgtgcttggaagatcctcttcttcatcatctccaaaagtaagagaagctaaataccctggcagctgaaaatttgcattgctgcagaaaataactcgtttaacatataaatcaatagacaatagtactcttcagaaccgtactgaaactgtctttaaccattcagccttataaattttccactaagcttctacatgcccatcaactatgtcaaatctgaaaaattgaactatagaacaagataagtgtaatgcatacctcccatactcgtcaacaagcatcccttccatgtcccttagaggatcatctacagcacgctcagatctagaaggacgtcgtagggaaaacccaacggttttatcatcaccagaagcaccaagatcaccaatataacgacgcaaaagaaaatctgggaaaattttcctcttaagccacaacctcaacacctagcaggaacagttgattcactgactctgaacaacaaaaacatgagactgtcctcgaaacgaacaaaaggtaaaaggaaccttgcgacattgatgacgattttcacgagcaccagtccctggaggagcagcagcacctagaaggcgtggaagggctgcctgaacagtaggaatatacaaagagcgcgctctacctaaagaagattcgaaagcaccatgaactatcactttagtcttactagttacccaaaagacaaacgaagatattctctttgactccagacataaatacaacaataagagaaatatatcgtgaacacctcaggaccaagatttacctttttggctatgtgaactctggataatcgaatcaaggagaaagaacaagtccactttacggggaaaatgaggctcaatttccaactttcgaattagaagttccacaacctacaaaacacgataaaaatttccccatcaaacgctgtagatagttttgtcaaaacatttaaccaagttatacaaaggagaatttttagccggtaaaggtacattattttattgattctttatatgcagcctattcctaagtttatcatagaaaattctgcctggctagccttgaaagaaaccacagaaagaagaaaagtgttgagctgaggaaacacaatttaactcacctcattggcaatcccatacttggcacaatcaattgcaacgcgtgttgcacgtctaatactttccttagttctggataaagtctctatcattccctcaaaagtatctcgagaaatcgcagcctcagtggcaccactcagtgaacccccaactgacctatgccctgaactaaaccttctctcttcgttctcttcagtcccagcttggttacttgatgaggactggcggccatgatttgacggagtcaaaacttcttgatgttcctgagcaacaatcagcgtggcatcggcagcaggagatgaaacattctgaaccatgaaagggcttttactcgtctgcatcgaatcgatgttaagggaattatggtctagattcacaaacggtgaaaactgtgaatgtgcttgttttctttttgcctgggcagctgcaattagatccttcatacatgaagaagaagaatctgacatcccaaaactgaacaatggggcatttccattttcttgattgacatcaatcctatgataacaaaaaaaacacaaagactataacctccaagcaaaatacgaacatatcaatgacataggaaaagacaaaaaaagcatacacgtcagcagacaagttcacaaaagtgtcccttgacacttcaacatccagacgagttgcaactttcggagtgctagttggcttttctccaaaagctggtttgcttctctggtttgctgtctgagaatgagaagagcttactctatcagaaccagccactacgtccttggaagaatcaccatgatatttttttggtatgcccgcaccagagacttttgcaattttattctgtactgccaccagctccttggttgaaaacaactgaggggacttcttaggagatctcaaggtctgcttgacattctgtgggggcaatttgatgactggtttacccatataggagctgtttgaagggccctccacactatctggcattcctgcaccagcgacttttgcagttttattttgtcctgtcacctgtttcttaaatgaaaccagctgataagaattcttaggagatcttaagatcggcttgatgttcttttggagcaacgccttgaaaggttttcccatacgtgagttatatccttccacgctatcaggtagtgcaagtgaagcatccttgttatgtttatacagaggtactttccctgttttcacactgtctgtagatccagctaatagttttgctttaatagaagtattatgggacgcattagcacttttaggagcatcagtagaagctatgggaatattgctaagtcctccatgcactggagtctttgggtcttcatcatcatcatcgtcgtcatagatacaaaccgccctccgtctcttcggcagctgagcagcttgaaccttgatatcgctatcagaagatgaacttatcttctgttcagggtgatttgccccctctttaacgagagacccaggaaaagaggaaacacttgtgtgctccactgtctgtttccggcgctttgtataagcgaccatgtccttatcaaattgattttttcctcccagggcacttatccctaacacaatctcacgcttaaaaattgatacaacgccagtagaatcagatatttcagccttgccttcaccaacaggaacaagacgtttgctcttacattgtttttgatccttcgcatcttcagaccgtggcctcttagcagcacgtttactttcatctgctcctgatgcagactttcctagttcattttcaaacctctttttcttctctttcagcaattcttttggctttttagaactggcaatgttaagatccgtaaccaccttactgtcagaagattcttttctacagccatgatcttgtccctttttactgccatgatcttgtccctttatactgccctttaatttctgattaggaccaaggatatgattgtctgtagcagctcgactatcaggcacacgtttggctctaacctcatctttacatcttttattcgagtcatctgttgtcttcctgattatcctctgatcattgactaaattatttccagtaccatcactatggtcagtgcaagtgacattgtcaatcttatcatcaactgctacctttaaaatagggtcaggtgatccatgctccactggctcactacttggggatgtgtttctgttatttgatatcgatgaatcttgctctcctacatcaggatttatctctgcaccattattctcaactaatttaccaagacaaggatccgccctagaactaaacttatcagattttccatcactactagcttgattcaaatacttaggcttcgtcacactaggttcaacagcattcaaaagagcctcattgcctactatatctgacttttgcttctgcgactcttcaaacgcagcagagatttcctccacggcttgggaaaagtacttgactgttttaccttgacatcttgccgacagtttcttctttgtctcgctagtgaagggttgaatatcaggaggcgtaacaaaacctctgcattaaaagaagataacttggtcaacagctaaatattgagtaatgaaaatcacactccaataacaagaaacaactaataagagttgttgtcatcaggaagggaaatgcctgtttatagttaatggattgactagacaaaaagtgcatacagctttctgggtcatgataaaatatatctcaaaacaaacagtaaacactgatgaggctggcttacatttcccctgttccgtaaaactgaacgaagtgtttctttgggtctggtgcttgattccaatcttcaggctggccgatctgaaacggaaaaccaattagttcacaggagataataaagtcaaaatgaacaatcccacacagcttaatcagagttaaaagcacttcaaacaaattcaatgctctcaacataagagatactacatagcaataagctagatgattatactactggcttcaaatttcactcagtttcagcacaaaaagagattgctttggcatcatactataaacctgccacattataaaatcctactaagatgagacattcaaggaggaaacacagccttaaatgtcaatgaggagccaaactaagccaaacaaaaaccatgatcatgattcatgaatcaaagcgtgatgaaaccgagagagcgcaggacacaaaccttagcaggccaagcagggaatcctttaactttagcaagaacgagatcacccaatctcatctctcctatcgccatagctttgttcgctcctcttttacgcccaggagccattggcgaaactgactacaaaccctaatcacagctcagatagaatcacaaatcccaagcaaaacccgagaatcaataagaaagtccaactcttcaccggagatttttcttcccacacccgttaaagagaatggagacagcaagggcttcaccgtaacgagtgagaggaaggagttgaatcggttgagaaagagagaaacttgaagagtgacggtgagatttagggcaaaaaggtgataattttcgccggaaagatgacgcaacagagaaacttgtttactctggtcgccgctttttttcctctacctccccttgttcatatacgttttgagcagatcattatttttttcattttttattccaaaataattaaatatgtggccttttctccgtaatcctttttccaacttctatatgggcttctcatgagctaaagcccaattttatttagttgggccgttaaaaaaaaatgaattgtgatgagaaaaaacaaaagcgaattgtaaattgaaacttaacgccagtgattttctttttttaactgatagcttaaaattatcattagattttccatttttgctagcagcttaaagttaacgtcaaattattaatttccattttctcactggtattagattaaaattcattttatagtagtatttgtctgaatatgtcaccatcgtaaagtcagataggtgttcgaagaaaatgtatatttttaaaacgagaacgttattcatgctgcaccgaaataccgaatattgctgtaatttaattggtgagatgatcaaaattactgtagattaaattgtcgtcagattcaaagatattggatcataaaatacgttacagaatttggtttctcaagatttacgagtaaaatatttatatagaaacattaatttattaactgactgcagatgtcagtacgatgagtaagatatttgttcgttaaaaataaaattaaagatggtttatatcaatatacaaactttgtgtggatatacctattgaagaagagatatcaaccaagaagtttgatcgtgtttctttcgtttgcatttgtataattgtattgtattacctgaccattactataaaaaggaatgaagataaaagtgtttttgacttttcctaagtattccattacaataaaccaaagtaacaaacacggctctaattcaaagtcttcaactattcttgtccgaagttgatctttcgacttctattggaattccaaattcctaaactttatcgactagttctacattcttacatggagacaaatatttataacaaaagaaatggacccagaaagagaaactcatgcacgtgttccttgatgtatacacgtgacatcactgaatatacatatcccaaacaaaccaatccaaacttggtaaaaccaagaaaattccaagtttacaacaataggctgcttaaagaaaacacaattataaattatactgtagtgcatccattcataatcgatcgatcatcgttattaaacggaaacactgtttatccctgcttaaaaataaacaaaaaaatatgaccaaaccattataatatagaaaacaaaagaaaaaaagatcgtcatgacaacgaaacgcgattttgccgtccaagaaacccgtccaaaacgacttttcttttatacgactccgaattcaaatccggcacagaagcagaaccgttgcgtttgcgtttggccaacgcggctgcgtctctgacacgaggtaggacgtaacaccaagcggatgtacagaggatcgcacagagtcgaccccacactaacataatcatcaacgtcaatataatgatcgatatcccaattaccgggtcaaaaggtttgacccttgacccgtttctcgaccgagttggtttcaagtcgggtttcccgtaacgggatgaaatagaagatatccgctctgtacacgtgtcttctttgaaggaacctaacggttcgatgggttttgatcggtcaggggttatgtctcgtaagtcctttggttttgtctgaaaaatatcaacaaaaatttggacaaaatcaaggaaactattttgaaaattcaagaacataaataaatcatgaccaacatgatttaattgtctgaaaatgtttttttttttttttttttttttgccaattcgacagaaaagtgaaaagtcacaactttttacgaaattaagatacctcttttgtttcctgattcatggctttatcatcaaccggaatatttttacgatcagttatacgacgtatcacggagaggggtttctgcttatcatcagtttcatcttctactctcgaagtaggtttctctgtttcctcgatcggcgacggtttgatctcgctgttcttcaggcggaacttggaacacaaaaaccaccgagggattcgcttcttcttcatcttcttcttctcaccaccgtctcccttcgtaaccatcggcttgtcggagtatattttccgggagaatccgaaacagccgaggaaatacgaagaagatccgagtccttctcggactctcttctctgttttcgccattgcagtggaattgaaagaaagagaaatgtttgcattcgtgcgaagactttgaaatatcgctcagagcggttgggttttatcctctttttatttattttattaaaataatatttgtcactgttgacacagtttcgaggaatcgacgagaataacacggtgacataaattattactacttataataagaaactgggacaggactgtatatgtatgtacaagaagttgtatccaaaaaaaatattatagaattttttacaagataagatagaagggaaaaaaaaaagataggaagaaggtttaacattataaatgtacgtagatttattcacattttgttatggatttttttgactaacataaggagattttttgtaataaagtaatgattagaattaaatcttacatttagatgttaattttataaaatataaaaatccaatttctaagtttctttcctcaatatgtggttggtccagtttgtgggttttattatgccctcgtactttgatcacttttggcttcatgaaccaaaaagtatagtacatgttaaataagatatacttcataatattaagtgagatttattgctgaaaaagaagaaatttatgtaatcaaggacagtaaattataatatgtcataattttcccaattattgttttattggattagcggggaaaaaaaaattactattgtatatatatataatctttttgacggcatcgttttttttgggtgacatctactactgtatagtattatatccctgattcctgagtgttagcggtacaaatctgaatgctaaagaaatgacaaatacgaatgtgttctttattacgctttcatcaccaatccataccagacgttgtatatgaataaaaaacgtatacaataacgaaccacgttattcaacacggttttaagattagaacgaagaaaagactcatcttgagagaattattaatctattaaataaagtaaaccaaagtaaaattttgatataagaaaataagtatcgtagtgcccacgttccaacttctacgttggacatctgcgtttagctattttctatatgacccattcgaattcatctggatatatttttctttggcaaattactaaagtcatagtgaatccattaagaaatatgtacattttccttgttttatcatttttttttcccaactggacctacatagagattcatatcatccatttcatcacattcaatgtagaccctaaaatataagagaaatgacaaaaatatggactcttttgtagaatacaatatatcgcaagttacaattattatatgaacccacttaactaccaaatcaaaatcaccaaaaaacaatcacctgttacaattcataaatctcaaaacacgaaccactatatatacaccaattttataccctttatgtcaggcactcagcagtagtagtggtctatctcagagacactcctcttgaccatattcaccttcaagccatgcttcatgtacatagttagagccatctttggctcaaccttatgaccacccttatcatcaaccctaaccttataccggtaaataatggcggccgctacatatctcatttggtaatacgcaaaatccttgcctagacatagccgaggaccaccattgaaggccgtgaacttataggccgactcactcatgtacctgccgtctcttaaccacctttctggcttgaactcacgacagtctttcccccaaattgtttccatacgtcccatcgcgtatattgcatatataaccttttctcctttttttaatttcgtcccatctggaaatacatcgtcttcaagtacctacaaattattttactcttgtaaacctcatgaaaactatatgtcaataaccgaaatcgaataaaagagaatcttatgtaacccaagcagtcaaccacaccaatatatcaaatattcctaacaaattcacttttaactatatatcagaactaggttttactatattgattaaaactaattatttacttatggataatagttcgtctcaaaattcgaattgtacctaaaaggctaaaactagaagcgagccaaaattttcacaaaaaggactaaaaaaaattccggatagctgaaaaaaaaagaaccaaaaatcatattcttaatgacttcttgggagacaagtaaatgaaacagagcagatacctctttgtgatcgactggaacagagggatacaatctaagagtctcagacaaagcagcttgtagataatccattttcttgatctcttctggtctgaagacgggctcatattccatgttcttctttgtatctccatgatcaaccctctgctcaagaatcttgcaaattcccatcataattttctcctccacttccggattcttctcgattaaccagaaaaaccagcttagagccacagaggaagtgtctctcccagcaagtatgaagttcacacaaatatcacgcaagaacttatctgaaaatttctgtccattttcgtctcgtagacccataaaaatagtcaagagatcaggtctcttcgcgatttcagtctctagagacatctctttcttcctcgtccggattacttcttcagcgaaatcatccacaccatttattgattcctttagcttcttctccgttcctaaattaagagacctcatgagcttccacacgaatttaggcatcacaaatctcacaactgttgcttctgttgcgtcctcgaaggcttttgcaaaaggaatttcgggtagttttggactaagacagcctggatcgaccccgaaagcaatcatgcatacattgtcgaacgttagtcttaacaaaatgtcctgaagatcaatctttccggaagtttctagaaccggcaaaagtcgattatgcacgagttcgtgcaatgattgactggttaattgtctgaatttagccgaatggaattcgacacttgctgctttcctttgtcgttgccacgttccgtcatcggtgttgaaaatcccgtctccgagtagatcttgcatggtctcacggaagtaagaaccctttgggtagatagagaaacgggtcttgagaagatgctcaacgtttcttgggtcgcaggtaacaacgcagttgagggtgctaaaccaaggacctctaaaccggaatgtcccgttttggctgataagaacatcagacagccattcgtatatgttgcttcgtaccgcggatatcaacgaaggaagcatgccaaccaacggccaaacgggcatcccttggtgtttcttctggcgcaaggaatgtattgtcgcaaacacgaaaaaggcaataaagagctcaagaatctgaacatctctcagggaaaacagcctccttgaaaccagaagttcgtcgcttccgaaacaagaagaggacacggcagtagccgtgagattataagaagaaaaactaagattcatagtgacaaagaaggaacaaagaaacagagtgtgtataatttttttgcagagagaaagagaaagagagataagaaataatgaagttgttagttaatttagtaggtgaagaatgtgaaatgagggaagaaggatttaagacgcataagtttcgtgtttggctctcaatgtgaaattgggtttgatttggtgagctaaaaaaagttcgttgctcttttctaacggtcttttaaatttgtgtggctctttattctcgtgttttgctatgttttcgttttggtcttttgaaaggacgaatcttttggaggggattaactagaaaattaggaaaattagaattagggttttagacttgaggattgttgataaaagagaaattgacaggtgggtagtgacggatcacctaagttcttgtttatttgttatacactttattttattttgtcaaacaacttgtttaatttatacgtgtggaaattggaattggaagaatattaatagtgagtaattcaaataaacagaatttttttggatactactgtactattttaaacctggcggtgaagccgttgttgtttgaatttaggttatctgcatatatctggtgaataattgttttcgaacaatttgggcttagaaaacatatgggcctatcaataaagtatcgggcctttgatatatataaaatttcattaacctcattattaatgtattttgggccttacaggccctctggcctcttctaggtgactatagcatcaataaatgattctcattaagccgccaatttctctggcctcttctaggtgactatagcatcaataaattattcccgagacaattgcgaataaaccactttctttggaaattatcattgagatcaacataaaacataagctttgtttatatgacaatgctgttgttttaaagctctacggtagtactacacatgtaatttaatgaattttaattgatttctaaacagtacgagcaatttgtgtgttgaattcaactttgattatatggtttataaaaccttgttttgggagatgaaattctgaattaagaaaaataaagaagaaagcatttaatttgccgatggctccatctccatagccatgtggttcagtctccgatgatgacatctcaagcgttgaaattcaattccatctttctgtaaaaggtgagaaaattggtagtgaaccaaccatgttatcggagaccgtggaggcacattacaaggaaatgattatgaaatgtgtttattgttataacattttcacgtgagtatcaaaaaaaaaatctcatgaaaaataaaagacttttaaagttttttttaatataaaaaaagacagtataaagtagaagaagtgggggcgttttctcatctgctcttcatttcgataaataattgaaaagaacaaaagaaacaaaagagacgagaaagagttttggcgatgaagaagaacgcactttggctactgtgcattctggtgttaccggcgatagcctgtggtaggaaaccggagaagaaggtaacaatttcatcctctgggaggaaggaagatgaccttgtaaccggtttgcccggccaaccaccggttaacttcaaacactacgccggttacgtgaatctggggcctgaacagaagcaaaaggcacttttctattggttcttcgaagctcaacaaaactcttctcgtcgtcctctcgtcctttggctcaatggaggtcagtttctcttcctctctcgctcatttacataaagtatattttatttgaagtagtaatacaaacttatcattgttctcaattggaattttcattcgaaacttcattgtttctgcggttttacaaatatgtttaccaattttaaaatgatagcaccttttttgaaacggatgatgtgatgattatgtttgcaataaaaaaatcagtgtaatgaaagattaatgaactctcaagctcgtgcctcgtgggccatggtaattaggttaatacatatgtctaatcacaccatcacgtattgaccacaaaactctgtgcctgcaggccgtgatgttgggaaaataatagataaaacttgcacgaaaaagaaaaagaaaaaacactaaacatagagaaatgttttcggcagttgtattttcttggatacataattgaatttggactaaaattttaattatttatatagctaactcttagaaaacatcaagttgtgtacattgtcctaccaaactccatcgtctgtctccttaccctgccttgtaacttgccaagcagttcctttcgtttcagtaacaataaaattttactgtaattgtatcgcaacgagatagtaaagggtcgtttcgatgcagttgtttttgttttaaattttccaaaaattacaagtctatcaaatagccaaaacttaaagtagtctattgtttgtacagttatatatcgctattcttaataatctgtaacttatagatgccgtgtatggcttgataaaaatagccagaaacaccattaagtgatacactgatactattcaacatttttgttccttactattgcttgatggagaagtgataacaaatctgatacagttgggaatgccgacaaattttaattgcctactttaataatatttcgttttgtggaacgcacttcaacaatctgtagtctgtatacggtggaacgagtaggttcttgcctcttcgggacaaatatagtccagtcctcgttttcttaacgtgaaatctcaaaaccatagcttaaaacaagttgtatttgaaaatgagcttcgatctaattaagtgaacaaaagttattcacaaaaattaaaattaacctgtttaaatacatcatattttttcgtgaagattcagtgaaataaaacactatactataacccaacaacatatttggaaaaaatatcaacgaagtcgtatatggtccggctctctgacagatattggacttgtatcattcaatcagtgtcctttttgtgtaacattcaatgtccaaatcttgtttctagagtgagtaaagatcttttgtctgtttcttctttttctctcggtagttgtacattcaatttaacgaatttactttatacggtttgtcttttttcccacacggttcattccaatattaggatatttagggatacgagaaatatcaacctagtcttttttattggggctagaaatcggataagatgttgaatattcaattatacacttagaaataaacaaaaagctatgtctaataataatgtggagttgtgtacatgtctagtttgaacagaaagattgaaatttgttaataatgaggtattacctttataggatttgcgtgattgaagggtacacacgaatccaatgtaatcaagagcaatagcaaaatctttagttatttaatttctgtatacgaaaatgatatttgaatcttgatagacaactcgggacaaaatactgacgtctagctagctagtctcattaattttattttttctcgacaaatttagttgtttagttttggattttcttgacaaatctagcgatggaattgaaaatagcaattttctttagtgaattgtattattacatatttggtgaaactcttaaattattttcatcagtttaactaaaatccaaaatatgcaggaccgggttgctcatcaatagcctatggagctgcacaagaactaggcccttttcttgttcacgacaacggtggcaaacttacctacaatcatttctcttggaacaaaggtaaaatgaattattaccatactatcagaaacatttgaattctttagctaacatgtatactaatattaaccgtggttacattaaaaaaaatgtttgtgcagaggccaatatgttgttcttggaagcgccggttggggttgggttctcgtataccaataactcaatggatcttcaaaagcttggagatgaagttactgcatcggactctcttgctttcctgatcaactggttcatgaaattccccgagttccgatccagcgagttctacatctctggcgagagttacgccggtaagtgctttatccgattttaattcttgatttatgaattatatcacctaatataaaagaattaatcttgtatattaatattatataaaacaaagattgaatcacatgcttttgatcttcttttctcaggtcactatgttcctcagctcgcggaggtaatttacgacaggaacaagaaggttacgaaagactctagcattaatctcaagggattcatggtatgcactctatatatatgtatactactagtaaggttacttgcgaaacgaggaagcaacgtttcttgtgctataagtaaacataaaaggtattcgtttgatgttgcagatagggaacgcggtgatcaatgaggcaacagacatggcaggactagtggactacgcatggagccacgctataatatcggacgaggtccacaccagcatccatggctcgtgcagttttgaggaagataccaccaacaagaccgaacaatgctacaacaatttcaaagggttcatggatgcttacaatgatatcgatatatacagtatctacactcccgtttgcctctcctctttgttgtcatcttctccaagaaaacctaaaatcgtcgtgtctcctcgtctccttacttttgacgtacgtaatctacaatacaatatagtatcattgtaacataatgtaattaccataatctctcttcttactttttcttaccaattcttctcttttgatggtttaggatttgtgggacaagtttccggccgggtacgatccatgcactgaaagttatgccgagaattactttaaccggaaagatgtgcaggttgcactccatgcgaacgtcaccaaccttccttatccgtactctccttgcaggttagtcctccttacgttacgtggtactaactaaaattaatagctagctagagactttgtatgttaagtttaatgtcatgtttctaatgaacaaagtatatatatatatgatcttgtgggtgtgattcagcggagtaataaagagatggagtgatgctccatccaccatgattcccatcatacaaaagcttttgacgggtggcctccgtatctggatctataggtatctatatctttctttaactgttttaaaaattacgtgaaaaattcatatatattgtcaattagtttaatgttcactggttcaatgttggctatagtggagatacggatgggagagttccggtaacatctacacgttatagcataaaaaagatgggacttaaggtcgagtcaccgtggaggtcatggttccacaagagtcaagtagctggatgggttgagacttatgccggtggactaaattttgtcacggtgagaggagccggtcaccaggttccggccttggctccggcgcaatctctcacattattctctcacttcatttcttctgtccccttgccttcaaaacggttctgatatcagtaccgtcaagtcatgatggcaagttgttgttgttgttttggaaccttcgtttagcactctcccaattgattttatgaatttcaattgatgaataaagattcttcaacttttagttatataataaggcttttacctttctacgcacgtttttcgttgtttaataatttccagtatttcaattttcaataatcaacaaatcagtagtctacttcattaattttggaactcaatgaaaattttcaaattaattttaatatgaatgaaataaattagggggagacggcccttaaggcccattataaatttagagggccattaaggcccattaacacaaattaaacccagtcatggagctgaggcagtagcgttcgtttttttggaatcaatcaccgaaagagatctttcaactgaagcacctgcgattcatcttcttctctgcccgtcgtttcaacgtgaggagaaaaaagaatggcgtttgcaaaaatgatgtttcttttcggaaaatttcagcaggtgaatatatgaagttcttatcttctaatctgacttatttttgaaacttcctctctggtacgtgttttttgatgttgggtatgaagaaagttcgaggcttttcaaaggatttagtcttcactgtaatatgattcctgtgactatattttgtagcttgtatagacttcagaacatatgtgagtacttgaaaatgattgaattctcaatgatttgctttctgtccataaaatgtaatttgaagttgctcatacgataataataggcattgtcaattttgattcaatggtgaatttgcttttaattttcttttcagggtgttggtgttctagcaaagagtaccacttttgctaagaatccaaggcaactgcaatttgaagccgacattaacaaattgtttatgtttacaaggttggtatttttttggtatagattaagagcttttgaacaagatttataatgttcaaggatgtaggattatcaagtatcaacttgtctatttattgactaagcaaagagtcagtctctgtaattgttggagattttttccactatatggctcacggagtttctctgtgatatagctataatcgtttgggacgagatgctgaggaggctgatgctgaagagattattgagatggctggtaaagccactttctctgagcaacagaagcaagttcaggagaacattcactaccaactccaaaatttttgttcttcaatgaacgagattcttcttaccaatattgacaaaacaaaggatctaaatgagccaggatcagaatcgagaagggacaacattgtcccagctgcagacaagcccagtgagtctaaataatttgtgttgtgaactaataaaactttctagtccttattgtcttaatcatgtctcactgattcttcttcagcacagttgttcctgagactaaaccgctgaaactcgatgaagtctcacatcgattaaaggatcgagttgggtacacccttgagatcaaaccatcgttaatacctcacaaagacgcgggtcaaggttgttttatagaaggtgaagcagatgtgggagctgtcctagccttttaccctggtgtgatttactctcctgcattccacagatacattcccgggtatccaaatgttgatgcacagaactcatatctgatcactgggtatgatgggacggtaataaacgctcaaccttggggtcgtggaggaatatctcgggaagtatggaacggctcctttacaacgcctgagatcagaacagaagctacaaccacggaaaacagttcagataaggtatggaagatgctgagtaggccgcttgaaggttcaggtggtgtagaagcggttattgaaatgagaaacccgttagcgtttggtcatttcatcaaccaccctggtaaagaaatggaatctaatgtcatgatttgcccttacgacttcctgttgtcagagacagagatgcgagcttacattccgaatgtagctttcgggaacacaggagatgtaaagatggggagatttgaaag

SEQ ID NO: 1412 - DNA, 125411 bp, Arabidopsis thaliana
tgatcatgtagatttaaaactatggatccgatggatatagttggaaaatcaaaggaagatgcttcgcttccgaaaggttcggtctcgtttccttctttggatcgatctactacttaatttttggttctgtcaatttcttggttaaattgaaagattttgtaaatctagctctagctatggcttcaggttactcaatgcaatgactctgtatttttgtctgataaaaaatatgtttgttctttcagctaccatgacgaaaattataaaggagatgttacccgcagatgttcgtgttgctagagatgctcaagatctattgattgagtgttgtgtaggtaatgattattagtcttgagatttatgaatgcgaacattgtttcaaatttgcttatttcattacttatgatgttcaaatttgtttattgtagagttcataaatcttatatcgtcggagtcgaatgaagtgtgtaacaaagaggataaacgaacaatagcccctgagcacgtactcaaagctttacaggtttggtgttacattcagctcagtctgatacatctatgtgaaatatatacatgttttgtaatcttgattttgttaaacacaggttcttggctttggggaatacgtagaagaagtttatgccgcgtatgagcaacataaatatgaaaccatggtaaccatcatctcctagctcacaataagatccagacttgaatgaaattataatcagtatcatttgtgttattgccaattctgcagcaggattcgcagagaagtgtgaagatgaatagcggagcagagatgacggaagaagaggcggcagcggaacaacagaggatgtttgcagaagctcgagcaagaatgaatggaggtgttacagttcctcaaccagagcaactagaagaaccccaacaacaacaacaaacaagtctacaaagctaatcaacaaaaccgcaaaggaatcccttattttaacattatccttttgacttctttttctttctagcaatatctctgtaaagtgcaaaattcgtcgcgtcttggtgttgatatgctctttacattttttaacttagggttgtgttttttcccctttctttgaatctaaaatcacttaggtgattcagatgtaattagtaaggtttttattgaatcttagcaactagtgtcattcgaatccaaatccccttaaattatgtgtaacttcataattctgaagtcttgaatccatttctagtctgatcaccaaatctggattcctttgtacggcttcaacattgaagcatctaaaccggagaaacttacccggtttcttttcccaaaccatggaattaaaccaagggctagaggagaggagttggaccactcttggatgtctaatcaactgtttaatttattagttaagagtaattttggttaggcaaagaagaatggatttaactctctcgccgacattttgcggacttcttctttgtcaaacacacacacttcgttttctgcctttcaaagttttttattttatccagtaataagtaatctaataatttttataagtagataattatttctacgtaatcagaatctcacaatattttcgacttcatttgtaaaaatgtatcgagcacttttatttttttaatattataattattcttctagaaaaaaaattacttaaaacttttataaagatctgatttcacccatttctgtcatcaattaattaaataaatttttgctgtttcagctcgatttaatttgcaaagcttagtcttaataatgcaataattaattacaatacgaattagttttgctttgtttctctttttaagcgtcattaaataaaaattatggtataactccaattccaccgctgcgacgagagaggagcacagagatctctcgtttcgtttttcccggaaaatctgaggaaataaaattaagcaaaagtttccatcgatcctctgagaaaaaattcgactctctagtccacgagttttttttttgttcacctctctctttttcgttaatctctctcaaacaacgcctcttcatcatttccttgtaattcactttcttctccgttttttttttttttgaatctctcttcgtccttcgccgtttcgatttcttgtttcctctacttgatgatgaaattttgatcagatctagtgtagaatagttaggatttacccagagagattatgtttatggatcgagagagacggagttctggtcgtaatgggactcctgaatatagcaatggcaaattccgagatgataatggttttggattcttagatcgattggaaaattgccgtgagaagagtcctcctagatcgaagatccttcggatcccgtctccgacctcgtctcctccaccttctagctcttctccgccatttcatggttccaattcgcctgaccgtggatatatcgaacaccgcatctccaagtttgatactctcgccggcgttgccatcaaatacggtgttgaggtataattctgctaacgatttaggtttggtttgtgtagtgatggctatttccagctccagaatatttgactttggttaaggttgttgagtaatattgacatacaacggtatttttattagaggcaaaaggtagaattaatggtactggtaaaaagcattaggatttttttttgtttgtgtgggaattgacgcatgatgaagaacaacacatgaggaaaaagttatttgtcagagagagctggattatttctaaattgtataagcttcgcttttgatgctggattattcctaatcgttgttcttatttttttctttgtgttgtgaaactttctacttcaggttgcagatgtgaaaaagatgaataaccttgttactgatcttcaaatgtttgctctcaagtctcttcagattccgttacctgggagacatcctccttctccatgtttatctaatggctccttaaaccatgggtactaataaagcttattacttttaaatgatttattatttgctatcatttaagttccagtgatggattcttatagctgattgttgttgatgctttgttgcattttgtgttccaccatcagcagagcagttgttgatgctttgttgcattagtttgcattttgttgcattttgtgttccaccatcagcagagcagttgttgatgctttgttgcattagtttgcattttgttgcattttgtgttccaccatcagcagagcagtttacaccatcagcagagcattttgtttcttatttcttaatttattcaaagagccctataccagcttttcttgattggtaaaatggttttggtactttgctgtaaaagtctcagcgaaggtagaactaggatcctattttctttatatcacctgcagaactagaaattctataggaaacatctcaatttcgagacaaacaactagtgcctttagttgtgttggactgaaactgcatattatcattatggagtaatcctcttttcatggctctaatacatggaatcttatttgcagagagggatgttcatgccacgaaccggaatcaccaaaccatagcgaacaggaagtgtttgactcatttcagtctctgagattgaaatcttcggaaaagaaagtttctccagccatgtactcactgcaaggttattacgggctaaaaccagcagacagaacagtctctgatggaggatgcttcgagatgggaaattacaagacggaaacttctcatcatatcttcaacaacggtgataacggatatctcagacctttcccatccacaaatactcccttaaatcaccacaggaaatctagaagcttggtcaatgcgcttatcgaagaggttaaccaatcacctgataataatactcaagaaccaacatctgataagtttatgagaagacgccaaaaatctgaggccgatttttcatcccggactccagaacttgtgttgaaagaagagaacggtagcagcaatggcggatttttatcaatagctggaaaaggcttagctttgagatcgaaagcgtcaagcagaaccaatctagcagcagaatctgagaacggtaatttcaatccggtatcaatgaacttgatggatgctccagtttcagacagctttagcagtgtaagaaaatcgtcgagtgcatcgagtctacaagatccagatggtaacagcaataatggttcgttgtcgctatggccaacgtcaaagtggagcttgaaaccggatttgcttacacctgcggccattacaagttccatctttgatggattaccaaagcctttaactggtcgaagaaacaaaacggctctggactaaacacaaggtcagtttctggttatttataactgccttattcttttttggggtactatacaaatcaattgtcaaaagaagctatttagcttaatgcggagtaaatacaaaagtaaagagattagaggaaaacaaaattgaaggaaggaagaaagaaaaacttccggaaattgaaatttataaggaagcttctgatgatgtaatgattgggtcttttttgtaagttatattctgtaccattttctgggtgggggttgtatcgacaaaatctgtagcgtagttttattttatttttgatttaatgatacattgtcacaacacatactaaaatgtatttttaatgcattcattaaataatgcttttattaaagtacaaaggctctttgtatgtttggtgtacccttttttattcaaccacaactcgaattcagccaaaatgaaactgttctttatgctttttatatgatccatttgtttgtttactataaagtttctctcaaatcattgtctgattgaagaagaaagaatattgctttccagacataatcggggttgtgctatctaatcaattgactaaatagtaccgagtctaccgacgcacagtgtgaacgtgttagctccaccgctatgaaaatcctgaaattcattgccttcttctcaggctttattttgccattggctttttggcagttagtattatgaatttatgatccagtctaatttaagaacatatgggtcagttttctgcgagcagatctaacttatcaaattctctcaagaatcaataataaaatgttaatccaacaaatctacaaaaatttgcaagtgtttaaaaatataaaacatctaaccagacttcaatcctcgacctatctactatgtcaaatagacatgatacaaaaatagaaagtccccgttgatgactgcttctgacaccaccaatgcttccattgccgctcacgctatcggcattaccaccgctactgctaccaacgtgtcataccagctgctactatcaccgtttccacttgcatgaattttcttgtgatggccgtaatagtggtggcagcaacggttaaaaggatggcttaacatgttcgtagcagaagcggtggtgattttggctgtcgctgaaaaaaatgatagcacaactggtaacatatgttgtatttattgaggtagaagtacgaacctttatcctcacaatcagaaagttaagactaagcgttgttttacatttagccttaaacaattgaacgaaatagacatttttggcaacatggaacgatacagtttctggtaaattacatttatgcttataatctacgtttacttatggttataatctacttttaattcatgtagaaagcactagttactgaaatcactttctactttctaaaatattctattagatcggttcactattaataatatacggtttaaccagtttgggctcttcgttgctatttatttcccgaacatacgattttaaaaaaatatacttattgccttaatatccactaaacatctgattctgatctataagttttcaatcttccattttcattaggctcatgttttattttcagctcaacgcttttcattcaagatcattttaaccaaaaaacaaaacgaaaaaaaaaaacgtaaaacgagtatatgtttactaaatggtgaatcttcgacacactgtgcctttcaaagagagaatgcaaaagaaaaacctaacctgcagacttcagagaaccaatcataagcttctaagcctcacttagttcccaatcactttggaactctcctccggttccacaaaatttcccaataccctgaaacaagcacccaacaaacttgagattgtcgctagtcaattgtagcttaagacagtcgaggccagtttttaaactttgaagtaacatctcaattctcagatgagcacggttctcgaattcacacttcgtctttagaaataaatagtcaaagactagtctttaccttgagattacgccaaaactttgtccaaccaagacactcatctccaccaatccaagtccaaacgtgtaaacctagcaagagataatgcactgagtgttttatgtactgggtgtttgatgtcaacatacaaaatcaggaaaccagatatagaaagaccaaagcgatctacagacaacataaagacaaggccgatcaagaaactaaatcattcatacagaaaattacagttgatatcataaattcacaatgctggttaaaaggacatgagatttatgggagctggaaaccttatagattgaactagcagccatagacaagtttggtttaaaagactaaaagatgtttatttcaagacacaaagaggaaccaatatccaatacctcaagtcctcctcaacaaactctggataagcagtgcgcaaaataacgatacggatattcttgtaaaactggctcaatggagtggcaattgcttagaaatgcatccgtcattgttcctgctaaggctttcaagctagacaacctaggttatgcacagaagagacattttgtcagaaacaacaatgaagaaacttaagtcaatgagaagaatggcatcatctatggtttaacaatatgagctctcatacagtaatctcgtctacgaggaactgaagagacaagagacttcaccaaattactccgaagtgactttccccacaaacaaaaagaaacactagataggtcatcatataggggaccaataataagagcatattgacatacttgcacataataatttggaacttctcattgcctcactattgtaacaaccttagagcctaactacttccgtgtgcagacactatacatattggatgtacatttttaaaaaaatcgtgtttcagataacagtaaagaaagtttttaattagatggttcttatcagaaaaagattgcacccaatatattaggacttaaaagcttgacattcgttcaaggagaaaaatctgtgtatggttataggcctaattacaagatctgaggaacagaagtactaaccaaattagaacctagggcatatactgtgaagaacatgatccggtgatacattcgtcaggaacaattacaatatatagcaatatcctgacaatagtctgcagagttttgaacttttgatgcctctggatgtgaatataccgccaaaaagtccttcatggaagagaatgcaggttctcgatttcgaactgattgataacaatccagaaataagaaaatcagagacgaagaagcgaaaaagagagagaccactcgcagcttgctaatcaaagtgtaaaagaatatacaaaaggtagtctaccttaacttcaggatggcctgtactgagccgcggaaggtacatctggtcgagacagaagcatctgcgaagcaatattaccttgaatggcaaattaaaacgttaaacattgcagtgaaacgcataggatcccccaattacaattgaaatagatcgtctcacctgaaatcgtagagccaccttgtaagttattagcagcaagctgatacctcactgtccccgaaggtggtctttctggaggtggctgaaagacacctgtcgttgcaaataaaacgaccaatatcaattgaagaagaatcataaccaactgaagtagtataatgcccgcaagcagacatgtatgtgaacaaactgacatacaaaggtttgagatgtttctcgcatatgcataccgtcggtaactgtacgagagcctggaaatgggtttcttacacctatccaggctccatattgaggatctgcactacatccatttggaggcatccgccattcctcattcatatgttgtcgcccatcaactggctgggaaggaaaatggtaaggatgtggaaaggaggaccgctggggttcagattgaacaattcgacatggaagcggaaaatggctggatggtgctggggcaagattcctaatcataggtctctgaagaaaagaggtattgattggccgaagctgttggttctgtgaagacgcttcttgtttaaaaagcacgtcgctatttccatattctagttgcttggaggaaataaatggcaaaggttccccatagctgcacatccctaccggagcaaaagaagatgactgcggcattaaatattcagattttacacccccatcagcatgccttccatgtgcagcgtttacgggcactggggcaatttgattactctgcataagcaaaagtactggaaaatgtagcttgagaaattacaagataactaaatcacgaaataagagaaatcaatgggcttacagtggcaatgctagaatgatcccgctgcatagatatctggtattcatgttgcaatagtggatatgctgggggagcgaatcctggttgaagtggtaatgaaggatggctaggcatggacggtcgagttattgatgatggtggtagagcgatagattgtgcaggtgccaatggagctgttggtggaggtaaacaatgatcagagggaggtggtgctggtgccagttgcggtggagatgatgggggtgggggggaagaagggggttgaggagggggagatggaggcgattcgtgaggtagaggaggagaacccgctggaaaagaaggaagctcagttgcacaggttgtagccggtgagtcctctttcgcttcaatcccacagacatcatctttcagctgacaagacgcatcttccatttcaagcccaccattaacatccactacacagtgaggtttatcacttgaactatcatgtgcctctaacttgcctaaagcaaggactggctcttccatgtgtgtgattttaacttccatatgtgtgtttttaacttcctgtgatgtgcttggaagatcctcttcttcatcatctccaaaagtaagagaagctaaataccctggcagctgaaaatttgcattgctgcagaaaataactcgtttaacatataaatcaatagacaatagtactcttcagaaccgtactgaaactgtctttaaccattcagccttataaattttccactaagcttctacatgcccatcaactatgtcaaatctgaaaaattgaactatagaacaagataagtgtaatgcatacctcccatactcgtcaacaagcatcccttccatgtcccttagaggatcatctacagcacgctcagatctagaaggacgtcgtagggaaaacccaacggttttatcatcaccagaagcaccaagatcaccaatataacgacgcaaaagaaaatctgggaaaattttcctcttaagccacaacctcaacacctagcaggaacagttgattcactgactctgaacaacaaaaacatgagactgtcctcgaaacgaacaaaaggtaaaaggaaccttgcgacattgatgacgattttcacgagcaccagtccctggaggagcagcagcacctagaaggcgtggaagggctgcctgaacagtaggaatatacaaagagcgcgctctacctaaagaagattcgaaagcaccatgaactatcactttagtcttactagttacccaaaagacaaacgaagatattctctttgactccagacataaatacaacaataagagaaatatatcgtgaacacctcaggaccaagatttacctttttggctatgtgaactctggataatcgaatcaaggagaaagaacaagtccactttacggggaaaatgaggctcaatttccaactttcgaattagaagttccacaacctacaaaacacgataaaaatttccccatcaaacgctgtagatagttttgtcaaaacatttaaccaagttatacaaaggagaatttttagccggtaaaggtacattattttattgattctttatatgcagcctattcctaagtttatcatagaaaattctgcctggctagccttgaaagaaaccacagaaagaagaaaagtgttgagctgaggaaacacaatttaactcacctcattggcaatcccatacttggcacaatcaattgcaacgcgtgttgcacgtctaatactttccttagttctggataaagtctctatcattccctcaaaagtatctcgagaaatcgcagcctcagtggcaccactcagtgaacccccaactgacctatgccctgaactaaaccttctctcttcgttctcttcagtcccagcttggttacttgatgaggactggcggccatgatttgacggagtcaaaacttcttgatgttcctgagcaacaatcagcgtggcatcggcagcaggagatgaaacattctgaaccatgaaagggcttttactcgtctgcatcgaatcgatgttaagggaattatggtctagattcacaaacggtgaaaactgtgaatgtgcttgttttctttttgcctgggcagctgcaattagatccttcatacatgaagaagaagaatctgacatcccaaaactgaacaatggggcatttccattttcttgattgacatcaatcctatgataacaaaaaaaacacaaagactataacctccaagcaaaatacgaacatatcaatgacataggaaaagacaaaaaaagcatacacgtcagcagacaagttcacaaaagtgtcccttgacacttcaacatccagacgagttgcaactttcggagtgctagttggcttttctccaaaagctggtttgcttctctggtttgctgtctgagaatgagaagagcttactctatcagaaccagccactacgtccttggaagaatcaccatgatatttttttggtatgcccgcaccagagacttttgcaattttattctgtactgccaccagctccttggttgaaaacaactgaggggacttcttaggagatctcaaggtctgcttgacattctgtgggggcaatttgatgactggtttacccatataggagctgtttgaagggccctccacactatctggcattcctgcaccagcgacttttgcagttttattttgtcctgtcacctgtttcttaaatgaaaccagctgataagaattcttaggagatcttaagatcggcttgatgttcttttggagcaacgccttgaaaggttttcccatacgtgagttatatccttccacgctatcaggtagtgcaagtgaagcatccttgttatgtttatacagaggtactttccctgttttcacactgtctgtagatccagctaatagttttgctttaatagaagtattatgggacgcattagcacttttaggagcatcagtagaagctatgggaatattgctaagtcctccatgcactggagtctttgggtcttcatcatcatcatcgtcgtcatagatacaaaccgccctccgtctcttcggcagctgagcagcttgaaccttgatatcgctatcagaagatgaacttatcttctgttcagggtgatttgccccctctttaacgagagacccaggaaaagaggaaacacttgtgtgctccactgtctgtttccggcgctttgtataagcgaccatgtccttatcaaattgattttttcctcccagggcacttatccctaacacaatctcacgcttaaaaattgatacaacgccagtagaatcagatatttcagccttgccttcaccaacaggaacaagacgtttgctcttacattgtttttgatccttcgcatcttcagaccgtggcctcttagcagcacgtttactttcatctgctcctgatgcagactttcctagttcattttcaaacctctttttcttctctttcagcaattcttttggctttttagaactggcaatgttaagatccgtaaccaccttactgtcagaagattcttttctacagccatgatcttgtccctttttactgccatgatcttgtccctttatactgccctttaatttctgattaggaccaaggatatgattgtctgtagcagctcgactatcaggcacacgtttggctctaacctcatctttacatcttttattcgagtcatctgttgtcttcctgattatcctctgatcattgactaaattatttccagtaccatcactatggtcagtgcaagtgacattgtcaatcttatcatcaactgctacctttaaaatagggtcaggtgatccatgctccactggctcactacttggggatgtgtttctgttatttgatatcgatgaatcttgctctcctacatcaggatttatctctgcaccattattctcaactaatttaccaagacaaggatccgccctagaactaaacttatcagattttccatcactactagcttgattcaaatacttaggcttcgtcacactaggttcaacagcattcaaaagagcctcattgcctactatatctgacttttgcttctgcgactcttcaaacgcagcagagatttcctccacggcttgggaaaagtacttgactgttttaccttgacatcttgccgacagtttcttctttgtctcgctagtgaagggttgaatatcaggaggcgtaacaaaacctctgcattaaaagaagataacttggtcaacagctaaatattgagtaatgaaaatcacactccaataacaagaaacaactaataagagttgttgtcatcaggaagggaaatgcctgtttatagttaatggattgactagacaaaaagtgcatacagctttctgggtcatgataaaatatatctcaaaacaaacagtaaacactgatgaggctggcttacatttcccctgttccgtaaaactgaacgaagtgtttctttgggtctggtgcttgattccaatcttcaggctggccgatctgaaacggaaaaccaattagttcacaggagataataaagtcaaaatgaacaatcccacacagcttaatcagagttaaaagcacttcaaacaaattcaatgctctcaacataagagatactacatagcaataagctagatgattatactactggcttcaaatttcactcagtttcagcacaaaaagagattgctttggcatcatactataaacctgccacattataaaatcctactaagatgagacattcaaggaggaaacacagccttaaatgtcaatgaggagccaaactaagccaaacaaaaaccatgatcatgattcatgaatcaaagcgtgatgaaaccgagagagcgcaggacacaaaccttagcaggccaagcagggaatcctttaactttagcaagaacgagatcacccaatctcatctctcctatcgccatagctttgttcgctcctcttttacgcccaggagccattggcgaaactgactacaaaccctaatcacagctcagatagaatcacaaatcccaagcaaaacccgagaatcaataagaaagtccaactcttcaccggagatttttcttcccacacccgttaaagagaatggagacagcaagggcttcaccgtaacgagtgagaggaaggagttgaatcggttgagaaagagagaaacttgaagagtgacggtgagatttagggcaaaaaggtgataattttcgccggaaagatgacgcaacagagaaacttgtttactctggtcgccgctttttttcctctacctccccttgttcatatacgttttgagcagatcattatttttttcattttttattccaaaataattaaatatgtggccttttctccgtaatcctttttccaacttctatatgggcttctcatgagctaaagcccaattttatttagttgggccgttaaaaaaaaatgaattgtgatgagaaaaaacaaaagcgaattgtaaattgaaacttaacgccagtgattttctttttttaactgatagcttaaaattatcattagattttccatttttgctagcagcttaaagttaacgtcaaattattaatttccattttctcactggtattagattaaaattcattttatagtagtatttgtctgaatatgtcaccatcgtaaagtcagataggtgttcgaagaaaatgtatatttttaaaacgagaacgttattcatgctgcaccgaaataccgaatattgctgtaatttaattggtgagatgatcaaaattactgtagattaaattgtcgtcagattcaaagatattggatcataaaatacgttacagaatttggtttctcaagatttacgagtaaaatatttatatagaaacattaatttattaactgactgcagatgtcagtacgatgagtaagatatttgttcgttaaaaataaaattaaagatggtttatatcaatatacaaactttgtgtggatatacctattgaagaagagatatcaaccaagaagtttgatcgtgtttctttcgtttgcatttgtataattgtattgtattacctgaccattactataaaaaggaatgaagataaaagtgtttttgacttttcctaagtattccattacaataaaccaaagtaacaaacacggctctaattcaaagtcttcaactattcttgtccgaagttgatctttcgacttctattggaattccaaattcctaaactttatcgactagttctacattcttacatggagacaaatatttataacaaaagaaatggacccagaaagagaaactcatgcacgtgttccttgatgtatacacgtgacatcactgaatatacatatcccaaacaaaccaatccaaacttggtaaaaccaagaaaattccaagtttacaacaataggctgcttaaagaaaacacaattataaattatactgtagtgcatccattcataatcgatcgatcatcgttattaaacggaaacactgtttatccctgcttaaaaataaacaaaaaaatatgaccaaaccattataatatagaaaacaaaagaaaaaaagatcgtcatgacaacgaaacgcgattttgccgtccaagaaacccgtccaaaacgacttttcttttatacgactccgaattcaaatccggcacagaagcagaaccgttgcgtttgcgtttggccaacgcggctgcgtctctgacacgaggtaggacgtaacaccaagcggatgtacagaggatcgcacagagtcgaccccacactaacataatcatcaacgtcaatataatgatcgatatcccaattaccgggtcaaaaggtttgacccttgacccgtttctcgaccgagttggtttcaagtcgggtttcccgtaacgggatgaaatagaagatatccgctctgtacacgtgtcttctttgaaggaacctaacggttcgatgggttttgatcggtcaggggttatgtctcgtaagtcctttggttttgtctgaaaaatatcaacaaaaatttggacaaaatcaaggaaactattttgaaaattcaagaacataaataaatcatgaccaacatgatttaattgtctgaaaatgtttttttttttttttttttttttgccaattcgacagaaaagtgaaaagtcacaactttttacgaaattaagatacctcttttgtttcctgattcatggctttatcatcaaccggaatatttttacgatcagttatacgacgtatcacggagaggggtttctgcttatcatcagtttcatcttctactctcgaagtaggtttctctgtttcctcgatcggcgacggtttgatctcgctgttcttcaggcggaacttggaacacaaaaaccaccgagggattcgcttcttcttcatcttcttcttctcaccaccgtctcccttcgtaaccatcggcttgtcggagtatattttccgggagaatccgaaacagccgaggaaatacgaagaagatccgagtccttctcggactctcttctctgttttcgccattgcagtggaattgaaagaaagagaaatgtttgcattcgtgcgaagactttgaaatatcgctcagagcggttgggttttatcctctttttatttattttattaaaataatatttgtcactgttgacacagtttcgaggaatcgacgagaataacacggtgacataaattattactacttataataagaaactgggacaggactgtatatgtatgtacaagaagttgtatccaaaaaaaatattatagaattttttacaagataagatagaagggaaaaaaaaaagataggaagaaggtttaacattataaatgtacgtagatttattcacattttgttatggatttttttgactaacataaggagattttttgtaataaagtaatgattagaattaaatcttacatttagatgttaattttataaaatataaaaatccaatttctaagtttctttcctcaatatgtggttggtccagtttgtgggttttattatgccctcgtactttgatcacttttggcttcatgaaccaaaaagtatagtacatgttaaataagatatacttcataatattaagtgagatttattgctgaaaaagaagaaatttatgtaatcaaggacagtaaattataatatgtcataattttcccaattattgttttattggattagcggggaaaaaaaaattactattgtatatatatataatctttttgacggcatcgttttttttgggtgacatctactactgtatagtattatatccctgattcctgagtgttagcggtacaaatctgaatgctaaagaaatgacaaatacgaatgtgttctttattacgctttcatcaccaatccataccagacgttgtatatgaataaaaaacgtatacaataacgaaccacgttattcaacacggttttaagattagaacgaagaaaagactcatcttgagagaattattaatctattaaataaagtaaaccaaagtaaaattttgatataagaaaataagtatcgtagtgcccacgttccaacttctacgttggacatctgcgtttagctattttctatatgacccattcgaattcatctggatatatttttctttggcaaattactaaagtcatagtgaatccattaagaaatatgtacattttccttgttttatcatttttttttcccaactggacctacatagagattcatatcatccatttcatcacattcaatgtagaccctaaaatataagagaaatgacaaaaatatggactcttttgtagaatacaatatatcgcaagttacaattattatatgaacccacttaactaccaaatcaaaatcaccaaaaaacaatcacctgttacaattcataaatctcaaaacacgaaccactatatatacaccaattttataccctttatgtcaggcactcagcagtagtagtggtctatctcagagacactcctcttgaccatattcaccttcaagccatgcttcatgtacatagttagagccatctttggctcaaccttatgaccacccttatcatcaaccctaaccttataccggtaaataatggcggccgctacatatctcatttggtaatacgcaaaatccttgcctagacatagccgaggaccaccattgaaggccgtgaacttataggccgactcactcatgtacctgccgtctcttaaccacctttctggcttgaactcacgacagtctttcccccaaattgtttccatacgtcccatcgcgtatattgcatatataaccttttctcctttttttaatttcgtcccatctggaaatacatcgtcttcaagtacctacaaattattttactcttgtaaacctcatgaaaactatatgtcaataaccgaaatcgaataaaagagaatcttatgtaacccaagcagtcaaccacaccaatatatcaaatattcctaacaaattcacttttaactatatatcagaactaggttttactatattgattaaaactaattatttacttatggataatagttcgtctcaaaattcgaattgtacctaaaaggctaaaactagaagcgagccaaaattttcacaaaaaggactaaaaaaaattccggatagctgaaaaaaaaagaaccaaaaatcatattcttaatgacttcttgggagacaagtaaatgaaacagagcagatacctctttgtgatcgactggaacagagggatacaatctaagagtctcagacaaagcagcttgtagataatccattttcttgatctcttctggtctgaagacgggctcatattccatgttcttctttgtatctccatgatcaaccctctgctcaagaatcttgcaaattcccatcataattttctcctccacttccggattcttctcgattaaccagaaaaaccagcttagagccacagaggaagtgtctctcccagcaagtatgaagttcacacaaatatcacgcaagaacttatctgaaaatttctgtccattttcgtctcgtagacccataaaaatagtcaagagatcaggtctcttcgcgatttcagtctctagagacatctctttcttcctcgtccggattacttcttcagcgaaatcatccacaccatttattgattcctttagcttcttctccgttcctaaattaagagacctcatgagcttccacacgaatttaggcatcacaaatctcacaactgttgcttctgttgcgtcctcgaaggcttttgcaaaaggaatttcgggtagttttggactaagacagcctggatcgaccccgaaagcaatcatgcatacattgtcgaacgttagtcttaacaaaatgtcctgaagatcaatctttccggaagtttctagaaccggcaaaagtcgattatgcacgagttcgtgcaatgattgactggttaattgtctgaatttagccgaatggaattcgacacttgctgctttcctttgtcgttgccacgttccgtcatcggtgttgaaaatcccgtctccgagtagatcttgcatggtctcacggaagtaagaaccctttgggtagatagagaaacgggtcttgagaagatgctcaacgtttcttgggtcgcaggtaacaacgcagttgagggtgctaaaccaaggacctctaaaccggaatgtcccgttttggctgataagaacatcagacagccattcgtatatgttgcttcgtaccgcggatatcaacgaaggaagcatgccaaccaacggccaaacgggcatcccttggtgtttcttctggcgcaaggaatgtattgtcgcaaacacgaaaaaggcaataaagagctcaagaatctgaacatctctcagggaaaacagcctccttgaaaccagaagttcgtcgcttccgaaacaagaagaggacacggcagtagccgtgagattataagaagaaaaactaagattcatagtgacaaagaaggaacaaagaaacagagtgtgtataatttttttgcagagagaaagagaaagagagataagaaataatgaagttgttagttaatttagtaggtgaagaatgtgaaatgagggaagaaggatttaagacgcataagtttcgtgtttggctctcaatgtgaaattgggtttgatttggtgagctaaaaaaagttcgttgctcttttctaacggtcttttaaatttgtgtggctctttattctcgtgttttgctatgttttcgttttggtcttttgaaaggacgaatcttttggaggggattaactagaaaattaggaaaattagaattagggttttagacttgaggattgttgataaaagagaaattgacaggtgggtagtgacggatcacctaagttcttgtttatttgttatacactttattttattttgtcaaacaacttgtttaatttatacgtgtggaaattggaattggaagaatattaatagtgagtaattcaaataaacagaatttttttggatactactgtactattttaaacctggcggtgaagccgttgttgtttgaatttaggttatctgcatatatctggtgaataattgttttcgaacaatttgggcttagaaaacatatgggcctatcaataaagtatcgggcctttgatatatataaaatttcattaacctcattattaatgtattttgggccttacaggccctctggcctcttctaggtgactatagcatcaataaatgattctcattaagccgccaatttctctggcctcttctaggtgactatagcatcaataaattattcccgagacaattgcgaataaaccactttctttggaaattatcattgagatcaacataaaacataagctttgtttatatgacaatgctgttgttttaaagctctacggtagtactacacatgtaatttaatgaattttaattgatttctaaacagtacgagcaatttgtgtgttgaattcaactttgattatatggtttataaaaccttgttttgggagatgaaattctgaattaagaaaaataaagaagaaagcatttaatttgccgatggctccatctccatagccatgtggttcagtctccgatgatgacatctcaagcgttgaaattcaattccatctttctgtaaaaggtgagaaaattggtagtgaaccaaccatgttatcggagaccgtggaggcacattacaaggaaatgattatgaaatgtgtttattgttataacattttcacgtgagtatcaaaaaaaaaatctcatgaaaaataaaagacttttaaagttttttttaatataaaaaaagacagtataaagtagaagaagtgggggcgttttctcatctgctcttcatttcgataaataattgaaaagaacaaaagaaacaaaagagacgagaaagagttttggcgatgaagaagaacgcactttggctactgtgcattctggtgttaccggcgatagcctgtggtaggaaaccggagaagaaggtaacaatttcatcctctgggaggaaggaagatgaccttgtaaccggtttgcccggccaaccaccggttaacttcaaacactacgccggttacgtgaatctggggcctgaacagaagcaaaaggcacttttctattggttcttcgaagctcaacaaaactcttctcgtcgtcctctcgtcctttggctcaatggaggtcagtttctcttcctctctcgctcatttacataaagtatattttatttgaagtagtaatacaaacttatcattgttctcaattggaattttcattcgaaacttcattgtttctgcggttttacaaatatgtttaccaattttaaaatgatagcaccttttttgaaacggatgatgtgatgattatgtttgcaataaaaaaatcagtgtaatgaaagattaatgaactctcaagctcgtgcctcgtgggccatggtaattaggttaatacatatgtctaatcacaccatcacgtattgaccacaaaactctgtgcctgcaggccgtgatgttgggaaaataatagataaaacttgcacgaaaaagaaaaagaaaaaacactaaacatagagaaatgttttcggcagttgtattttcttggatacataattgaatttggactaaaattttaattatttatatagctaactcttagaaaacatcaagttgtgtacattgtcctaccaaactccatcgtctgtctccttaccctgccttgtaacttgccaagcagttcctttcgtttcagtaacaataaaattttactgtaattgtatcgcaacgagatagtaaagggtcgtttcgatgcagttgtttttgttttaaattttccaaaaattacaagtctatcaaatagccaaaacttaaagtagtctattgtttgtacagttatatatcgctattcttaataatctgtaacttatagatgccgtgtatggcttgataaaaatagccagaaacaccattaagtgatacactgatactattcaacatttttgttccttactattgcttgatggagaagtgataacaaatctgatacagttgggaatgccgacaaattttaattgcctactttaataatatttcgttttgtggaacgcacttcaacaatctgtagtctgtatacggtggaacgagtaggttcttgcctcttcgggacaaatatagtccagtcctcgttttcttaacgtgaaatctcaaaaccatagcttaaaacaagttgtatttgaaaatgagcttcgatctaattaagtgaacaaaagttattcacaaaaattaaaattaacctgtttaaatacatcatattttttcgtgaagattcagtgaaataaaacactatactataacccaacaacatatttggaaaaaatatcaacgaagtcgtatatggtccggctctctgacagatattggacttgtatcattcaatcagtgtcctttttgtgtaacattcaatgtccaaatcttgtttctagagtgagtaaagatcttttgtctgtttcttctttttctctcggtagttgtacattcaatttaacgaatttactttatacggtttgtcttttttcccacacggttcattccaatattaggatatttagggatacgagaaatatcaacctagtcttttttattggggctagaaatcggataagatgttgaatattcaattatacacttagaaataaacaaaaagctatgtctaataataatgtggagttgtgtacatgtctagtttgaacagaaagattgaaatttgttaataatgaggtattacctttataggatttgcgtgattgaagggtacacacgaatccaatgtaatcaagagcaatagcaaaatctttagttatttaatttctgtatacgaaaatgatatttgaatcttgatagacaactcgggacaaaatactgacgtctagctagctagtctcattaattttattttttctcgacaaatttagttgtttagttttggattttcttgacaaatctagcgatggaattgaaaatagcaattttctttagtgaattgtattattacatatttggtgaaactcttaaattattttcatcagtttaactaaaatccaaaatatgcaggaccgggttgctcatcaatagcctatggagctgcacaagaactaggcccttttcttgttcacgacaacggtggcaaacttacctacaatcatttctcttggaacaaaggtaaaatgaattattaccatactatcagaaacatttgaattctttagctaacatgtatactaatattaaccgtggttacattaaaaaaaatgtttgtgcagaggccaatatgttgttcttggaagcgccggttggggttgggttctcgtataccaataactcaatggatcttcaaaagcttggagatgaagttactgcatcggactctcttgctttcctgatcaactggttcatgaaattccccgagttccgatccagcgagttctacatctctggcgagagttacgccggtaagtgctttatccgattttaattcttgatttatgaattatatcacctaatataaaagaattaatcttgtatattaatattatataaaacaaagattgaatcacatgcttttgatcttcttttctcaggtcactatgttcctcagctcgcggaggtaatttacgacaggaacaagaaggttacgaaagactctagcattaatctcaagggattcatggtatgcactctatatatatgtatactactagtaaggttacttgcgaaacgaggaagcaacgtttcttgtgctataagtaaacataaaaggtattcgtttgatgttgcagatagggaacgcggtgatcaatgaggcaacagacatggcaggactagtggactacgcatggagccacgctataatatcggacgaggtccacaccagcatccatggctcgtgcagttttgaggaagataccaccaacaagaccgaacaatgctacaacaatttcaaagggttcatggatgcttacaatgatatcgatatatacagtatctacactcccgtttgcctctcctctttgttgtcatcttctccaagaaaacctaaaatcgtcgtgtctcctcgtctccttacttttgacgtacgtaatctacaatacaatatagtatcattgtaacataatgtaattaccataatctctcttcttactttttcttaccaattcttctcttttgatggtttaggatttgtgggacaagtttccggccgggtacgatccatgcactgaaagttatgccgagaattactttaaccggaaagatgtgcaggttgcactccatgcgaacgtcaccaaccttccttatccgtactctccttgcaggttagtcctccttacgttacgtggtactaactaaaattaatagctagctagagactttgtatgttaagtttaatgtcatgtttctaatgaacaaagtatatatatatatgatcttgtgggtgtgattcagcggagtaataaagagatggagtgatgctccatccaccatgattcccatcatacaaaagcttttgacgggtggcctccgtatctggatctataggtatctatatctttctttaactgttttaaaaattacgtgaaaaattcatatatattgtcaattagtttaatgttcactggttcaatgttggctatagtggagatacggatgggagagttccggtaacatctacacgttatagcataaaaaagatgggacttaaggtcgagtcaccgtggaggtcatggttccacaagagtcaagtagctggatgggttgagacttatgccggtggactaaattttgtcacggtgagaggagccggtcaccaggttccggccttggctccggcgcaatctctcacattattctctcacttcatttcttctgtccccttgccttcaaaacggttctgatatcagtaccgtcaagtcatgatggcaagttgttgttgttgttttggaaccttcgtttagcactctcccaattgattttatgaatttcaattgatgaataaagattcttcaacttttagttatataataaggcttttacctttctacgcacgtttttcgttgtttaataatttccagtatttcaattttcaataatcaacaaatcagtagtctacttcattaattttggaactcaatgaaaattttcaaattaattttaatatgaatgaaataaattagggggagacggcccttaaggcccattataaatttagagggccattaaggcccattaacacaaattaaacccagtcatggagctgaggcagtagcgttcgtttttttggaatcaatcaccgaaagagatctttcaactgaagcacctgcgattcatcttcttctctgcccgtcgtttcaacgtgaggagaaaaaagaatggcgtttgcaaaaatgatgtttcttttcggaaaatttcagcaggtgaatatatgaagttcttatcttctaatctgacttatttttgaaacttcctctctggtacgtgttttttgatgttgggtatgaagaaagttcgaggcttttcaaaggatttagtcttcactgtaatatgattcctgtgactatattttgtagcttgtatagacttcagaacatatgtgagtacttgaaaatgattgaattctcaatgatttgctttctgtccataaaatgtaatttgaagttgctcatacgataataataggcattgtcaattttgattcaatggtgaatttgcttttaattttcttttcagggtgttggtgttctagcaaagagtaccacttttgctaagaatccaaggcaactgcaatttgaagccgacattaacaaattgtttatgtttacaaggttggtatttttttggtatagattaagagcttttgaacaagatttataatgttcaaggatgtaggattatcaagtatcaacttgtctatttattgactaagcaaagagtcagtctctgtaattgttggagattttttccactatatggctcacggagtttctctgtgatatagctataatcgtttgggacgagatgctgaggaggctgatgctgaagagattattgagatggctggtaaagccactttctctgagcaacagaagcaagttcaggagaacattcactaccaactccaaaatttttgttcttcaatgaacgagattcttcttaccaatattgacaaaacaaaggatctaaatgagccaggatcagaatcgagaagggacaacattgtcccagctgcagacaagcccagtgagtctaaataatttgtgttgtgaactaataaaactttctagtccttattgtcttaatcatgtctcactgattcttcttcagcacagttgttcctgagactaaaccgctgaaactcgatgaagtctcacatcgattaaaggatcgagttgggtacacccttgagatcaaaccatcgttaatacctcacaaagacgcgggtcaaggttgttttatagaaggtgaagcagatgtgggagctgtcctagccttttaccctggtgtgatttactctcctgcattccacagatacattcccgggtatccaaatgttgatgcacagaactcatatctgatcactgggtatgatgggacggtaataaacgctcaaccttggggtcgtggaggaatatctcgggaagtatggaacggctcctttacaacgcctgagatcagaacagaagctacaaccacggaaaacagttcagataaggtatggaagatgctgagtaggccgcttgaaggttcaggtggtgtagaagcggttattgaaatgagaaacccgttagcgtttggtcatttcatcaaccaccctggtaaagaaatggaatctaatgtcatgatttgcccttacgacttcctgttgtcagagacagagatgcgagcttacattccgaatgtagctttcgggaacacaggagatgtaaagatggggagatttgaaagcttcttgtctaggacaggaagtaatagcagtttggatgctcatgtgctgaagacaattgttctcgtggctacaaaagcgttgtgcaatgaggaactgatgctgaattacaggctgagcaattccgagaaaagactcgagtggtatattccacttgatgaataagaagatcggaggaaatgaagctgaagtctctggattttattttgtctctctaatttcttgtgtactagtttcatcgtgggacagaaaaaaaggggtacaattgcaagatgaatttaatctaaatacaacaaaacaatcaataaacaaaaggtcatgtttctctcaaaatcaaaaaagttacaacagttcggaggaagaaacgggacttcaagatgttgaatcactcctaaacactagactttgtccgtgtcacatctcttcctcctcttcttcgaatggctcagttgccgaagaagccaggaccagcacgagatagcaattcttgccccgcgtcttttcccatcttcaccatgtcttcatacacgtatggaccttttcttgaggtctcaagaactgacacaaagatggaagatatgagaaatgagtgatgtttctcaatgggaaatgtgtttatcctctcatgtgttattgtagaaatgttttcatacctttagtaccgtcaggggaagcaaccaatcctctgaaaatgcagttgccttcttcgtccttggatgcgtatccagcaataggagtacggcatgagccatctagcgtttcaagaaaagctctctcgcatgaaatcgctagtcttgtttcctcgtggttcagtgaggctaagtaagttgcctacagatgtaaaacaccagtccgatcatttactacaaatcatagatgccaatccaaagatcccataaatagaaacatcatcaaataatgtaaattccaagagagcttgacataccattttatcatcatcagttctacaggcaattccaatagctccttgagcaacagctggaagcatttcatcgagagataagatagatgcgacattctctgtcatactcaatctcttaagaccagctagtgctaatagagttgcttggacctttcctccttgtagttttgatagtcttgtctgcacattacccctgaagttttcctcaacctgcaaaaggcaataaagacatgtatcaataaatagaaagacaaaactgatccataagaaatggcagtttctatgttgtgatctatgttgtgaaaacttacatgtaatgcaggatatttgtggagaatctgcgattttctcctgagagaagctgttcccacaacgcttccagctggaagctcagctaacgtggctgcagttagacaaataaacgcatctcgaacatcctcacgcggaaggttacaaggtaaaatcgttttttctggtaagtaagttgggacatctttcattgagtgcacagctatgtcaatatgaccatttatcaaggcctcgtctatttctttggtgaaaagtcctttcccaccaatatcagcaagcggttgcgaaagaatcttatcaccagtcgttttaatgatctcgatatgaatagctccatcttcaacgagttcagggtgtttcttcttgagcttttctcgcgtctcgtatgcttgagcaagtgctagaggactgtcctacatagtgagagtattaagcagaaaataatgaagataagacgcatcagaaactaaactcattcaccattgattcatttgttcttcaacaacctgatcttttggatcaagacagagaatgtcaaaggaagaaccaaacgaacaatttctaaacactagggtgacaaattatacactataacatctaaactaagctagaactgacattgtcaactataacttcctcaaaacagggaaacggatccgaccagaggaccagtaaaaatcgatacttggaatatgaattaaggaaaccaaagccaatccaatagcattcaagcccctatagactcaaaagagttgacaaagaataaaaggagagatttttaccttccccttgtgccaattctgatgatagcagttcgggttttctgttcaacagcaacacaagctttcacgaacccagaagagctttgtttccggcgacatttacctaaagctggagagctaatctgcggaagagagaatccgatagcggagaccgagccaagggagcaggtgttgacccgggaagaaggttgacgcgtgagaacgactttgtgagcttgtgagagagatgacgaagcaatatccatggattcaggtggaggagccaaagtgaagtgagatttggaaatcgttgggagagatgtagagggaaaataaaatgaagagagatcagagaatttcgcttcaaatggagttgatgggaaaatcttagctctcacctctatgagaggatattggataggataattagattttagagctttattcctctacgaatgactcataccagattatggtgttctactaccttaatcaccgtctgtttcgcaatctcgtcgatttatcttttattgggccggaaagtaagtattatcaagggcttagcccaaacgctttatgcggttcacgcgtggaatcgacgcgccgtcaccgtcaacaaaattgggaagagaatataaaattagggcaagagagaaaaaaggttgaatcgaaacagatcggaaaatcgtcgagagagagagagagagagagaatgtcgtatcttcttccacatctgcactccggttgggctgttgatcagtcgattctggccgaggaagagcgtctcgtcgtcattcgtttcggccatgactgggatgagacctgtatgcaggtctgtcaaacgtttcttcctctcttatctttatatttcgatcttgagcttgattatatgtttttgattcgatttgtagttcatagctctcgatttggatcctttcgtactggaaaattgcgatactttgtggtgattgtttgaaaattgtgttccttagctcagaactgatgaaattagggtttcactcaaaaaaatcctagttgttggagttggttactatgtagaaggttttgaatgtgtccgttttagtgtccatttctgtgatttatgcttcgttttgttcttgcgaatttggtgatcttggaatattccggatatgttgtgttgattgtttgaaactttagccattcgtgtgatctttattatcttggaactgattaaaattttagggcttcacttacaattgattctagtattcagtttctggtttctgttttgattcgaagtttttgatttttgtagatggatgaggtgcttgcgtctgttgctgagacgattaagaactttgcagtcatttatctggtggacatcactgaggttccagacttcaacaccatgtacgagctgtacgatccttctacggtcatgttcttcttcaggaacaagcacatcatgatcgatcttggaactggtaacaacaacaagatcaactgggctctcaaggacaagcaggagttcattgatatcattgagactgtctaccgtggtgcaaggaagggtcgtgggttggtgattgctccaaaagattactccaccaaataccgttactaatcgagcttcccaacactatctagtttgttaaaaccattgagtctagtgattctggtcagctgaaatatcccgtgaactggtttcatttcatatatgctttgatgatgattgtgattctggtttttgcttactgtttcggttgttctccatttatgtatgtaactacttgcttcgaacatgattcagtgaaatgaaatttggaagccgttgggtttatgtatatgcatctttgatcttcctgggttatgtatatgtgacaccatttgtctaccaagtaccaacgatggatacgaaaatgaaactttttactattgaaagattttacagaatacgtttattcataatttttctgaagagctcaatgtttgagaaagattccagaaagattttaaataatttttagttgacagaatgattgaaataaattctaaaaagtccatcatctagaaataaatgggtttgggctaaaattgagaaaagtgtagcctttaaaggaagcctcttttgtcggcttttgatctcagctgattcttcaaaaccgagctccgctgaattttctttgctccatttccgtcttcacacagtttagggttcacaacttgattcggatcgaaagcaccgagaagaagaagccaatcaatcatgtctagacaagtggcaaggcttatcggatctctgtcatcaaaagctcgccgttgttctaccggcggctcagaggtttttccgtcatgccagtctctcacttcgttgacccaatctcgctccttcgcgtcggatcctcatcctcctgcggcggttttcgttgacaaaaacacacgagtcctctgtcaaggcatcaccggaaagaacggcactttccacactgaacaagccattgagtacggcaccaaaatggtaaaatcctgattctttttatcttcttcgaattgggtatttctccattgttccgattacatttggtttaggggttttctagtgattttgacaatgagtacacatatatatgctttttcatcacctaaattccattagatcctggagatgagagattgctttaaagcaagtggctttactaatttacgttgtgtgcgtttttattgtgtaataataggtggcaggagtgacaccgaagaagggtggaacagaacacttgggtctcccagttttcaactctgttgctgaagctaaggctgacaccaaagccaatgcctctgtgatttatgttcctgctccttttgctgctgctgctattatggagggtattgaggctgagttagatcttattgtgtgtatcaccgaaggaatccctcaacatgacatggtacttattattatcaccatgcctttgattttgtttgttatatctccttcagtgcttattacataggattgaatactgatataattatctcttgtgcttctctctttgacttgagtgatgtttctgatttaggtacgtgtaaagcatgctcttaacagtcaatcgaaaactaggctgattggtccaaactgccctgggattatcaagcctggtgaatgcaaaattggaattatgccgggatacatccacaagcctgggaagattggaattgtctcacgatctggaaccttgacatatgaagctgtaagttttttttcttatgcttgatgcttgttctctgtatccatctctctcaagtttatttcaccatagtctttagcctgggaaaaatctccgaaattagttttgttttctagtataaatccctccaaaggttagattgaacatggttcttttgttacactatggagcttttgaaaatttatataaacaggtttttgttggttctagattttgaattaggccttatatttcttacgatttctaaacattgtttcggttttgactttcctgcaggttttccaaacaactgcagtgggtctaggccaatctacttgtgtaggaatcggtggggatccttttaacgggacaaactttgtcgactgcttggagaaattctttgttgatcctcaaacagaaggtaaggttttcaaactggagttatctagccatatcttaattctgtttcaccgttttccaattttatttttcctctagatagattaactttaaagatcatttagtagaagaatgaccacatacttacctaatctctttaggttatgaaattcttgttttagaaggcttcgattcctctcttttcttagtttagttggtagctaaaatttaaaaactaagaaacaactggctgattcaggtatcgttctcattggagaaatcggaggcactgcagaagaagatgctgcagcattgataaaggtaataataccactgagaatctctttcatcttggtccatctctctctattctcattcttaaaagtaaaattcaaattttgggttttggtgaatataaacaggcaagtggtactgagaagcctgttgttgcttttattgctggacttactgcaccaccgggtcgtcgaatgggtcatgccggaggtattttcataagctatctgaagcctaaaccggatttaatatttttggtctgttgctctcactcactcctctggtttttgtttgttgcagccattgtttccggtggtaaaggtacggctcaggacaaaattaagagtttgaatgatgctggagtgaaggttgttgaatctccggctaagattggatcagcgatgtatgagctctttcaagaaagaggtcttttgaagcagtgaagtgaatttcactagctttcgcttctttttttccatcttgaaaccttcaagaaaaaagaaaagaaaaaaaccctaattccacgccattgatggctgcacacttttttggggtttgttttgctatattgatatgatttttccaattgaacagtgataattaaaagagattcaaatcttatggcattggattatttttaatgttatcttccagtacaagaaataagagtgaagcaatgtttctttacacaacattatatctttttctagcacccaaataatgagtagtaaattatctgaacacagctgaaacttgtaatgtttttggaactaaaagttgggttatattgccaactgcacaaaccatcagaattgttctataactctttgaagtttgatcacgtaacataatttagctaaaccttttatctaggaaactatatatgcaaacattgtggtggttgtcaagaacaaaaacaatgattgtcttgatcatcatagtcaacatcgagattcatccaagctccagtcagctgtaacactgcatagatcttgtcggagtgaaaatgtgttttgtcatgagcgatgaatctatgtcgtgttccatccaaatcaagtatactgtgccctgcaattttcttcactcctttcttctccattgcttctctcatagaccgagctgccctaaactgcttgttgatcgcataaacgtttgctagcccgacatatcgtccatcattatgtggttgcaactctataagcttctttccaactgtttccgcaagctccaagtttccgtgatttatacacccgttaagcaaagcacccaacattgaacccgtcggttttatcggcatttcagatataaaatcatgtgcgtctttaactagaccagctctggaaagcacatcaaccatacaagcataatgctcgctctttggttccgcaccactttccttgagactcttgaagaaatgccacgcttctttcactaatccgccatgggaacaagcagcaagcaagcacaagaatgttatctcgtccgggtcaatctttgattctcgcattttgtgaaacagttggagcgactctctaatgaacccgtgactcgcaagccctccaatgatagcattccacatcaaggcatctgtttccttaacagatgctctataaaacacgctccaagcgtctcctatcgatccgcatttcgcatacatatcaataagagatgtctgcaatataactgttaacggcaaatgcacatcgagtatatagcgatgtacagtctttcctcgatttagcgcacccaagtgagcacaagcgcatataacgctaaccatagtgacttcatttgcctttgatgaacccattctcatcatctgatcgaaaatttccaacgctttgttatattcacctctttttacatagccatcgatcatagaactccaagtcacaacatctctctcactcatttcatcaaacaccagtcttgctgaaacaacatccccgctcttggcatacgcatctaaaatagagttccaagtaaccaagttcttatgaggcatttcatcgaacaacttgcgcgcagaagcttggtctcggaacgaaccatacatatgaataagagtattacatatgaacaaatcccactcaagcccagatttaaccacggagcaatgcaaagacccaccaagttttctgttcgagagacgagaactcgacttcataagaaacggataagtcatatgatcaggtaataacccgaacctcaacatctggatatagacgctgatcgatttctcggggtttctgctattggagaaacctcgtattacgaaattccatccgtaattcggaggatcagatagttttgacaagaatttgtaagcgtagtcaacgtcgcctgatgaagacaaagcagagaaagacagagtttgagaaacaaaaggctcttcctcggagagaccaagtgtgatcaggagggtgtgtattttgtacagctccgacattgatttgcattggtgacgcagaatcgatttcgcaacgagagacgatgatgatttcaacattcacctctttaagaagaacttcaacatttcaattctagtttttgattgaagcggtttattttaactaacgatttgaaaagttttgcagataaacccctgaaggttttgccttaggacattttaaccctgatctttttgtttgtttttgttttgtttttttaatagcccaaatgttttaatcggaacacaacgtaccactttatttggttattgggtgatttgaactgcaaaaataaaaacacggtttcatttgcagctctcttctttgaatcttcatcagacatacaagtactcagaaaggaatagaaaaattacaaattttttatttattaacagacaaatacactgaatggtggattccaagttatttctacaagggtctgattactgaaagagatttactatgaaatctagcaaaataaagctaaccacagacaaaaaaaaattactgctttatccaactggctaatcctggcaagcatctcaggttgatatcttgaatttcatctgcaatctagtatccaaatgcaactatctgagcttgaacattgcgggtagagctacgagtaactccttgaggaccggtattgaaaatcagaagcttctgcaacaggtttgtttatatcatagctttaagagccagtactactgatccagatatacggaacctctgtgcatagtctcatcaagtacaactcccgaacctggttgccagtaattgtaatatcaacattagcttttctattaatgatccaaagtccaaacatacccatagaactatctcttagtctttttttccagatgtaagtgcatcacgttacaaaaacaaaacaaaatcttgaacccgagcacataccttgtaagagggagctgggtccattggcatcataccaagattaggaacaaggagctagcttcttattggtttcaaaactgagcttttaccaaatcattatctgaaaagctctgcaaccaattttggtaagtatcccttgtttttcaattaatgtgtttggctcatattctactcacaacagctaaaattggaattctgccgtcttttattagacatgtgagatagcatgatgtcctcaagtcttccacaaacttacttgtaacattaacagcaagcatatagttcctatctactgaaaccggaaatcttcctttatgaaccatttctctgaatatcccaaacccagcattgatgttttcacttgacagaaaagagcttacgagtgataagtaaacagctgaatcaggctccatttctttttcttccatctcacgaaaataaactaaggcctcaccagaccagccacacttgcaaagaccctgaataagtgccataaaagtaattctatttggatagcaatcttttcccttcatttcattccaacgaaagattgcttcactaggtcttccgctagcgcatagcccatgtattaagctagtgtaagtaataacatcagggtttttctcatcctcatacatcctcactatacaagacaggccccggtcaatctcaccttccttgcaccatccatctatcatactgttataagtagcaacagtaggttttagtccttttgataccatttcattaaataggatatcagcttccatagttcgacacgctttacatagagcctttatcaatacatgatatgcaatcacatcagggcagtgaccattggcacatatgtctcggaataactctaaacctctatctactccctcattttttatgaggccatcaatcgcagcagtagaggcaaccatgtgaccaaggaaaccttctccagctacatcatcaaggtacttgcaagcatcaacagcccttccattctcgcaaagttttttgacaagaaaggtagtatgctttatccatggctcaaatccataaaaacgcatctttttcagcaggtccaatgctcctacaaaatcgcatcgttcagccaagcaaccataaatacaattaagcgtgaattgacttggttcaactccggcatccttcatttctcctaagagtttcaagctttcttccgaccttccttctttacacatcccctctattatgttgttgtacatcataggacctggaataaggccattctggacaatatcatgtaacaaggtcactgccatatccaccttgttagctttgactaagcaattaatcacaatgctaagagaatctgaatctgggaggattgctttattatgatccttaagaagcttaacaatctcagacacaccatccgactcataatttcccatgagattctgaataaaactgtaagcctcatgcaccaaatcattcctaataaacccctcaaacaaagatttgtaaagaagcatcacagattttttgtctatgtctccaatgatcacttctgttattcgacttaattcactttcttcggaaaatgaacataatagcttcccaagtattcctctatcaggtggaattcctgacctcttaatctccaaatacaaactcagcgccatctcaagatctttatgcttgcaaagtcctcctatcaacacatcatacaatgcaatatcagcgttcatacccatccgacgcattttctcaaacaactgaaaagctttatcaatccgtgactcctttacgaatccatgtatcaaaacacaatatgtcttatagttcaacctaatatctcgttcttcaagcatctcaatcaactcgaaagccttatccacctgaccccacttacaaaatgaaacaaccaaaatcgttgaaatatgttcatcaagccaacctctactaagaatctcattgaaaacactcaacgctctctcagacttaccagtgttgcaataaacctgcaaaactggtgtaagagtaaatttatcgaaatgaaaaccgcaatccctcatctccttcaacctcgcctcaaccaactcaacagagctcgaattcgacttagaaattgcttctaacaaacagttataagtataagcattaggaacacaaagacccatctctctaactcgatcaaaaacagaacttgcttcatccactagcccagcattacctaaacaccgaatgaaaaacccgaaagctccaggagacatgaaacaacgagaattcagaacatctacaaccaaagctttcagtgaggcattttgtcgagcacgtgataggatagaagccatggcattgtaagcatacatatcgtttctgtaaccttcctgtttagaagcccaattgaagaacagataagccaaaccccaccttttgaatccattcaagacggtttcgactaccttggtgttgagctctggagagagtatcagtagctcagggtcgtcaggtgaaaaaggttgtctagtgaagatcacgattaggttttgggcaagcttggattgattgggatggaggaatctggtgttatctagcttcgtagtgagtggtctgtgaagaagttggcgttgttgttgttgtctagagaatcgttggcaaagaagagcgattctcgagaaggccatgagaagaagaaaattagaccaaaaccctttcgtctgtggttttgattttcctaaaccctttcgtttttgttggcacctgaagaccgtgtttggcttctgctgttctgctccaatttgaaacgcgagttttgcagacgtgatttttctcaagagtcaaccttttcttttgtgtgccgagcaaagtcaacctagagcaactttgttttctagccggtacggttcgattcgattttatcagtttctatttcgattgccttgcataccgggagtaacggaccttcataaaacttttaattttataaagaaaacaaaaaacagaacaatatgactcagtagaccagccacgcttgcaaaaaccctgaataagtgccacgaaagtaattctatttggatagcaatctttgcccttcatttcgttccaactagagatagcttcactaggtcttcctctagcgcatagccaatgtactaagctagggagtagaaagcttcctctttagaagaagacgaagaagctctttactgtttttaacttgtgatatgcaatgcaaaccttttttattgttgtacttggggatcaataatcattatgtcttcattactagttacctatatgctgtttttctttgtttgcttttggacgggatgttaagtccttatcaagtttttattacttattatcttaggtgtattttagtcttaggctaatattagaattaaattctgaaaaataaatcaaaacagattaaaaactaagatttgcttcttagttaagaggtttttatgaatgaaaaaagtagcaacatatcatgtttcaaaattttaatttgaataattattaagaagcaaagctaaacattgtagatggtcttagtaatcaaacaaacgcattaacgcatgcatatttgtttttaattgtgagttaacaataacagtggcattgtcctccgtgagacatagatttgcagtaaccgccttttccattgtcgcatccattgagacaccaactgttacatctctggtcgtcattttttgtgttgcactttccaaatttcgggtggttattacaacacaaggaaccaccattctctacattatatccttcaacatctgccaatatcacaaagaattgaaacagttttgtctaatatgaattcatggaattttgtaattaaagtaataagtttgtattgaaacacaaaaataagtttgttagagtgtaaaaacttgagaaaatacccctaattataagagagaatacgtaccaataagtgagaaagtgagaataaggagcaaagcaaaggaaaaaactttcaaaccagccattgttaatagttttttttttttttataagtgtttatagatgattgtgaaagtgatgattttattataatacaatgagatgtttatatacacgtagaggtaactaatcacaattaatgtaaatatatgaatatacataattagaggattgatatattcaaggatatgaatgtattctttgattgattgtgaagatacgatggtatccgtttaaacttgtttttggtaattctatggtaacgttttatttagtctattggaaaattcaaaccccttcatgctctgttgtacagacaacttcttcttgttgcaaataacaaaacaccttaaaggctaaaattaaatactgatttttacgaaatgggcttcttaatttcttaaggcccatatatctttccatctgaacaatttgtaagcccaattagaagccactgtaagttatataaaacgaagtttgtcatcgtcttcgtcggtgaacctccgatttgactgcaccgtcggagctcgacgctgagctaagcttaaccaagagctgtcgtatattacactagcagtgaagatcgaatcttaaaaccatggcttctccgaccaattcacagaaaacaggtaaaataaaacctttaatacgctcaaaccctttcactcgctggccgattcgactcaatccctttgttgtttcgttccttcatccatggatttctcataggtttcggttaatatgatctctcttttgctttttttgtcatccatcgtattgagaccttgagctatttagtatttagctaagtttctgaatctttatggtgtaattgatgttgctattcgtaagctaattgatgccatagattgcgaaaagagaagttgtttcttcagtattcaagagatttgtgttcttgtgttcaagtttagatttcaagttattttgtaataatgtggaatcagaaggacaagtatgtctattttctgtatattgatttgatgaggcctaacttcttcttgtctactaccttgtaacagtttcggatgacgaggaagttgattactccatcaaaccggagttctatgattcagatattgatgataaagatgagctttggatggataagaagagagatggtcgtacttctgatgctcttcttagctgtccagcttgtttcaccactgtctgcttagagtgtcagaggtattttcctctctcaacatcagaacttggtgttttatcttcatacgattgttatatcccatccaggctttgctttctcaatgttgctagggctccattgttcaatcctcaccaatgtgtttgctaatatattgatagtaacttgctagattctggaatgttgacttgattatgagattcttgacaattgttacaggctctaggtttttgttaggaatgacaatcttggtagaatccaaaccagttatatgacttgattaacgagaaaaatttctactctcagtccaattcccaatcccaaaacccataggtaaatccagaactaccttttctagctgctagctctgtagctaactaactcaaagattgctgatacaactactatccactacacaccgcctaggctattacaacactcatgcgatagactaatataaggactttatcacaatggatttctttctttcctcttcaatccgatgatattgttttgtttatgacttgatccctttgcacttctttgaacttggttttagtattataaactgcggaaccaaattaagacaatctgagtaaaacttttgcaggcacgagcagtatgtgacacagtacagagcagtctttgtggtcaattgcaaagtaggtacagacacagttttgcaacagaatacaatgcccttaaaggttggtaaaagaaggagagattccgagatgcaagaaactggttctgaagatagcgaaaaagttaacccggtcttttgctcagcttgttccacagagatcggagtagttgacagtgaagagatctaccatttctttaatgtcattccaagcgagccttaaaacaacctggttttatgagttatttgtaacgagttctaaacaggtgattaggattaaagtttcgattgtttgcgttaatctttacgttgcatgtatatcgtttgataaaaatcaagtcactagagaattttgagttataccaaagtcagaatcgttcacagttcacatgattagtaatttagtatcaaacaaataccaaatacaacaaactacaaagcgagttggtctctgaacgtcttttagtcacgctagtcaaatagatggcagaagataaagcgatcctctcagtttaaaaaaacgagatgacgtggattattctgattggtggagtaagctaagaaaatctagagaggcatcgccaaatgagaaaactagaaaagaagatatttgtatgaaacacgagttgattctcttttgacagaagtgtcactttcttgtattttcgtccaccaacccccatactaataattctatacaaattcccattaataaataaaggcagatgagaatgggctccagctgtttaacacatttgacaattgtcaaatgattcgtacacatattactattttaaaataaaataaaaagattagaatatactataagcatttttggtaaattggtgatcattaaaaatttctatgcatttatccagctaaccccacaactaatcattcaaatcccagttaatcactcaatataacttttaacatgcgccggtcattaataattgtcaattgtatcatacaatttgtatgtaagcttttgtggcaacgttttcttttaagaactagctagttcaattgaatcctagcaagtagctacgaaatgtgactaaaatttctctacgagtctctagtttggtggttcctcagctgtgcgtcgtagtttcaagtttttactatctatcatactttaagcatgcacaaaaatattcttttcatcgcttttgatagcaccttcacgtattatatcgacaactttaagaagttggcttgggtatagtttttaaaaaaaggcatttaaacatcactcatggttgtatcgtatgggtacggcaatcatcataacaattatttctgttaaaggatttcacaatcatataacaaatattaagacgataatatagtataatgtgcattatatattcatcatgaaagaaattattgtcgcgaaacaatttaaaaaatctcgacgcaacgacatatcaaaatcggcatatctgccaggtgggcacggctacttttattatgccacgctccaaatggaatgatttgttttattattgcttaatgggtaataagaattttgattatacaaattgcacacacgaacgcatatcgtgtgggggtcacagtggttgggttatactcagattagtaacctgtgtcataaagcgcgtaattgtcatttcttttatttgagctatttatttatcctagaagttaaataaaaaataaaaaataagagacaatcacaaattagtagatgtgaaattataaatgactaaaaataaataaattaaaatcgtacaaaatagaatcgtaatcagtgtaggtgtaaagtatactcaccaatcaattaccaccattgattgtctcttattcctcatcttttcaactattgtggaaactggaaacagcttttgtcttaattgcaatctaatttccctacatcctataaaatgcattaaactcatgaggtaaacgtgtatgattactgtggttacaaagcataaaacatatactacttcattctaaaacaaattttatcgataagaaataaaggtaaaaatcagcattgttgtggttacatgtcacagaagtaataagaattagtaaaaaccaaaatcgaattcatattattcttgtaacgctacttattttctacgaatcctaattactcgtaaattagctaatgtaattcaagcaaccatataaatggggaccccaactaactcctaaacctaaaaacttaaattctcctgcccgaccgtggtccaacgctatagtcaacaccggagtcaagcgcgtgagcttcaaccgcgtccggacaaattaaaaaaacctagcagaagtgagctgtgtgggaccccaccagccatgtgctctccttcctgtctccaccagcctagcttcctctcaaatcattacctccttcttcttcttcttcttcttcttctcctcgagagagagttagatagtgataacgaaatcctaattccatggccgacaacgacggagcagtgagtaacggcatcatagtcgagcagacgtcaaacaaaggacctcttaacgccgttaagaaaccaccgtctaaagatcgacacagcaaagttgacggaagaggaagaaggattcgtatgccaatcatttgcgcagctcgagtttttcaattgaccagagagttaggtcacaagtccgatggtcaaaccatagagtggcttctccgtcaagctgagccttctatcatagccgccactggaactggcactactccggcgagtttctccactgcttctctctccacttcttctccgtttactctcgggaaacgtgtcgtcagagcggaggaaggagaatccggcggcggaggaggaggagggttaacagtgggacacacaatggggacttcgttaatgggtggtggtggttctggtgggttttgggctgttccggcgaggccggatttcggacaagtctggagctttgcaaccggagctccaccggaaatggtttttgcgcagcagcagcaaccagctacactcttcgtccgccaccagcagcaacagcaagcttccgccgccgcagcagctgcaatgggtgaggcttcagcagctagagttgggaattatcttccgggtcatcatctcaatttgcttgcttctttgtctggtggagctaacgggtcgggtcggagggaagacgaccacgaaccacgttgagaaatggtattgtctttttggtaatgtatagaaaaattcctatgttttatgtcatcgaaagtgtttagaaagtacctctaatttgcggtttcttttgctccttttttacttaatttaagcttattgcttgtttgattagggttttagggtttaagaatatttggtctcgttaatttgtttcggagagtgatagaaagagagagagattgattgattgttgtacctaaaacgctataaaagctctgtttttactagcgaaacagagaagtcgtttaactagtgatcattgccattcaatcaagtctctttagaaaactaaagaaacagcaaaagaaacaaatttgaagttgtcccgttagttttaagcatgaattctattatggttcgttcgttaatgaagttgtcccactatttactctttcgtagtaaaggaaacaaatttgaactcgggttaacggagccggtccggatgataattcaggttccaccaaaaacttttaaaactaataacaagcccatccactatccagagcagtataatcgtaagcttcaaacacaaaagaaatacttcaatttaactcatcgttatcagttataaccggaacaaaccgataggggaccattggatcaaaccgtctcgaaccggtaaccctaaaatagtctggttcttgaaatttcggtgatcctgcaacgtttcttctcatcgattttgaccggaagctccttgattcaaacaagacttttcttatcggggaagatcagacggaacagaagagatctctgtgtttacaaaagtaattccttgattatagcaagcaaagaataaagggtaaaggtgtagactttgcttctctccttcaaagtccacgcgattctcactgtcagcctctgcgaaatttccagtctttctcgcattttccctcgtagcagccgtcaatttcaactgggtatgtcttagatcttcgtagcgtttacggttcctgctcaattcttcgtttctcgtggtttgacagttgagttacagaaaacgaggacgaaaagcctaattgaagaaattagtgattagaattttgtgattccgtgaaattttagtattagtaagtatagacagaatagaaaaaaatcccgtactattcatcagctatacatatctgtttgtaattctttgagtaagatcttcaattctcatgtgaaaactgtgttttgaatgcttgtcatagatcaattgttggattaagaaacattgtagtttagtgttagaagaacattaatgtgagatttgttacattgattgacattagtgttcctgtgatttggttttaaaaaatctttggtgaagtgagttggattggattttacttgaatgcttgttgtttcccatcttttggctaatgatgttctttgaccttctcgggtctgttactcgcatgttttttcaggtctaagtaatcttgtgaagactcaatgacagagatatttagtgacaccgggttcagacagttaactcaaatgttcctggcgataatcttcttccacacatcggagtacattctcgccatagccattcacggagcatcgaaagtaactttaagctcactcttaatcagcaaacactatgctttagcaatgctaatatcagtcctcgagtacatagccgagattgttttcttcccggggctgaaacaacactggtggatcagcaatttcggtcttacaatgatcatacttggagaaatccttcgcaaaaccgcgataatcacagcaggtagatcgttcacacaccttataaaaattcgccgggaggagcatcataagcttgtgacagaaggagtgtatcaaatcatgaggcatccgagttactccgggtttctcatttggtctgtgggaacgcaagtaatgctctgtaatccaatttcagcgattgcgtttgcggttgtggtgtggcggttctttgcagagagaataccttatgaggagcattacttgaagcaattttttgggagacagtatgtggagtatgcgcagagagttccttctggtgttccttttgtaaactgatccttagatcaattgtgaacatatacgagcattgtttgattaccttttacatagaaaattatgaaagagatgttgttactcatgttttcagttaatgttctcttgtcaatgtctttgtgtttctttttttttattgctaaataatttggatattattccaaagactctgcctgagccagaggtttatgcttatgaacataaaatttgaccactgggttttaaaagtgatttagctccggcgaagagtctctccgtgagagcgagcttgtccgatttgtaagcacgagacggaaccatgttgtgcggaggctcacgtgtcttgcagcatttgtccgaccacaatcatcataattcgattggtttaggattagggttttgtggtgctaagattgtgcagctctcttcattctttctcaggccttctcaggctatggcgaagagtcatcatttcagccgtaaattgcgtcagcggatgatttcttcatttgggtctcattgcagaacatccggagaagtcccaattcttcacaattgtttcaggttttgtttctctccttgatttggtatatctgattcttaagtgtcattgtcgagatttatgtttctggactcgaaagagagatctttaattaattcatctgactgatgttaaattcggggtcttttgctttcttctactgaagccaacgagaagatgatcctgagcttccagttgaagggttatctccagtgtcaggtatctatctagcttgcttgtttcttgcatcttcattcaatttcctaagaaaagtcacacctttctactctttgatggggattttgtggttactgtgcggttcctttccttttggaaagagctttagtatacatttggtagaagaatagatgttagctcatgatcatctgatgcataatatgttgcaggaggcattgttgctctagggaagtttgatgccttacatatcggccatcgagagcttacaattcaagcttcaagaattggagctccatatctattatcttttgttggaatggccgaggtacttggttgggagcccaggtaatgtccccacctgtagtattcatgtcttccctttctcttttccaacctaagattcttgttcgtttgagatggttaaacattatatatgatcctgctgatgaagttcgttttttttaatcaatatgtgctctcttccattgtgactactgacaatctaaatctgtacaaacagggcacctatagtggccaaatgtgatcgacaaagggtgcttacctcttgggcctcatattgtggagacagagcgcctgaagagtatgagatagaatttgccagcgtgcgacatcttaccccacgacagtttgtggagaagctgtcaaaggagctcagagtctgcggagttgtggcaggtgaactttaaaaagatctcaacccactcctttctgtaccatttcatgttgaaaacacacaaaataaattgtttgcaaaaacctttatccataggtgaaaattacagatttggatataaagcgtctggtgatgcctctgagctagtgagactgtgcgaggaatgtggtatcactgcttgcatcataaactctgtgatggacatgaagcaaggctcagcaaagagagactcaggggactcaaaagatagagggcaagtctcttctacacgtgtacgccaagctcttgcggcgggagatatgaggtacgtatcagagctccttggcagggcacatcgtcttatcttgagagtcagaacccaagatatgccaagtgaaaggatgatctcagtcccgagatcatcaatacttaatttgccaccagggatcggaatttataaggcatgtttgcttctagttggtgatgagtcttcagttccgtgtaccgtagttgttgatacatcaaatatccatgtagaaacagaggaggtacgactctgtaatttagattggtctcaagaatttcgactcgtgagtgttgagttcggttgagtcaatcttagttcgtataaattcatatttctaagtgtttgtgtctcaactgaaattccttagagaagccaagagtgatctgttcgctccatcgccttagagaagccaagagtgatctgttcgctccatcgttcacttttgtctttaagcgtatgttgctagaccagacataacagcatggggacacttccaaaccacaaattatggatatttaggccaaccatggcatccgtttcaattaaggaaacattaggaggcaacagcaagctgacatgggtgatttcgtggctggacagcggcaatgacaattgacaaagacatgtctcagtagatactgaaccaatctgttgtatgatgaaacaggctggtgagtgaaactctttgattcttcttcggctatgaatataactcaagactgctcacttttcttcttatttacttagggaaagattgagcttaagaatcttagagtcttataaagacttttgaatagactcaattagccttaagtaagcaatggtcttgtgtactctgttttcattggaggtgtcggggcacattactctgtgtatttcaagcacaaggaaatggtttcttgtgcagacccctctagagtttccatttgtgttcattgagatttgtaaagaaatgaattaatataatccgatattgtctacaatggaaaagaaaaaagaaatagagtttgtacagtaaagaaatagagtgtttctaggactattttctgatcaatcaaggaaagaagaaatgaaatatttcttgttaaactccatagttccacagaaatcgcggctttattgctctttgttatcttcaaagctcagtgaaagagccttctcaaggcaattgaaagctttctggtagctcaagaaccccatgaaccagaagtcaaaaccatcgaccgtgactacttctaggtacttctgtgatggtttctttgtgttctgactctggttcactctgtcgatcttgcacaaggggattgatactttgtagtgaacccggattatgtctccttgaggggaatccacctttattgatctctcgctgcagaacgccattttcttggaagagatgaagagaaggccggctatgggacccgcggttgtcgacaagtaacactggtacattttgaacagtttctcaccttcactaactctaaagagccgcttgaagatcttctctaaacctccaacctgaagaatcctagcgcccaaagatagctttctcttcacagtttcggttagctttggtcttatcttgctctggtctctaactccgttggtgaacccatcagttttcttccttttaagaatcgattttacgttgcctgtcaaaaaaaaaaaatcaatcctgttagctttcaagttttccagggacaaaacaatatgaattagagggtaactaaataggtactaactttgttcagatttcttggaagaagccggaactcggaacttgttaaatgaagccggatcaggtaagtaacccacgggagtagcctttgcggccggatatctaatgacttgttgttcaactctgctcatgttcatctttagaggattgagtaattgatctagatcttgaatcttgaggttgtgtgataaggaaaatgaagctgattgatgaaatggtttggtgcaggctaaggtatataaagggcaatgaaaagcaaagatagtgaatcttttgtgacttgaccgtaggatgagtcatgaatgggtcatcaacaattcagcaaaagggaaataaagcttttatatatatcttaacttgaatcttttttggggattatggttaaaagcattgtgtttggctgctttaagccagaagaaaaaaaaagtgaaacatgatcacacgcccctcacgttagactccgacatgttttttaacctacaagttggcaagacggcatgctttgttacacgcatgtaattacgttttcaacttatggagaagggacgtcgtggatttggagctttctgagttggcatcgtgactttctgatgtcatttttctttgctaagataaagttttatcttttaatagaaaaaagagatgaggttttttctttttcatattttgaaaggaaaaataaagaagaaatcaataaaataaaacacagaattaaaggaaatgtgatttcaaatggatcccaccatagagtgaataagcctaccgttgaatcaactcgtcaccccatgtgatctacacaacatgcaaatgcatacatgaatatacatgtattaaggctttatcagaggaaatagcacgtaaccaaggaggggattgctaaaataaaacactaaaattaatcaaggcttcattgttgggaacaagtaaatgctttatcagaggaaatagcaggtgaaggcacttgtgagtcgggaattttgaattgtggcaacggactaatttattagaaatagagaagtcaataccaaaaaagaaaaacaagaagaagaaattggtcaatattttgtgacgtgacattctatgctcaataaaatagcttatcttctaatcataaaaagattccttttttcttggtaagcaaaaggtgtaaaaaagtttccgtcttcacattgtgtgtgattaaccatgtgtctaaaagttgaaaataacggtttctttaaactatgggtaactacaaaatgatgaaattaagtctttccttttctttggcaagtgtcatattaattagcaccctaaaaaattcatgtttttaccttaataaatacccaatgataattgttcatattcttttattaataaaaaaatattttttccttactttcttttctttaattttattttcatatctcatgtttattttcctttttatgaaaaaatgttgtattttttactatatatatatcacctctctacttctttttttattctgtgtgtacgagtaaaatatcttatctaaacaaaaattagaggaaaaatgaatcagagaggcaaatctaatttcgaaagttttcttaaaagcatatctctttccgtctgcgtcaaattccatactgaggtaactttcgtctttcattttcttctaattatttgactgatgaaattagaatcgtctttttagtatgagtttatgtatttgaccatcaattcgatctagtgtaaaccccttaaaaaaaaaaatttgaacatggagaatctactatgaaagaaatcttctaacttatcaactatacgcatacttaaacttttgcacgatgcatatcaaagcgccatagatgaaattcatagacagattcttatgttagaaactcaattaagcatgtaatcacattctataaaaaaaatctggtgttgatatgaagatttttgtaagattaacaatttcaaaagagaatttcaagttttaagttgtatcattaaatcatatggaagaaaacaatgtcatttaagtcgtttaaaagaaaaagttttaaaaaggtattttaccaaaaatatataattaaaatacaatattaattaatgataacgttgaataataaaacaaatcttatccctactgtttcaccggcttacacgtgtcactaaatctttttgattcattttgaagaaaacaatgaatgtatctcttacttaaactaaattaaaaccaatagtaaaaccaagctgaactctaattgaacagaccaaaccaaaataacttcgattagaatttggttacaattttttaaaaatcaatttcagtttttggttttatggggtagcttcaatgtcttgtatagggtagtagatgagagaactgaaagagttgggttcgattgtgatataaaacaatacgagggggttgtctctaaattttttattgttatctaacccggatccgagtaatataaccgggtgggtgattttgacaaaatggttgaatccttctaaattgaaaaccctaatttcaaaactttccgcgcagaaacgtgtcggttcgtcttcttcaagaggcaaagtagaaagagtgaaaaaacctcaccttgtcctgagtgacatttggtccgcctacgacaagtggagcactttttgcgtcggcgttcctcttaagctgaatgactactcttggacggatgctactcagtattatgctcccaccctctccgccatgcaaatcttcaccaagaaacccttcctcgacgatggatcttcttcttcatcaaggtcacagattctcgattttgaatcctattattgttgtgttctaatgattcatgggtatcaacaatcagaatttggttgatcacactttgtttgtttgtttctcgattttaggagctttggtgaggactgccatctctattttgaatacaatgagacagtgagtgtagatgggcttaggcttcctcttactatgatggtatgtgaaagctcttaccttagatgttggatcccttacatttgtctttcgagggtttaattaaatagggaggttctgtctttcttccttgaaggttgaggaactagctaagaagcaccatggattgaatactcttagaacctctgatctgtctgaaaacagctggttttctataacttggtatgtctccttctcagctttagcccttctcttaaaaattacatgtttcttgaattggttgttggattactagttattgacgcttaatctatattgtttgtgacttatatgaaataacgactaggctgagaatgtggttgattgatatatgtaataggtctccggcaactcaaattccatcgaggcaaacactgaatcagtatttcctaacatatcattcattgacacccgttattccaggtatttcccccttagaatttatgcttgaaaacaagtgtatatgtataggtttttgatgtcttgaactagttttttttttcttgtgatattcagaaacaattcctaaagggacagaagttgagcttcctgcttttggagttctgactaccaagctctctggcgaagtttggaacatgccagggacctcagatcaagagatcataaacaggcatgaggaggctgctgcctcctggctgggaaaactcatgttcagccacaatgatttcgacttgtttatggctgagaaacctaaggacctgccattttcaagtggccactatgaggtggtatatggtgagtggtaactatctcctcttggaacttctcatagatcctccaggtcctggtgatgtaatgttgccagtagaaaaataagcctggtagtggtatctttttatcatggaatctttagatgaaaactttgtgaacatcttctggatttttcagttttatttaaaaagtggcatatgatttgccataactcaaattattcttaatataatgcaagttggattgagtatttctgtttctggcatcttatattcagcatagtagatacaaactgaaaccagaagatgttttggcacaatcttctgctttcaacaggattttgctattgatcagttttacttccataactttatctgcaccagattggcatcttatgccttgcgtcttgtaagagtatacattttgcaggcatgaggctccactagggcagatagctgctttttaacacatgaatatgtcgaatgctgcattcatcataatcatggttcatgattaggttttaggtgtgagtactagtaaggaaacagaattctaatgcatgcttagttcatcataacttacctcccataagtcacgagcattaacaatatctgatgaattgaggccaatctcagcccatcgagctgtgatgtttgcagatgctgatcctctgttccataggatgaccgctactcgtttcttgcttagtggacctgcccataccttcattgcaccacatatgttatgtgtttttttgtttgtcatttgcatagatatgtacatataagaactatgatacctcaagatcaccttctttctttactttctttccctggatcccaagtttgtctgaacataaataggtcaagctcttaccacttttggatttcatatgagcagattctgaagtggttaagactttttctatattatatttaccttgattaacagcaatcacctctttgttgctaagcaattcaaatgtaactttgtccatcgatctaagatcgcagccgatcagcagaggagcctgcaaagagagaacacaatccaacattggtttaagtaggtatacattcattctctgcttagtttaggtcttttaggtaaaatactattcatacttttgccaatgcccagatgctgaaatgcgacatgtattcttccttagtcatgcctccatttcccacttcaagcatgtctggatctgtttcagttttaccaatattaatttctcgggtctcgatacaactttctcgaatctgtattgattactccaaattatttaccgttccacgatcctggtcttgcataagatgcccatcgatcattctgatccgctatcaatgtcatgctaacaagcaaaaaaggaagagaaaaacatcttcaagttcttgtttcactaagattgggaaaaaaccatcaaagaagagaaaccttttccaattatcttggatatctcctgttgttctccaactgttgccaatatctcctgcccaagttgctggatcctcttgtcccctgcacttacaagtcaatttcttgtttagtatcatcagaccatagttgtctgaataagtgaatcttcttcttaattagtcttttttaccattcgcacagagagaagaatatggatcttcctgaatttaacagcgctttactcatcttagggtatctttctcttggacttgtccctgtattttcgcagttatcatacttgaggtaatcaatcccctgtcgaatacatgataacgaaaacgcacagcttcaaggttcaggaaatgagttcagacataacacatacaaatatacatacccatgaggcaaatgtcttggcatcttgttcttcatgcccgagtgatcccggcatggtttggctgcaggtaagagtcctagaaatcgagaaaaagatgatcaatggagaaactatatcttaacaagaattttgttttataactaagtatctttatctgtatatacatacccggcatcagagtatatcccaagttttagccctttgctatgaacataatctgataaagctttgattcctgaaggaaatgttgatgcttttgcaaccaaactcccctatcaaatatacaccaaaaacacatctcatttttgtttttagattctcaaaaactctgaaaacaaggttatttaacctgagaatctctcttgagttcaccccaacaatcatctataaacacagataaaaacagaacacgatacttaagaaaacagagagatggataaaacagagtaatcacactaaaattatatataatttaagtacctatgttgatatacttgtaacctattgcagaaagaccacttgaaaccattgcatcagctgcagtgaaactcagatcattagtattacttttactatcaatcaatcttgcattagatttgctttctatagagtagaatcagtaatcaccggtttgtttgataagggtttcattgatattacactgaaaatgattccagctgttccatctgatcagagagtaaccataagaggtaaataacttgagagtcaaggaaatagaaattcaaaaaaaaaaaacaatgaaggggatcgaaccccatttgaggagagagagcaagtccattgttcatcaacattcgactctgaaacccatcagcaatctgagtcagagttatagtcagagtgaacgcaatgaatcttaaggagaaactaagaagaaccattgcttgatcaagcttttttcttgtttccttcaatggctataaacagattgagagagagagaggttcaagaaaaatcaaaaatggcctgtaataaatgttgatggttaagtgggagctgtgggatcatgccgatatttgtatatatacacacacacacaccacggtactgtgactctcttagttgtctctccaaatcaagtgggtcgttttcgttgtcaactttttaatttcatttttctatgtttattttcagatttatgtagcttcacggatatggagatattgtatttgtctctgtgacgcaaaaagtgtaaaaagattgagaaaaagaagaggttgttaactgtgtaagacgtattcataactaattctgataaaactagtgaaaggcagcgattgatgttattaatatagaacaaaagcattattggttatataagcaatggagtgaatcactagaggtccgaggtttatgtccattcatagtctccggaatttagaaaattacgaaatattttagtaaagataatgaataatgaatcgtagtgatacacaatttagcaaaatcttaacaaaaacaattaacagctaaggaactgttagtctttacatacattatttaacacgttagcaaggattattttaatgtccccacgttgagttatgaataaaacaattaagttgtgataacgccctttagagtttagatccaaaatacaagaacagaattcttcacgtctttcaataaatggttaggttttcattgaatcattgtcatgatcgcattggactttagtagatacaatcgaatcatttgtataaagtacacaaatttatatacagaaatacaaattacaaatatttgatattgacatgtggccatgctcagttctaattattaaaaaacggagcatgctttccgagtgtgatgtttgatattatcttacttttcaagaatgtttttatgctagattgtattccatagcttttactatttacacttaaaatgctataaaaatataacaaaacctgttttctagctaggtttgaactagtcgaaaatgcaaaaattatgcatatgggattagtgatctctgtatataataacatccacacaagtagaaagagtatactttaaggcaaagtcttaagttattaaagtgaaataatgagagatttgctttcctcaagtggaccaaagacacaagtgatgtgacgtgtgccgtacgcaacaatattaaaaaagcgaagagttttcattattatatggacaaaattttcgtttcgaacaatttattggagaacatctgtggagatttaatttgagacgaacccttattgtttttacagaataactggagaatacaacgtgacgtagccacactaactctctctatacacatgtattttcaggcaacaggtttgagaacatacaacttacacgcatgagaatccactgttgctgtcaagttccccacaaacttttgcttcaatgtctggtgctgttcgcatatatcacaacaaaacattcaccagttaaatatctgattttctaatgatgtttggtttatgtatgtttatctacaattgtatatttatgagtatacctcccatagatctctggcttcaacgatgctatttgcagggatctcaatatcctcccaaagagcagtaatcgaagttcgcgatggtccacggttcaatagaagcaaagctactctgtaacctgacaatggtcctgcccaaacctgattccatttcgcgatttattaccaaaacatagttttcttaaagcttatgtctatagacgagtagtacatgtaggtgtttttagatgtaatctaacctcgagatcgccttccattctaactttcttggcctgaacaccatgtggatctacaagaaacggtttctattttcttaaaagtatatattcaaacatggttcaaagaggacatatgatggctaaacagtaatcaagtaccttgattaatagcaatgacttccttgttggcgacaatctccattgtttctttggtcatgtttcttatgtcacaaccaagtagaagaggagcctgcagtgatatatatacatcattggtttcagacttaatatatgttgtttgaagagagtttctctatttcgggaatatatagcttacctttgagattgcccatatgctgaaatggactatgtactcgtcttttgtcatccctccatttcccacttcaagcatatccgggtctgcaaccaacagcaaagtcacccactcatcatgaaattatcatccttcacaaaatctgcaacaagcttaaagtagtagtagtctcttgctgagataataacagtaccgttccagccaccaggtcttgcatgctcagcgtagacttcattcatgtctgctattgagatcatactgtaacaagcaaaaaaaaaccttgtcaagattagcaatttttaaagaaacatgtcgccatcttttttcttttatacttacctaagccaagtatctttaatgtcattagtggttctccaactgttgcctactggagatccccatagagctggatgcatatctcccctgataagaagtcaatttaaaactcataattcttctatagacaaatcaacacaactatattatttgtttttttgaaagggaacatgcatgatttataccattcacacaatgagtgaaagatggggcggccagatttcatcagagctcgagtcatcactggatacctgaattgtatcatcatccattattggcagtgaatgtatattataacttttatggctaaaccaggtgtcctcacttatacctgacagtaggtttagagccatcgctgttgcagttgtcatacttcaagtaatcaattccctgcaatttgagcccaagcattgttacattgtctgaaaagcaggtcagtaaccagtttatgaaatgaaaaagaatgacatggacgtacccattctgcaaatgtcttggcatcatgctcctcgtagcctaaagaacctggcatggttttactgcaagtgaaatacctgaaaaccaaaacaaatatgaggccaaatgtgtattcttgtccaaatcaccaggaaaaaagtgtaggaaaatttgcaaaagcaatagtaatttacccggcatctgagtaaatcccaagcttaaggcctttactgtgaacataatccgcaaccgctttaattccagaagggaaagttgacttctttggcaccagacttccctggaaaacagagttaaggaagataaaatctagcaaaactgcagaaacaagaaatgaaaccaggaaacacaaagaattatgataataccttgctgtcacgagaaatttcagcccagcaatcatctgaagaacaaaccaagatttcagtactgtgaaacacaataatgatttttatttatttatttctaagctatcacactgatgaaacattaatcaacttcagagactctgaatcagagtgatacaaagaatttttttaatctatattatgagttagagccttaccgatgttaacatagttgtagccaagcttagagaggccagtggtaaccaaagcatcagctgttacaaacatcaagatgtgttaagataaaccaaagcatcagctgttacgagcatgcaagaataattcatgattgataaattaaaattgagacttcaccagtttctttgatcattttttcatctatgttgcagctaaaatggttccagctattccacctgcaacaccgttacattgaacctcattcagaacacaaaaagccaaacactttccacaacgtaggattattaacagcaaagttcaggatattgaagttaaattcaagctatttattctttagttaaagactagtggttgtagaatgtgtttagtctttcgatttctttgagaatcaatcgtcaaatccaccaaccattaaaaaggaaacaagctaaatcacagagcgagagaaagagaaatagagttatacgaaccccatgggaggagtgactccgaggccattagtgagcaagtgtcttcgtaagatctcagaatcgtcatgaccattattaactgatctcgaagactcgaccatcgtcatcaccattgatgaaatcagtatcataagtattggcatctttatcaccattgctcgtctcgacatctctgcaaaatctctctaaacgaaaacagagtgagaagaagatagttgacgaacactgctttgtactttgtagtagaagaagactaggagactagaagagtgttctataaaattctttgtatttccattttacccctcaaaactcttatctgtactttacttttttttttttttttaactttttaacaaatatcttaacgtccacataattctattctaatttcgcataaagagaagatatatattttgataaccagagaagatataattccaattttattatgtttccttacatgattttaatggttggaattcttttagatgattttaaatagaaggttaattgcgatcaaaactaaataagaggttaatttgatttttacggttaaattttgttgttgatatataacggaaaagtcttgaccaaaattaacgttggaaatttgaaaagtttttaataaattaaaaaattagaagaagctcacgtttctttaaccagtagctgagataaataatacttttttgtggaagcaaactcaaaatcaaacacttgggtcgatttgggttgtgtgtattatatgatcaggtggatttttaatttcttgtgatatactttgtacattttgttgggtttactctgatcttgactaataatttgtatagtttcatttttcaacaatttaattatttattcaaattataaatatatcctagttttgatgatgtatctttccaacatacactatagttttgaaattgtgactcattatttgtattgcgataaattatgattttctggattgttctttgaaatatatatctctctttttttgtcaagatatatatgtctttgttagggactcaaaatcatgcttcataaagaagactttgaaggtttttaatttctgtacgtttctaggcatgatactgaatatatatatagatatatctatatatccagtttttagtcggcatatatcatttcttctctctgtgaatattattatttacattcacggattttcaaaaagttgtttatatatcagtctgtgtctcagtgtctgaccaaaaagaacaaataatcagtatgatcttcttgttcttggggatcgttctttgttgttattgcgttacgtcagtgttgggtactaatcaaagggaatatcctaactagtaactcgggacaaaaaaaagatactccaaaacaatcaaaacctgattcacaagttaaccgagttactataagtattcaactctttagattggatccgaacaaataatcaataacagtatccgttatcaacaactatatatccatcacttagctactattctgtgttcaaaaaaaaaaaaaaaagctactattctaatcaaacctaattaaaacttcaaatactctaaaaagcagaacaaattaataaaaatttgtaacgatctgagacgtattcaaaatgagtttgttacatcagttctagttaacttttcacgataggtgcttagtttggagaaagaacattacaattccccaaaacaatcaaaacctggttcacaagttaacaataaaagcgaatcaacagtgacttcatgaatcaactctccgacccaccttcgtcacgttcccctccaatctctctctctctctgatatgacactataaaacacactctctcattctccacgatacatcgcactcgtttaagtaagcatcatcatcatccttatcatcaagaaagagagaaaatgtcggattggggaccggtgctagttacggtgatactcttcgtgatgcttacgccagggcttctgtttcagttgccgggacgacaaaagtacgttgagtttggtaattttcagacaagcgctgtctccgttatcgtccattctcttctctacttctcccttgtttgcgtcttccttctcgcactcaagattcacatctacatcggctaattcattagtttcatccctctctgcgctgtgttttccaagttttctttaaaaactagttaaccttaaatcatttgttcaatattttaattccaaatgctctttcccatggtccattaatcctttgtatcgatcggacccttttgctttaattatgtgtttaccttttctcttcttgtaaacacaaatactattatgttttaaaataatcattgcattaattagttaccttattatatactactatgtgaatttaatcccgaaagatgagtaagtctgccattaaagctggacattcgattatttgattgcacgctaatgaatgcaaatactccaagcagtcatgaacaaaaaagtagtctatatatacatgtgtgttgaagtaatatgcatcttgaatgtgcaattcaaatgagccaatcaccctgacgtgtaaactcggttattctgaatatagaaaacctgattctttgcttactaaagagttaaaagacaaaaactacacctacatgcaatcatacattacatcgaatgcacatatgagagaaaaaagttgagacagaacgaaacaatggatctaattaatgcttaaaatccatttgaacagaattggatatatgaaaaacagaagcttccttaataaaagtaagtactgaacaatatgcattaagtacaaaacaacactacctagacaaacaaaggtttaaatttacaacccattacaatacaagaacttcaaccaactaagagtaggacctaaggaagatcataatttgttaacagggatccaaaatatcttctttgttatcattatcttcaaatcgtagctagtcatcttctttctcctcatgagtgtcattaatctcatcaagttcctccgtctttgaagacgtaggtctcctaaaccaagtcaccaaaccatattatcacctaaaaagcaagaaaacgtttgtgtttagaagaaacacacacacaaaaaaaaggacaacagagaatttgtaatgcatagtttaaagggtatgctacattctacatatcctcttataaaatctcgtatatgttgtcaggaaatttaatcggaacaaaattcaatttacaaaacctaaaccgattaggaaaccaaaacaaaccggttatcgttcttctttacgacaatcacctattaataattgcactagagcaccgacaagaatttcaattaggataaagtataatttagattggtatgtttttagtttgaatttataactgaatcaaatatagttctaacaattttcaggaatcaacttttactttagtttggtctgtttgaactcggtagattagaaatgttacgtttttgccaaaataaatgattttttttttgaaaaaatgagtttggaaatttgaaagagaagaagaggtaagtaaaataataaagcagctccctttctctctctgcttccttgtgtgtgtctgtgtgtcattcacatctccctcctctcttcttcaccattagaggagagaaaacacactttcaaatatatatataagtataactcatccaacaactccatttttatcttcttcgtaaaggaaacaacgacgtttactccaagatactgttcctcaatctgcattcttttccaatcgatctaaatttggtttctgtgctgagattggctttctgggtgttgctggtatgctatagtttcttcacctcttcgtatggattggttccccatttcgttgttactgatctattcgagatttcagattgcaaattgctgttgacaagctgagatcttaaggtgcttttgcagtagctgagatttttcgaggtttttgtctgttcgtgagtagaagaatttggatggtcgccgatgtaagggtttcgtttccgctatgaacaccaagcgcgcctacaagctccgtatccttttctctctgatttcatcttttagggtttgtttatttctgggacttattgattgactccagtgtcgtgcttgatctgctgctttttgctctggttcacgagatctgtatgcacttcgtagctttgtgttttgagttttttcaagtcatttatgacatttcggtatctgtgtgcttctaaatttataaacttttagtcaatttcttctttgactagagtctcatcccagagtattgcttagccttgacttatgtgatacattttataagaggaatttgtggcacattctgctgctgttaattgtcttaagattgggaggaagtcctccagggttctcgttacaggcggagaagatcacaaggttaatctatgggctattggtaagcccaacgccatcctggttagttctcatttctccctcccctgcttctattgcggaatgcctcggtatatagtttaggggaaatgcgacatactttagatataatgtagttgagcgggttggaatattttctgtctgagtacttgtggttgttttgtggtcagagcttgtatgggcactctagcgggattgattcagtaacatttgatgcttcggaaggcttagtagcagcaggagctgctagtggtacaattaaactttgggatctggaggaagcaaagggtaagttcagtagctctatgagcatctaaatttactcttctcattctctgtttagtcagccacagccggctcgtatatttactgagtatgttattttggttgcatctttgggtagttgtcagaactctcactggtcacaggtcaaactgcgtatccgtgaattttcacccttttggtgagttttttgcttctggttctctagacacaaatctcaagatatgggatataagaaagaagggctgcatccatacttacaagggtcacactagaggggtcaacgtactcagattcactccagatggtcgttggattgtatctggaggagaagataatgttgtcaaggtttgtagctgcctttttcctttcttagtatgtattggggaggaaaactagggagtcaacttaatagaattcaaaatttctattttttcgaggatactttgaagaacaataccacattttgtgaaataggcataaactggttctgagagatggtagtcaaagtcttgaacaaatatctcagagtaggctctttatgtgtggatgagaacatgtgattgtttactttaatgatacctctatgcggctgaccttactatcctagggggagaatttttcttagtgctaaaatacgctcatactacctgatcaacttggatactcgttattctttgtttcatctcagagtttgtactgtttaccgtaattgttttcctgaaaagcaagtaacctgcaaattttgctctctctcttaacgttggactgatatgtgggttgccttcaccaggtgtgggatttgactgctggaaaacttttgcatgagtttaagagtcatgaagggaaaattcagagtctagattttcatccccatgaatttctgctggcaacaggtctgtataactctaagtagggaaacttcgtaacattgaagctcctagtttttcgggtgacatagatttatcacaatgatatgaacccgatttattcttaaagttaagagtgctataagcaaaattacatgttgtaactaaccctgacatcattagatcactgtagcatcatcgtctctttgtaactcacaattttacagctttctcatatgttaagtgttaggatttgacaggagagagacttcagtagtggatatttcttcttatggcattgttttccttactgttcatttgaattatgtttgtttctgcctatggtcttaggttcagctgataagactgtaaaattctgggaccttgaaacattcgagcttattggttctggtggaactgaggtatcatgtgttgtctgtactgcttctatttatgcattgagtcgaattataagtattcgatctttaattcaactttctaatattttcatttcttagactactggggtccgttgcctaacctttaatccagatggaaagagtgtgctttgtggattgcaagaaagtcttaaagtaagttcttcaggatgtcccagttagaaatatatgaacttaacaaattcctcttttaaggatataacacttacacttactccttttaatctgaatatacatgtttgctatcctttcttctctaacttccatgcaaattgtagattttctcatgggagccaataagatgtcatgatggagtggatgttggatggtcaaacttgtcggatatgaatgttcacgagggaaagcttctcggttgctcatacaatcaaaattgtgtaggcgtttgggttgtagacctctcggtatatctctctctctctccccctacatgctttgttatagtttggcctgtaccatacttgttatctctaagctctccattcaattttctaatgacactctcagcgcactgagcctatgagtggaggcgccactcagtcaaattctcatccagagaaaacatcaggctcaggcagagatcaagcaggtctgaacgataacagctcaaaggttattctcggaaagttgcctggttcccagaaagtggatcctttattgaaggaaacaaagtctcttggaaaattatcagtttctcaaaactcggatccgttgccaaaagatacaaagtctactggaaggtcatcagtatctcaaagttcagatcctttggtaaaggaaccaaagcctctcggaaggttttcagctactcacagctcagacacagtaaaagagtcaagaaccctgtcatgtatgtttttactttgctctattttttctttctcttttcacttttttgttataattttgctgcttactaaatgatatcacatcttttggtttgtctgctgtttgttgaagccacaggaagtgtatcagactctcctcacagggttactttgaccagtgctccaaaaagtgcttctggtatttctacagttgtccctaatgctgcagcctcaaagagaaattttggaaaagctaacccaaaggcgaatcctccagtagtcaataaagaggattattttccagtaatcgtccccagaacggagccaataattgagcaggcatctgaatccagagcagaacttgacattatcggaagaactatgccatattcgctgcagtcaaaggccgctgattctcgaaggctgtcgagcagcagaaatgagccagatctaccaaccagttcgcttcttgaaaggtctcagtctcaacctatagaaccaatcactttacaagatgggaatacatatcctagtgacgaaggtggctcctgggatacagctgagagaacaaataaagagagcaaatgcagggtatttggaaggtttaattcaagatcactggtgagatcacctccgagaaatcacgacgaaaactgtatgtttacaagcctttctagtcttcctttgttttagagcaaatataaatggcatttcgtattgctaagacatcgtggcatcttaaatctggagaacacttttctaagtttctgagggacttgggtttatatttatgagatcctaggaatcagtctttaagtatacatgttgcttgtagtacaatttgtttcagtaaaacaactttttgtttagttggtccttcaatattatagatagatgtgtctgagttttctggatgctgttctcagttctgggctaactaactctttattccagctgacttgattagctataatgcaaatagagattcaagtcctactgaaagccgaaaaggaggtaactctttcccaacattcgttttttcttttgtttttcccttttaatgtgcgtaagaaaagattctaattgtgtgccttgacatactaggaagactgcattccctcgttctaaatagggaaagaagaggaagattttctaactttgagggtcctgtttcgagttcttctggtggaaatatgactgcaccaaacagtcgcccttccaatatggtaatggcttttaattttagttttctttttaatttgggatctgagactataaaatagaaactgtaaaaacgaagaatgaggaaggacaaaataaagagtgacgagtaattagtcagatgtcagatccttttcattagaactcaatttcaactgggcctgcatcttcagcgtattggcagacataaaatttcccagttactacagagatactgatgacattacttcctttcatacagctcaagcagagaggaaatcatgtgccagttgatcaaggaatcacttcagctagcgaagaagatatagttgcagacataatggggcaacacgatcaatttgtcagctctatgcactctcgtttggctaagttacaggtaacagcatgaaagtacactatgataatgcttttggtctgtttcctaattagaatgctagcagtaatccttcataggtttccataaacattgtttatcttctaaataatgtcaccaaatttgcaggtcgtccgtagatattgggaaagaaatgatattaaaaactcgataagttcaatagagaagatggctgataatgctgtaagcaacttctgtttgtttcctttcaaatccatgtatataaaaacaccacgtaaacattttccacttctcattatttcatttggtacaggtaattgcggatgtactacttatagtaaacgagagacctgagattttgacactggatacctgtacctctcttctcccccttttgacagctcttctagggagcaacatggataggtaagcaagtcattttgaagaacataatgacatggttatctattaaactatgaatctgtagtattttgtttttgttttataattaccgtctctgtagtattttgttttcgatttctaattaccgtttcatgtctctagtcatttgagtgtctgccttgatttgctgcttaagctggtaagaatgtatgggtcacaaatttactcgtcgctttccgctccctcatctgttggtgtagatattgaggctgagcaaaggttggtccgagcttcaatctcaccattcattgtcgttttcgattgcaatttactctctttggcaagtcaaatatgatttttgctattcaggatggagcggtacagttgttgctttgtcgagttcgagaaaatcaaggcttgccttccctctttagcaaggtgggtaaatttcatctactggacaatgaagagttagatggttatcttctctctttttttgaagtctattatcttatgtcttatatatatatatatatctctttatggatatgtagaagaggaaatttggtggccaagactctccatgaactcaacttaacatttcaagaagtttcatcgtgatactttttggatgtggatttggttccaatgtggagtttaacagtactaaagcctaactctaccaagctaaccaatagagtctatggaagactaactaaccctcgcgtattgcgtatggccactgctcgggtccgtaacctttgccttgcgtatggatacggtactgtctctcgtttcaagctaacttggtgtgtaaagagccatttcggttgttgtattgatctaggttatcatttcttccacactgtttagctatttgttcttaagagcacaaaaaagaagcctatatttaacaaaactgttttgtagaagattcagatcttgaagtacttatacccaaaatcaggatttgtcattccctcttcccaatctcccattcgtttaccaccaaatactacttgttgaatgcccaagtacctgaaattttatataaacaaaaattaaagttttctgcaacaaagaagcaatcaatcaaagaggataaaagggaactacaagttctcttgtgttacttactctgaactcataactgtcaaacagttgagaagcacatcaagggcgaagatatcggaagtaccaagatcaaccctacaagaaacagtgcaagtgaagttcagactaattacaagattttgaaggaaatagtttgcatcataaagatgtcagaacagttgtttaccacacacgaccccagttgtcttgaaattcgacatcgctaatgtcatgaaacgatgaaggcatcactttgaagcccttctctgcgtcatagagaggatcatattctagggatgtgtttgctagctgcaatcatagtttagatgataccgttaagacgagaatgaagatgaccatggaaatgggaagaaaaacatgattagcaactaggaaacagaagggatgatgaacaaacctgcaagttggatgtattgaaagcgcccaatcgccccataacataccatgcctgtataacctgttaacaaaactcgtggtcaaaagaaagaattggaagaatcattgaatcatcgcagtaagactcgacgttttgcaatagcaagaagaatatcaatttcttacacttccaatgagatcaacatctcgatctgaaggcgttccatagagctcaaaccatatgaaggaatctacaggattgaaactgcagtcatcaaaataagagtacttggttagtaatttatggaatgggatattattctagtagtcttatattatgttgcggaatgcagaaaccaaagtgaattaatggacaagatggaaaaaaagtttctcactctctgaagttaactttgaaagaaagcacagaaccagtcttctgtttctggaaatcttttcccttcttcctaactctttcttcaacctgaataattagtaaacatacacatgtccaaacttcacaatcgatagaaacaacacatataaatgccccagcgcatgccaaatagtcactaccaaagaaactataacagagacgagaattctttttagtgaattcgacccaacgattaccttctttctcatgagctcaggatttcctatgctatcaccaagaacagctcgaagctcttcatcatctttacacgcactttccagtaccctgcatttatcattcaccaaaaaaaggttcacactttctcgtgacttaggcaaaaacacaaacacctggagtgcaaaagaaaaggaaagaaacaagtacttggcccaagatgggtaatcgtgaagacgatcgtagtcgcgttttcgcttctcttctctaaccttgagtaatctccttcctctcgctgtagtcccagaacctttatttgccgccgaaattccgccgttatcttcaccggcgaggttgtcggaattagcagaaacagcaacgagagtgtgaagattacgcttgtgggaagagaatggttgtctctgagagacaaggaatggggagaaagcgaaattgagattcatggtgcatgaagagagcgttaagagattattttcgtacattttttttccttgtcgatctcgttactgtaaccaacaagctcaagttgagttttctgcgtttataaacttttgatcttacacatttcagagatttcattagacttgagtcataattatcggattacaacattttaaaaccggttcaatcaggttaaccggaacttatccaatcgaaatcaaacaagcaaaaaaccaatccgtaaaccgcgaccggggagagagagaatgagacccaaaaaggctggaacaatattcctcatggattggtcatagcttagcttatcacattggaagtaacaacatttggtacataatcttatgagtccactacaactcctgaccttatctcagtaaatcaaaatgctaacaacttgagaagaattaccacaatactactgcccacatcatatactcatattattactacaaaaaagagttgcagcaaaggaaccatccacattgacacataaactaattcctcaacactctctcatgccatcattacttctaactcaaagactcttctacaaagatcagagaatgcaatcccacatttgattatacgaaacaaagaggataagaacctagaaaacaactgatgtcattccttttagtttctggttctaactacaaacaaagattctcactataacaatcaactgaaaacactctttagttacataaaccaatatctttaccactttcatgctcactaccatctacttcataacctccaacggatgatagattttgaggataagatcattcaatgatgttcatttgaagtgaacacatcaaatgcaaaatcagtttgataggcttctaagctagtcaatggatcaatagacagcttttagtttctccaacacaagacgaactatatactctgggaaaccaaatcagaagcaagaaaacagcaataaaggattcaagaatgggtgaaatcttatgtatataataagctaaatgtatacaaaagtacatacaaacaaaccattcacaaaagatttttcaagtctaatatcagaaagagaagaaaagtttttgcctttttcaattcaatcacggatcaattaactcgaactcgtcttccttaagatgcgtgaagaatttgacaggaccacgaccttcgatctctttcacgaactgtaccttaaacggcagattagctgagattttctttcctttccaaagaacgacgtaatctttgataaaaccttccattcccatcaattcaacctccggtacacgaaccacatggtaaactttcaacggaaccgtaaccctaaccctagctccaatcttctccttcgctttctcgtcttcctccgtctccaacgacgtagatgacgatagatcagcgtccgcgtctacagaagccgccgatttcacagcaatatcgcaacgaatcgtcgattttggattcttccgcgagattgagaaggcgcatttgcttcgaccgtaggaagtagataatgagataggtacgaaaatggacgaagatgaagagttgatcgatttgcgtccactaagagaagcagcaactagatagtcttgagatgccggaggacgaacggcggcgataatcgccggtgacagagcgtaactgttagtcatctgcgtccgagccgaagaaaaaaatcttaagaaagtgtgagagaaaacaaaaaagatcatatcatttagcccctcatctatttatattagatggttaatttaatcaaggtgattactaattttgctaattatttggtttaaattaaaagtcggattatttttggataaagaaaggcgacgcgtgtcagacttaagacaatgtaagagatgaggaacttgtggcttcagatagagaatcaacactgtaaatatcttgagacaatttccagatattattggcaggattttataataacacaaaactagtatatataaacttttatatatccacaatggtttccaaatcaattaccaaaataaatgaagtctattaaaagaaacaaacaaaaaagataggaagaaggctttgtggtctcagcaatcatttttggcattatagtagccattgttgttattaagacaaggatttagagtagctttctttcaccattgtcttaacaaaaagctctcctgctctatatgaagatcttacctgcaaaaagtatatatccaatatcaaacaagtacatttctgtatcttctatgttctcagatattttttgacataaagagtaagaaatagtttgtggctttaccagtggaccacttgcaacataacgaaatcctattgattctccgtatgttttccagaaatcaaacttctcaggtgtgacatactctttcacagtcagatgcaatggagttggcttcattgtggaacaagagaaacggttttaaatcgtagatgttctttgaaatttgggatctttctatcttggaaataggaatattgcgaatgatgtggggaatgttgaagtgattagtttacctgtagatactggccaagtgttagaatatcaacatctatagctcttagatcagccattgcttccttcaactcttcgtctgtttctccaagaccaagcattatggatgtctttgtgatcattccaggtttgctgatctttgcatgtttcaaaactgacatgctctgctcatatctgcattctccacattatatccacattaaaatggagatttactacaactaaagatgcagaacaccacctatgtctcactttaggagatatttgactgtgtaatatgagattgacatcccggagcagaggatcaattcactgctcagcccatctatgccataaccaaatttgcagaacatataaaaaaatgaagaacaagaaacagcactcacccagccctaggatccctcacaagtcgctggagccttttcacagtctcgacattgtgagcaaaaacatccaatcccgagtgcacaagagtgtcgacagcctccaaatccccacgaaaatcagaagttaagcattctatcattatatccggcttatgtctctacagagatgagatatatattttcattttcataaatactctgaaacaacattcgagaaatgcacaaaaaggtatgcttaaataacataatgcataaacaaatagaatattaataaccttcatagctttgacagtctgcgcaaaatgtccacttccaccatcaggtatatcgtcacggtctacgctggtaataactatgtagtctacactgcaacaaaggaaaatgcaaaatagcatatcatgatacacccatcataaattaacaaagatgcagtagtgactgttgagagacactatttttaattttcatcccctctccatttatcctatctagttaaaaattctgaacacgaccatgaagagaatctaaaggacaatataagcagattactcagatcaggaatcaaataaaagttacatacccccaactggctatggccttggcagtgttctctggttccattgggtcaggaggaggaggatttctacttgttttaacagcacagaatctacagccacgagtacaagtatcaccaagaaccatgatggttgcagttgctacaccatcaccacctccattccaacactacacatcacataatctaattttcagaaaaaaatcacaaatttagagtaatgatggttgaactagcatgtagtttactcataatttctcatacccacaattcataaaaccgatacattttaataacaatcttcgagatcataaacacaaaatcgaaatagctaacctcgccgatattaggacactgagcttcttcacaaacagtattgagattgagacgagaaagggactctttcacctcctgaaacctttcgccttgtggtgccttctgtctcaaccaagcaggtttcttcacattcggatctctccctgtgaatggacccatcttcggcattcctcctgggtaaggctcactcttcttcccttctaactccatcaaactcttcttcaaggacgacgaatcctccatctccgacgacaaagacaccgccttggtccgcaatggcgacgaaacatccccggattcgcatcggattctgaaacccaaattcaagaatttactggaatgatgatgaagcttctgggtcgagatcgaaattgagaaagtgggtttcgtaattgagcaatgatgcatcatgagttttttgcgtatgtgtgtatatatttgtgtgtgaggcaaaactggggaaaaaatgaaattaggcgatttcaacagagtgtggagagactctgcttcggttagcaactttgggatatccgccaactaccaattactgcgccaaaagaagaagaagctaaatatgatagttaatatattgggccaaatatagaagcccagtaagatatgtttattagggatatcttaaagcccaacattattgtcactgggactctagcccaatacaggcatttgtcttaaaaacggcgaagtctcaagccaacagagatagggttttcgattgtcaccaccaccaccacttctggtaacgcagtgtctctgattttcacttggttaaagacctctagcttcacggtcaaacatcataaaccttttgccgccgtcactaataggaattaactgatctcgtcaatggcggaggtggaggagattgcgcacgaggagcagaatatcgagaagagggagaagaagaaaggtaaacacgagaagccgaagccatgggatgatgacccaaacatcgaccgttggacaatcgagaagtttgatccggcatggaaccccactggtatgactgaaaccagcacgttctcaacactctttcctcaatacagagagaagtatcttcaggagtgttggcctagagttgaatctgctcttaaggagtacggtgtcgcctgcaagctcaacttggtgcgtcttcgttttcactaagtctttgtagagcagagaaattaggggttattctagttgctttttcttcttttctgggtttttattgatctgtgtggaatattctgtggctgcgattgtaggttgaaggttctatgactgtttcgacgacgaggaagacaagagatccatacatcattgtcaaagctagggatttgattaagcttctttccagaagtgtccctgctcctcaggtattttttcagcctcacttcaagagcttagttagaataaactgtaattagaagtctgtaaatttcggatatttaggtgtttatgctaatttatagcttttcttcacttgtatcacaggcaattaagattctcgaagatgaggtgcaatgtgatatcatcaagatcggtaacttggttagaaataaggtacagttcaatcttagtctcggggctcaattatcactcacagttgtgcttgcattttggtccctttccatgttggcttatgtaaagataaccaatagcaccttataacgttgttactacattccactataaacctagaatacttcgtttcgtgacatctttaaattatttcagcatgaggaaaattagtttatgtcgatatgtatcttgcgtgcattgtcatctcgtccttacatagacttatttttgcaggaaagatttgttaaaagaaggcagcggcttgtgggtcctaattcttctaccttgaaggtgtgtaaaatgtcttcaagtggttaagcaaaactaatgtattcttatgcaaattccttagagaaacttgtcgaatatttgtcatttgtgttttgctttgaggcttaataattttggcttcttgcaggcgctggaaatattaaccaactgttacattctagttcaggtaattgtgtgtttcttttgcaaatgtctcactacattggtttttgatatttttgtgttaattggaattaatctacgtctaacagggaagtactgtagccgctatgggtccatttaaaggtctcaaacagctcagaaggattgtggaagactgcgtacagaatataatgcatcctgtataccatataaaggtgtgtccagttttttttggttctatgtacttcccttatactcccacaagaagttgttttagaagctttgtcaataggctatggtaaatagattcatatacttcaacacttggttatgcagactctcatgatgaaaaaagaactggagaaggatccagctcttgcaaatgaaagctgggataggtttcttcccacattcaggaagtatggccttctctattcttgatgaataaattgagtgatatcttttaatatatcagtaactcatgagcgcatatatcttatctatttccaatttgatttgacaggaaaaatgttaagcaaaagaaacccaaaagcaaggagaagaagccatacacacctttcccacctcctcaaccacctagcaaggtaggaaatttgcttattctcttattgtatcattttctctgtgtttctattttgttaaacccaacatgttagaatgtttctcaacaggtagtttcgataaagctcttacgacatgcgcactgtctagtttctgctttatgtcttttgtttctcaggtcaatatgctaatgcatggttttgaacttgttttatggttttttcccagattgatatgcagttggagtctggagaatacttcatgagtgataaaaagaagtcagagaaaaaatggcaggagaagcaagagaaacagtcagagaagagcacagagaacaaaagaaagagagatgcctcattcctcccacctgaggtctctcttctaacttgagtgtcacaagacacttatcgtttctctgccttctatttaaaaaccttaaaatccgtaacactaacttgttcgattggttaattgcaggagcctatgaacaacaatagcaacgcaaacaaatcagaggatggaaagaatgatataaccgagttaacaaattccttgaaggtaaaatgaaacctttatctgtacacctctcttctttgctttagggaattggcactgagtttgggttttgttgtattgattttgtggtgttgcagagcaagacgaaggagttgaaaaagcagaaaaagacacacgagagagtgaatgcggaggagtatattgctggtccatcttcttctgctgataaatcttccaagaagtccaaaaagattagagattaattctaaatcctgtttttttttaaaaaaaaaaaagagagaaaagattgaaacttatctatgctcaaaactgtaaaaacaagttaaatctttatttcagccgtcaagttacttcattaaccaaagaggtattacaaagttggccaagatattacaacaggcaggattcacacacaatctctcgcttgcttcgctagactacttgtatgcataaaagagaagatacatgtctttgaaatgttgatattagcaagatatgtatcgtaattgccattctgcttcagtttccattggagactgaatgggagttagaaggggtgttccttattcgacatttaaagaagaggtgagattattaacactttcaattaggagctttactcttacagagatttgatctaaccaaagatgcttgattaaagatattgccgttgatgttttttctggtaaaaaaaagaagagaattaatattaactgtaaaaaacacaaaaaaaaacggaaaaataggacacgtggaattggtgctgatgttttacctgccactggttgcctcacagcctcaccacctctcaaagtcgcctgagaatcagagctctctcttttctctctcccatccttttttttttttttttttttttctgtcgggttctttgtgctttccgtcaatttcttctcggagagcgactaatttcgacgattagctcggtggctgttttctttcaattcgtgcatttcgtcagattaacaggttttaagggaaatttcttccacgcgacgacttttttttgtttggttcaagaatcagtaaatgtattcgcctttcattgcagtagtagggtttatagtttcttaagctagaggtgtgagtttttttcttctccttaggttttgagatataaattttgggttgtaatgggggatataacttgggttgaagagggtaatggctctgcgacttcttcgaggaaaaggaaagcgagacctaaacgattcgaatttgtaggatggggttcgagacaactcattgagtttctacactctcttggtaaagatacttcagaaatgatctctcgttatgatgttagtgacactattgctaagtatatttcaaaggaaggtcttttagatccttccaataagaagaaagttgtgtgcgacaaaagattggttttgcttttcgggactaggacgattttcagaatgaaagtctatgatctccttgaaaagcattacaaagagaatcaggatgattctgactttgattttctctacgaggatgagccgcagattatttgtcattcggagaagatagctaaacggacaagtaaggttgttaagaaacctagaggtacttttgctgctattgtgagtgataatatcaagcttctctacttgagaaagagcttagtccaggaactgctcaagtctcctgatacctttgagggtaaaatgttgggaagttttgtgaggatcaagtctgaccctaatgattatcttcagaagtacccttatcagcttgttcaggtgacaggtaatttcctgaaagtcttttatctgtgattgtcagtgttcgtgatttctatggacaatataatcacatctcttaaattttgtctctttgcttaaaaatctctggtctgttgtagaaagttgagctctctctgtgcttttgttttctctgttatataggcgtgaagaaggaacatgggactgatgattttcttcttcaggttacaaattatgtgaaagatgtttctatatctgtgctatctgatgataatttctcccaggtaatatacttagaagttagaaataatgttcatacctcaattttttgcttatgatcgatgcaaagtcaggtacccatgtagtttaagaaccggcaattgggattctgttctagttatataacacatactatctttcactattactatgtttgacaaacgcccccattttaacctatataatctgtcgtttatcatagcttgatgtaaactttttcaggaggaatgtgaagatttacatcagagaataaagaacggacttcttaagaagcctactattgtaagttttctattaagattgccaagacatgccattttgcagtggtttggaagataattattgcagctccctctgttaaagatttgcattttttctgtcatgtatcccagcgacttgctaaccttgctgttcatgacattttgattttgtagttctttaatcataattcattttgaaccttggataggtggagatggaagaaaaagctaaaaaattacataaagatcaaacaaaacacgtatgtttgcgacttcctctcatgattcatttctgtatatcttatccatcatgcgtatgaatgtgactgcaatgatatcatctgaaagctcagtacatttacgatgatcaacttttaactgtattttaagaagaaaaggcgtcttgtagtcctatttcttctgacttattgtcaacttttgatgactacttttttagtggcttggaagagaaattgaattgttaaaaaggcttattgatcgggctaatgagaagggatggcgaagagaatatccttttttgggaaatagtttcgtttcttttacttttaaatgaataataatgttcggaataagtgatagtgaaaggagaaaaaatctttgtttataagttttccttgatttcatgagttgtaacgctgtccgagtacctagataagagggagcttcttcaaaatccagatgaacaggccaggctactccgcgaagttccagaagttattggagaggaacttgtacaaaaccctgaagtttcgtcccctgaggctcataaaagtgacaacgagcaacgattgagtgaatctccattatcgtgcatccatgaaaccccagaagctcgcaacctctttggtggagaagatcaacaatttaataacggctatgtgatgtcaaaccccatcacaactccgggaatcacatcttgtgctacggaaattaacaagggattgccaacatggattgcttctgcaggtgcgcataacatgtatagggtttcttgtttcactttgttgcatcttaccaccattgttctttgttattacttaacatgttaacaaattttagctacttcctgttcttgcctgtgacaaatttgcatcttatctgccttttggatgttgagaagccagtggatattactgcgttcttcatatgaaattcttgatttacccaaaaaatagaaaattcacgccaaagaattggttcttgaaacttcatgtaaagtttgtagcagtattttaggctatgacagcatctggtggcatacaggttgttgtgtctctttctttctttatttttgctgtggcagaatctgaaagagaaaagcgagcaaattatgctagtggaaatggaaaagagatgtaatatttgttttgtagctatactggttttaagagagaaattgacgtatggatcttttaaagattcgagattgatatgcgtcaactagttggtctggtttgctctattgtatagtatccaaactttttataaaggatgagttggttctggaattggtaccaatccgcattcttgtcaattacaggtgctgagtatcttcatgtagatgtagagcagccagcaaatggcatcattggaggagagacgccgactgaagagtctaaagtttctcagcttcagtcaagtataccagtaaataatgtcgacaacggatctcaagttcaaccaaatccatcagaagtaatcgaactgagcgatgatgatgaagatgacaacggtgatggagagaccctggaccctaaagttgaagacgtccgggttctgtcttatgataaagagaagttaaactggttatacaaagatcctcagggtcttgtacagggaccattctctctcacacaactcaaagcttggagcgacgcagagtatttcaccaaacagttcagggtttggatgacaggagaaagcatggaatccgcagttttactaaccgatgttcttcgtctagtgtaactaatgcaatactctgaagactattagattcagtcaaaagtggtttcagtaatctgttatcgtctgtcattatcttcaaattgcagtaggttttgctcctccttttcagtaaacagcaaaagaaaaaaaaaggatgtgaagctaacagtgttatgaccttagttagactccacgagtatgaacagtttgttttatcagtcattgcttttgcagtttcttgtctaaatatttatccaattatggaaaactaaaaggagattaatggaaaaactaatccaattatgcttgatgattagtacacaatgagtgttttccaaataagcttaggtgttaattttgttttcgtggttaaagtaggatatataaaatagttattagaaagatatatgagagaagaatcgaactttagtaagatactataattacaggttgccaaaaaaataagaaatataagttactataattacagaaaaaacaaataataaaatttagtgtaataataatgataaattatttaagacaataatgagaagaaaacaactttaataattagaagaattggaaccaaaagaaaaaatgagaaacccaattctgaggtcacaactccagaagaaaaactgagagagtttgctcgaagaagaagaagaagcaaaagctttttaaaatccatttttattttcttgtatgattccaaacttatcttcatcattctttctcaatcataccattctttcttaatctccaagctcgtattctatttcttattcgatgtttatttcgttgaaatctcgaagcttctcttcgggtaatacctaaatgttgattggttactcgaaagcccagatgagattttgagagtaggccgaaattggagccgtgtttttggttcagtttctcgagggttcgatttcggattcgtgagcttttggggactggagaatatggacaacggccatgaggaaagacttgccgagaggttttcgggagtgggactcggagaatcatctggttcccatgaaaacgacgttaaaaacgatagcttgtttcaagttatcaaagctgttgaagcagcagaagccacaatcaagcagcaggtttgtgttcatcatacttagcttctctcactttctgtatctctgaaaacatttagctttagaggtaccttgctcaatcacttcatttcatcacttgaagttatcttctaaggttctctttagggcatatcaaagtagctgtagaaattgcaggttgaaatcctctaactaatgccagggaatggaaatgagttaaggagtatatttggggttgtaggatccgtttatgaatttctttgtctcgtttcattttctactgcaaattgggcggatgatttggacatagagtgtgatttgcgtccagcagatagattttctctgacaagtgacaatttttattttttttatctctgaccaggtggaagagaataacctcttaaaggctgaacttcagagaagatatctggagcttgccaaatatgtaagtcgttttatttttcattttcctggtcaaagaacagaaatatatatctcttttcgcccctaatgattctctaggattttccctagagctctgttgacatttccattgcatgactttagggtctctctgaccaaatttgtggtatatatgttgttttcatggtagtgttttttcctctctaccttccttagaaatcaggagaatccttgccccagacatctgatctaggaaaccactctaatactacaaccggtgggtcttccccgttacaccagtcggccgctggtattagtctagttgatcggaggaaaggcaaaatcaatgcttcagctgctcatccgtcaggtatgctggttgttcaccagcatgtgcatccaaatggagaggaagctactgtgagtaatcgttctgaagaccaccattctgagggaatcatgactaatggcattgtcagaggaactgtaggtggtgggggaacctctcaattgtcttcgtcgccatctacaatatcattatctcctatgaggtactgaacctctaactaacaacactggcccccgttctgcaaatttatgtttatctcatggtttaactatatttgcatcaaggcagagtgtattctcataattcaatatctggttttcctttgctagaccgctattggaaggagatcatgacttacacatcaactcgtcttctcatgaattgatgccagtaggtgaagtaaataattcggggactgcatggaagcaggtctcagtccctcttactatctagctttccttcttagtgaaagtgagaaattgtttccctgactatgcaattatccaggaactcattcacaaggtccaagaacaagaccaagagattttgcgcttacgaaaatatcttgctgattattctaccaaggtaaatcgctagttttaatctctagtgttttatgcatacttggttgatttacactacattgtctgaataaccttttggcctgtttttttaggaagtccaaatacgcaatgaaaaatatgttttggaaaagcgtattgcgcacatgcgttcggttagcttttctttttatctattacaaaatatgtgtaactttatcttgtgacgaattatagttacttattctgttaaccacttagggggtaatttatctttcttgttgtgacaggcatttgaccaacaacaacaagaccttgttgatgctgcatcaaaagctctttcttacagacaagagatcattgaggaaaatatacgcctaacatatgccttacaggtttatcatctgtatctatgtgactataattttctatcttttggcatgtgtattttaaatcttcgtttctactttatattgtaatcctttatggttggactccagttatcaatctttgtttccatcatttttagtggttcaattggcaaaaaatcggatttgtctttgagacctccctttcattgtatgaatctaaaatggatgatactattttggttctatcaggctgcagagcaagagaggtctctgtttgtatcgatcttgttacctcttctatcagaatattcgctgcatccacagatctcggattctcagtctattgttagcagtgtgaaggttagaattaaaatcttaagtttgttatctttcttagtttatttgttttgatcttcagatctccttggctgtctatcttcgaaaactatttactgtgtgctagtagtttggatggttgctctgcattttggctggaaaagtttcaactttgccctccttgaaattcataaaagtaaaacataatacaaaaaagtgataaaatggtgtccttagtaactgttgagcaccatagagaactaaagtgactgatagagctccctggttccttgatgttggagtgaagtttttatgtagttctttcccgtcacaacatgtgattgatgtttacatcatattcaggttctatttaggcatctgcaggagaagctcaatgttactgaggtatgatatgcgggtatggcgtctgctgacatcatatttcagcacttgtttcatttgtaattgcagtttagtcctacggttgatgcctactgatctatgataaggggattcgttctgatcttttttcttgtctggtgctagacaaagctaaaggagacagagtaccaattagcaccttggcagtcagatgtaaaccactcaaatgcttcacctttgtcaccatatcagcctgttggtgtgggtttgagatattcagtaagttcgtattccttaatgtcccctcaattttcttaactgacttgaaccaaaaaaccttcttttgtttccattagacagattcagaacaccatcatcaagacaggcgtggtggctcagctgcgagtaattaccatcttgatggtcctgagaggtattaatacaccaaatttgctgttgattcgcggataccaaagataagggattttaaggataatgccgaaagcaatgaatattgtaaattttgggagtaatgggctgagtacagataccgagcattaaataactgtcaagctgttctgtcaattagacattttattaactctttggtactctctgaaccattaattttttcttggtacttttttctcttttctatatatatggccacgaaaaagttaattttgttgcacggtaacattttctgagtcctcgcctggggtttatgaaagctagtggtggatgaatgcttttgattgcaatgttgaaattagtttaatgatcaaatgtgtcttctgtaacagtaggtcgccagccttccagatgcctgtgcaaccagctctcaatcaagatgaatctcatggaccaaataatcgtgttcagtttcgtgagcctctcagcaatacttttatggacgatgcatatgctgacgtacaagcagattcaaatacaactttggaaaattcgacttatgtggctgtcgatgatccaagcccttcaaattatccgattttggccccagttcttgaagagccatcttcatcattttctgagggtaatggtttaataacaatgatagtgacattataacaattccatcaccgtctttcactttgttttaaatattgtgaattacttttggcagctgcggatgatgatccgttgccaggtatagcagacttacagatatcaggagaaccttttcctgggcgagagcttcaggtttctggtcactctatcaacggaacgacaaaatgtaattttgaggtgcatgcgaaatagaaagctttagtttttatccattttacgtcaaattgcattttaagatatcttctcctcttcttgaaatatcagtgggtaagacatctggaagatggatcagtgaactacattgatggtacctatgtttgttccccctactacccttgctttattctcaaagtttatctttccattttttctttacagttatgtatggcgatacaaaatatatatatatatacaaaatatatatatatatatatatataatatatatatatatatatatatatatatgacgataagagcttgattgttgacaatgtccaaacgcaggagcaaagaggcccgattatcttgtcacagccgatgatgttgatttataccttgctattgaagttcaccccttggatgacaagaaccgcaaggttttttttactaaatcttttctgatgaataagaaaatacttctaaagcatccaattcactttttgtggagaacatatgatcagcccctatttcaaatatgtttggggactttaatattgtgctagatgtgattaccatttcgttacctgtctggattttttattcgtctgcttttctttcggaatctagggggagcttgtgagggtcttcgccaatgaaaattgcaagatcacgtgtcgtaagtctatgcttttactctgaaacttttgtcgctcatgtacttaacaaaactcgatctgtggcttgtttgatccatacctgttgaaactccgtagtttacctcatgcggagaaagcactactgcgtgacctgttttgtgttgagttaaagatatcaaaactgcatgacttgtcagtttataattcagtattggtttcttctggctgtttttcggttggtctgataattcaattctatctcctttagatctgagcgtttctggtaaataagaagaatatttcttgaaaagtttcttggaaagcttactttgctgttagtattcttagatactgcagggattgccgctgcaaatattctgtgaattatctggtgactggtttcctcttctattttcgcagatccagagatgcagagtcatatagagaagagtctttataacggtcatgctttattcaaagtctcctattcagtatgccacttctcttatttcatcttttacaaatctggtctttggttttcctgcacatacctcctctatgttactctctcacttgtgcgcctattgcttttttactatgcgatctctcttatgaaacagattggttatttggatatatgggaagcagctacattgtctattaagaaagaaggctacagcatcaaacctactaatgaccctgtaattacagaaaagttctcctcttctactaatgtaagagtcttgccttatttgcccctttgtgttagaaatgtaatattggctgaattatgttaacatacatcccgaagaatgaactaatattgtgatctttctgattctgctcgtagattgtgattccctttgatcagcctgcggattttgtgattattggtaccgatggcgaggagcatctctgtcgagtagtggacaatgatgcaacagatcttagctggtaagtagaagtcgtctttctttggataaagtaaagtagatcaaaactccttcgtcgtttaaaacagattttcttctatgaaaatagatgaaagtgaaacgagacgctttttgtttttgtttctttctgatttcaaatgcatcaccaatagtctaaacttgaattagaataatctgctagtgttttctttttaaatgaagttgtttaatgtgttccaagtattcagttttgggtttcttgtattaagcagtcaatcttctgttttgtgtttgtatttggcagctcaagagatacaattgtgctcacccttagattatttcttaagaaggtaatgtttcagactaataaccatttatcttctttgataacatggttgattcgtttcctttctaacaaagcatcatagtcatactaatattagcgctttttgagagaagcagtggttgattgtttggttctctgatttggttgcagactctgcagagaaagaaggggaagaaaaaaggatttttgtttaacaaatgagagtttttggtaaatagtattgttggctcttttgtttcttctctggcctctccagctttagaatattagagatagtcttatgaacgattcagagttatttatgtaaggcttctgtagctgattaagaaaaaactattcaatcaatttcagtatatgaaaaaaaaaatatgagcaaaaaaaaaagtagtaataaaccaaatcttttgttgatctgagttccactttacatttcattacaaatgtcggttttcagaagaagatgaaatgaaatcatttctaaagagaagccattctatattctaagtcaacatgtaattaccaaaatgccgtctttggcatatgtgatgttcattgaaccacatcatacaaagctaacaaagcccaacatatgtgatgttcactgatggcatatgtgatgttaaagtgggctagcagcccgcgggcctgaacgggctaagtataaaaaggagcttagagaggaggttatgcaactaggagtgagctctcgctatatgttgatgttcttgctgcatgatgaaattctagtgtgttgcagttcggcttgaagttatggagaagtgttaaaagcggcccgaaaattggtagtcccgtgggggaaaggctgctttggttatccatcatgtctcctcgagaaatatcaaaccaaagaatggagtatatcatattggtggcaagtcagtccaatggggtttgatcaggacggcttgggaggattttgatgctggaatcagagatatgcacaatctttttttgattctcgaaaagggaacctgggcagatggccgagtgtatacctctagtgctgaagaagttaggtggcaagttgaggtgtgccaaggatgtttctgacgatatataaataaatgttacaaggaagaagtacacaagacaagataggccaaagtaactgtagtctctaatccataaataaaatataaaaagttttgtaagatagaagcaaagcatgaaaggttttttttagttgggggagagaaaatgaacacgagcaagagtgtactcttttccagcaatccaaacaccagtttgtgaccactgtacatcttcccaatcaagattctcctccaacacctactccattccaaaatccacaacacatcatcagcatttgttttataaagaattttcaaaacaagaagagtcaaattggagaaaaatgttaacctcgatatgatctgctgggagtggaaacccgatagaccgcataagcttctgtgggagaggtttcttacatcgtgaccagcggaaaacatcaattaaactgttgtctgaatctgttttgtcaccgtttgtcagatggttctgtgacttgttattattattatctgtctccatagcttcatgtgatgattgttgttgtgaggcttggattgctttgatggtcttctctcctgcgaaacagagctcatacctttttgcatacacagattagattcagcgtcttatgtcattaatgtcagataaaagaaacatgtgatgtgcatacctgcatgaatgagtttctaagtacaaaacttcccctttcttcaagcgggcagaggtgaaaagaggcttcttgagacctttatcagcaacaatgcttatgctatatttaatcctgcagacaagtagatcgatgcgtaagtaaaactgacccttgcgtctgataacttttaggtgacaaagatttctgataaatttaggaaattctgtgaacaatttttgaagtatttggagattattgacagagagttaccaaggttcattgcagagattgtattgtattgtgacttctcgtacaaacctttgttgccgcagagcattctacagaacagtaaataagtcgtcagtgttcgaaagatatgaaatatgagaaaactatgcaagccgccatgtgtaataatccaagagttgtaagaagattaagagagcagatatttccaaagtggaaggaaaataccgaagctgcagctctggtggtcatagatctttcaacagccattggtgcaagagttggctccacagttgaggagtgtgtaagggaaggttccagttcaatagtcccacctcctttctggaatcatatcatcagaatttccataaggagttttacacaaattcacttaaaactagatattacgcacatagtgggagaagataatcaaggaaattagaaagacacataatggcacatgtcaaatcaccttcagtatatagcaccgctcaactctataactgcatccgattccagctccccatgctcgagaacggacattgttccttagcttggaggtgtagtctaacaaatatatcagttaagttggaagtttgataaagattcttccttgatataaagcagagaagagctcaacatagtatgaagttcacatgcaacagtcagttaaaggaatcaaaagcaagacagaggtaagctaacttacaatcttgtgacggcaagactctaatagtagtgcgcagctcttgcattgtcggtggaggaggagaagctgtgggacgacagtaacctgtatgcatgagaactagatgacaggtagaccagaatcaatgtcatgttcgggccaaacaaagataataattgcataagattcattagggtacataccagcaacaagatcggaatcgtctgtgtatatatctgttccccatagttggccacctcttacctgcacacgagccaaatgtctcagcaagtaacaaacaagggagctgtgtttctcaaattaataggcgaagtgaattaaacagatcaaaagactggaactaaaactatatgcaccaagtcatctagaagaaaaacaatgaaaatgattatgagaaaaatttggatatatattcgacttacttggcgatttgtagcagtaacatgctcagctggaatcctaacttcaagagtggggccattattagcgaaatcaccgcttttatcaggatgagacaaatcatattctttccacaacttaatcagttcttgcatacattcgccaactttgtaaacaacaatcgacacctctgacttgcctgaatcatcagtacaataaaattcaacaagatcaaattatgaagtgcaaagggattcaaattgtgtagaaaataaaagaaacagaaaaatgataaaagttaaaaaaaaagccagggcagtaagtaacttttagcagccaaaatctcaagtagcattaaggatcacatcgactattaggtccatatttttagatcttgaggttctttatatatttgacattctactgtgagagtaaagaacagtaacctaaggacgaccataagaagaaaatctcaaaatagattgcttatcaagtgcatgtgtgttcgtagatgaccatttcagtgatatgtaaaagaaaaatgtcataaccggtttttttttactattgttctccaagcagtgcaacttgatcctttcttgaggatatagaaatgaatgattaccttgtactctgcaaaataaacacaatcaaaaacggatgatacattacaagccaggccagtaattacaaaaacaaaagtcttgagcttagctaatacctaacttacgtaataaaagacataatattcttaacacagatagaaaaggagcggagaggaatccagagaaaaatcaaatttggttttcagagataagacactacataatacacatatgattgcagaattttatttaaaggctttttatcttttaagaggaaaaacaataatggtaataagatattcaacaataatggccccttcatcatatagtatcgtatcacctgcagatattactatataggctccaaatttaatcaatggggtatgtctctctaaatggtaaagataaaggattctactaagcaatgagaaacatataattataattaaacgaggaagacagagagacgcacccttcgttgtcctgactccgtgagcggacattgtcgcgattagtggtttgtgggctgcctctcggtctcagcgctctcttcctctgctgaaccccataattgaaggcatccttttccctctcggtagctccttcaccctctaaacacccatcttcagattctttttcactgattctgctgcgcttttcagctctttctgcctctgaatcaccatccctctctctccttttttcctttgtttctctttcgtctttttcacaattatccggttcgttctgcttcttctgctctggtgccacatattcctgctctgagggtttggcagatgcttctcccagctctttctcgttctgcgagatctctttctcagcaccagtccttggctctcttttgatatgatctttatctttctctttatttctttctcgatctttctgctccatcctctcccgttcccacctatcggattccctttcttctcttccaatctctttgggttcactcatgacactaccaacaagcacagatactcgacggtcatttctatccttgtctcggtccccccattctcgatgctttaactcttttcttttcttatctttttccttaaatctatcttcgtttttggcatcaaccttgttttctccgacggtttcacgtccttccaaatgagacccctccacaggcgcagagagatctttaggcccaacctcagttgggccttgcggattaccgcgggatacaacccacgggtccacatttgcagtcgaaccttcagcaactctcttccctctatggtaatccttctgctctttccaagccaagtgagcatgcccttccttttccatcttaatctcccccttttgttcattataattttgattctccctatcaaattttgtatccctagtatagctaccggcattacttttcccgctaaaatcatcccctggacgctcaaacttggcatccctgtcactcttaggaccctgaatctccctcttagtctcaccatacatctctctcccatcattcctagtatagcttccggtattaccttttccgctaaagtcatctactgatctctcaaatttcacatctctgtctcccttaggaccctgaatctccctctttgtctcaccatatatctctctcccatcactcctattttctctactctcaaccctaatttccctgccatccttagcaccatctctcggctccatcggcacaggggcgtgagtcaaatgaggatcactagaagaaacagttgtgggcagcgacggagaccgatagacaagaggcagaggagagcgtctctctccatctctaggctcgcttctcgcaaccttaaccaccgttctagattcaacctcataaggagcagaagcagaagcagcagcagcaagtggtgaatgggagtgagaatgagaatgagggtgaggaagcgcctggaggtgaggttgaggctgagattgagattgagattggggatgctgatggggctgttgatggttatgatgaacctgagccggtggtggcgtcacaggctgatgcggcgatttagggtaagatccagaatcctcgtgagggtattttgctactgatgaagaagaagatggatgagtaacaccctcttcgtgagatctctttggaacaccactcatcactcccaaattcaataacccagaaattcactgctgcaacagatagaattgcacttaattcatacacaacctagagcaaaacacagaatttgaatcaccagactaaacattgaatccctaaaatgaacacagagccgaagatttttttaaaaaggatatttcttttaccaattgaaactgaagcagagcacgaagaagcaaacccttttggattttgccgccgggaagtaataaatggcaaactggattcggacttttgcctctctctgagtttctctgatgagtctaatttattttccgttctccttggtttgctactttattttggacaaatgtttatttttcgcgttaatatttgcttcttgtcacagaccgtcgtgctcttacaagtctccacaatttaggttttatttattgccgttatgccctcatacttattcaatctctcactttttccataaaactttctattaattgaattgttcataggatatagattttgtcgtttttaattttttttatacagtacaataaaaagtcaacggaaaacagagctcattaaattcactgagacgaaataaaataataaataaataaatcgaaggaaggagtcatatcaccttggtatttatatatctcaagcgaccatgcatgatagtgaaatattcaagtttaaagacatgatgatgatgtcttgcacagttcaaacattagtacttgttccatggtttctagtagtatttgtactcgccggtggagaagactcatccgagacgacggcaatgtttccggcgatgtttgtgttcggagactctttggtggataacggaaacaataaccacttgaactcactggctaggtccaactatctcccttacggcatcgatttcgctggaaatcaaccaaccggtcgcttctctaacggcaaaactatcgtcgatttcattggtacatattttacatatcggtctctacatgcatttggttttgaaatcagtgcatgcataaatttaatttgcacaagagattcacccttttactttttttttttgttttgttaattttttagtttgttttgggttagcaattaattaattaacatgatcatggggatggatgtggatggttgcaggagagttgctagggctgccggagataccggcgtttatggacacggttgacggaggagtggatattctccatggtgtgaactatgcctcagctgccggaggaatcttagaggaaaccggtcgccatctggtacttcttcttttttttctttctaaatgtctatttttattgttcaaaacattttttggttatataggatatgtttctttttttttaccatgttagttcatatcaaaaactttgtttaacgaaattggtctaatcgattgcttatgttcatataaagaatccaagttcgaaatatccaaaactgaaaccgaaaattgaattgtactatgcttttttgttaataagcatacggttttcgatattgaaaattgaaagttatctttcgctaagtaaaaaaaataaaaaaataaaaaagtgaatttggggtgcataaagtccgccggaacagtcgtcctttaaccaatagaagtagccacatttgaatcacgggaggttatttaatgtcgagtgactttgatagggtgcatgaaaaacttttgcctacgagacatgagtatttaataaccccaaaaaaaagactataataaatggggttgcattcttgcatgcatgcatggatgaagggagagagatttagcatgggaagacaagtggagaacttcgagaagacattaatggagataagtaggagcatgaggaaagagtcagtgaaggaatatatggcaaagtcattggtggtggtgtcattgggtaacaatgactacattaacaattatctgaaaccaaggctattcctctcaagctctatttacgaccctacttctttcgccgacctccttctctccaacttcaccactcatctccttgtaagtcttatttacgaatcactatcagtaatatcattaaccatatatgtgtgtgtgtgtgaagtcatcgagtgcctaaaatccgtatagataattacgaatttttattttataacaataatactcatgtcaaactaaaattcgagtgttgtacaaaattttgttaggaattgtatggaaaggggtttaggaaatttgtaatagccggtgtgggtccattgggttgcataccagaccaactagccgcccaagcggctctgccaggtgaatgtgtcgaggctgtaaacgagatggctgaacttttcaacaaccgtcttgtatcgctggtggatcgtctcaattccgataacaaaaccgctagtgaagccatctttgtttacggtaatacctatggagccgccgtggatattctcaccaacccatttaattacggttaagtatctaacttatcccttgttttacattttttttaatcaaatgtttcgttttagcttagttgagagcatttttaacttgaaatggtttgattttgttttcttttattgtttgtaggattcgaagtgacggatagagggtgttgtggagtagggagaaatagaggagaaataacgtgtctgccattagcggtaccatgcgctttcagagaccgacatgtgttctgggatgcatttcatccaacacaagcttttaatctcataattgctctcagagcctttaatggttccaaatccgattgttaccccattaatctttctcaactttctcgtctctaaaccctcaacaaatccttctctttttgtttatgtatttttgttactttaattttgtagacttgtagtagtactattgcatatttcttcgcattatctttttggttgtgatttggttccaatttgaatgtggacctctaatgattacattatcgttaactgcaaacatatacgtagaaaatgagtcgatcgagaaattgtagaatctttttctattattcttggtttcacaaattaatggtagagactttcatgcatagtgatgacataagatgttgcatattgatatggcggattgttcatagtttttttttgtttttttttatgacataaaatgttgcatgttggcatgttgcggactaattcatagattattattagtccatagatgtattatgtactgtatatacatcatttctcttttttgttacatgtttgaacttaaacaaaaataagtaactaactataggtttaaaaggcccaattaggaaattagacaggcccaaatataattattgaagcccaaaatgaggctagcaattcgaacaaaaaagataagcttaggaaattgtaccaatgtctcgcaatcggcaaatcatcatccccgacgacgtgatggaaacagaagcggtggttaataccgtcgccggcgtcgactgtttcgtctcactccctcgtcaattactacacgcgcttcaatccaccagctcctctcctctccctccgcttctccctgtcgagctacgctccggtgaccgccgttggtcagttgcttggtccggctctagctcctcctcttctgcgatcgaggtttctatccctctctatatttgatccagtttattcaaatccagtaatcgactactttggttttggaattctgattactcttacattcccctgtttttgattttgattcttctaataagatcgctcgagtgtttgcggaaagcatttcgttgccggatggtacagttgttaaagttcgtgttcttcctaatgtgcccaaggctactttagtaacagtcgaaccagagactgaagatgactgggaagttcttgagctcaatgctgaacttgccgaggcagctatacttagtcaggttagtgcctctagtttgtgacattggcctaatcagtttgcgaatgttctgctgatcgaaacatgtgtgttcaggtgaggatactacatgagaccatgaaattccctttgtggttgcatgaccgaactgtgataagattttctgtggtttcaacatttccatcaaaaggggtgggtaagaccatctttaatccgcacttgtgttgtattcccgttgtctataccatacttttcaagtttcttcttcttattcttcaacttatgttccctgggatacaacaaggggttaccattatgacttgtctcttatacttacaatcattataagttgattaatgacagagttttcttgactggtggctcgttttcagtacaacttgtgccaggaactgaagtggctgtggctccaaagagacgtgacagaaatctcaaagcaaaaaagagtcaggaaaaagaatgtaacaatgtgaaggctctactacgtgtacaagagactgatagatcagcctttcatgaagctgatgtcaaaggatttgagctaagggtagccctcacgtctattgcctatattcatccagaaactgccaagaaacactctctagaatctcttcagttgatttctgtatcccctagaatacctttgaaaggtagtgcaaagaaggatgaagccttaaatatgaaaaacagtgaagcttcaaaggtggccgagaatggtacttcaagcgccaagaaagagcctcgtcaagcaattcttcgtcttgtcttttcagatttagctgctaaaggacatctaatgatggtcgagtctcttcgtctctatctaggagcaggcctacactcatgtgagtaatttttgcttaaacattcagatgcttttgttttatgtacctccagtattttgatgtttgtgtaaaaatatctgttcagcaatatcattgaaatgtatggagagactgagctgaagttaatttgactggttatttgcagtatgcgacactaggatttttttattttatttttattgttgtgaccatcaggaagtaaacttgtaaggtattttggaagttatcgtgcaggttgaataaaaagcatcattttgcattttccattctcaatcgagcattgttaccacagaaaaataaatgtctgagcaagagttatcacttgtatgtaggggtttacttaaggggatgcaatgtgaatgaagacaaagaaattcctgctctttcactttctccttgtgtcttcaagatttctgaaaatgaaaaggtgctggataagggtacggataggcttggtaataacaattctgttagaaaaagcagtcatccaccgtctggcttgagcacctatgtggatgttgtcgactggtctgtgcacgataaggttgttacagctctttcatctgagggtttgcatgacgaaggaaatcatgataagaataagaaaggattggaataccttactcgcctgtggtcattggcacagcttgatgctatggcgtcagtcacaggagttgatgttagttcgttaattgtgggaagagaaacgtttttccatttcgaagtaagagggctcgaatcttataaatccatagacgggcagccttctgttaatgatcgttgggaaagtgggaagaaggataaacacactcctttagaaattttgtacgtcatgacggtctctgatgagtctttgcttggtgataaattcgctgggtatgatcttagcctggatagaagtgagaagagcgacaatgtggtgcatattgagccagtgcttgagaagatgaatcttggcgagcctatatatttaaagtcggctaaagagacacactgcaataaaggtgtttccccagatatatcctccttgacgtggatgggcccaatcgtgtcggatgttatcaagagtaggtttactctcttagcttcatcttgcttgagtcgtataattatgaggccgcacacacgaacatatatatctgataacatagattttgcttaacctttgttcttttatgtattagcttttgttatagcatgtgttctagttgcatatcacatgtctttgaagcaattgtttgacctcaactaaaattgcttgataatgttcatatacggttgatcttaacctgcgtcttttaatgcatctggagaatgtttatgaacggatctgttcctaaagccaacaatgctattatgcaggaatgaccgtgttgttgtctcctgcagctggaatgtggtttagcaagttcaagattccatcacctggacatattctcatatatgggcctcctgtgagttctcattttagttgttccatttagtatttctcgaatatgaatttagttctttttattttggctcctggatttacttgggtttaaattcccaattgattccttctctcgcaacgttagtatgctacccattcaaaggctacccctttggccaggcattagtatcagactgtttatcttgaatctttagatttgttcttccttacaaccgtgaaacattatttctctggcttgcagtcgtttcttaatttcccatttttcttactggttgagacgacctggttgtttactggttcagcttctggttgatagggttcaggaaagacaatattggcaagagctgctgcaaagtatttcgaagaacagaaagacttgttggcacatgtgtgagtcattttggtttggtttatgtttgtctgcactgatctactccaaccaactccatttatttttaagagactaattctggtacagatgtggtcttaagtattggtttccttgtgcaggattttagtatcctgttctacacttgccttggagaaggttcaacacatccatcatgtcctttctagtgtaatagctgaggggttggaacatgcaccatctgtcatcattttggatgatcttgatagcattatctcatcgtcttctgatactgaaggaacacaagcttcggttggggttacaatgcttacaaaattcctaacagatgttatagatgattatggggtatgaactcttgaaaaatataaggtccaacagttcactattttcaaatatgcacgtttatgatcacaattatctatgcatcacgagttactttccgaagtgtggtgaatttaattatctaaatgcaagacttcctccatgcgaagacaaatgtcatttctcttgatagtccggataactgctttcacctttcttattaacgcatacaacattaagtggttgttcttggaacttcttgaatccactcatctccatatgcatttagcctcatttctagatgatatatttatatatctgactcacgtttatttaaccagttatatttttgttcactcaacaggaatacaggaattcctcttgtggaattggcccacttgcattcgttgcttctgtccagtctctagagcaaattccacagacattgagctcatcaggtacaaacgtgttatataccactacttctacctgttttaacaatattagttctaccagaatcagttcatgtgattattcatttgacattttcaggaaggtttgacttccatgtgcaactggctgctcctgctacctcggaacgtggggccatactgaagcatgagatacagaaacgccttttagactgttcagaagacattttacttaacttagctgctaaatgtgaaggatatgatgcatatgacctggtatttaaatttttctatatgcttttaaatttgccgttgtgctaagaccagaaaagacatttgacagaaatgttgacagactttggaagctgatactatctgtgattttcatgttataaattttattgttcaagcttgctatttcgttttaacttgattatcattctgtccgcagatctacagtgtgctctctttgaattctctttttttttttttttttttccaggaaatattggttgatagagctgttcatgctgccattggccggcatctacctttagaatcaaatatatccaaatataatttggtcaaagaagactttactcgagctatgcatgattttgtgcctgttgccatgcgtgacatcacaaaatctgcctctgaaggtggtcgtttggggtgggaagatgtgggaggtgtgactgatattaaaaatgctatcaaagaggtatatgactatgcttactgccatatctgattttgttgccctcattaaaatctaaattagtgtggggtaggaaatcttgccaataaatgttatccttttataattgcaaccaggaagcatctgtttcctgcctctttgtctgttggcttttacttactgaagttaggtcgtgttcagtgggaaacaatatttctgtaagacctgagttgatataagttgaaatatcttggaatgaatctcacggaaataattccactgggctatataagagctactagttatgctaacaactacagtttgaaccagttcttatttagagatataattctagatatgcaactttattgctctttgccatgtccagatgattgagctgccatcaaaatttccaaaaatctttgcaaaatctcctctgcgtttgagatcgaatgttctcttgtatggcccacccggttgtgggaagactcacattgttggtgcagctgctgcagcgtgttccctacggtttatatcggtgaaggggcctgagctgttaaacaaatacattggtgcatctgaacaagcggtaagaatgacaacctttctttgttttccatcttcaagaacctttgagatggttatcaacctattcagttctttagtgacgcatgctattatctatactgttgaatttattttgatttttctgggtttcttgcctagtctttaccttgtattaaacaatagaatgataaagaaacctctgaaaatgtttctagagaaaagttttcagacagctttgttcctttttaattgttattcctgctagtctctttacataaaaatctgaaaatgttatcctaatggttccgcatatacaataatggaaaacacacttctctcaggtccgtgatatattttcgaaagcagcagctgcagctccatgcatactctttttcgatgaattcgattcaattgctcccaaaagaggacatgataatactggtgtaactgatcgagttgttaatcaagtaagttacttcaaagtctgagcaaattctatccaagtcaaagttcaaacatctcatgtcatatttttcttttgcgtagtttttgacagaactggatggagttgaagttctaacaggggtctttgtatttgctgcaaccaggtattcacacccgaataagtctatcttgcatatcatattttgtgttcgatgtatcatataatcaactgcaaacggtggattcttctgagttgatagttaataataaatcttaaatatgataatcttgaagcctgtgctcagtcctcaatttatgtttttcattacatacaaaagagggataatgactttataatggatacatgactcaattaacagtagaccagatttacttgatcctgccctcctaaggcctggccggcttgatcgtcttcttttgtgcgactttccttccccaccagaacgattagagattcttacagttctttctagaaaggttagtactctcagttacatcatttctgctaatcatttttgtcctcaagtctcatgtaaagtatgtatgctacatatctgaacgaccattaactagaatcttctatggctaagcgatttccattggattctgacattcaattgatggtctccctagacaatatgtagataagatttatctatatatattacaagtagttaagatgacaaaaaatctttctgcatttttacagcttctgatggctgatgatattgacctagagcctatagctttgatgactgaaggcttcagtggagctgatcttcaagctcttctctcagatgcgcaacttgcagctgtacacgagtatctgaacagagaagataaacccgagaccggaactacaccaataataactgatcctcttctgaagtcgattgcttctaaaactaaaccatcggtttccgaaaccgagaaacaaaagctctatgacatatatagccagtttctggattcaagaaaatcggtatctctctcatctccactctaattcctcttcccttttatacaaacccagttgttgattactaacaacatcaaaatcttattttgcttgtagtcaagagaagcaaagggcaaaagagcaaccttagcataatcaaaggtattacaaagacacaaaaaggaatggttacattgtagaaatcacatcatgttgtaaaatttgctttatgatagatatgcccagttgttagcattagagtaaaagtggttgaagtttggaataaagatagttagatactagagagacacatggtaagttctacaagattcaaacgactatagacatctctacagtaataagattaatacatttcttttggcaattttagaattttaaaagctgtaatatttttggtcaaaacaagataaaaatggtattcaagttccgtaattttgtgtatgaaatgaaataaaaacgcatagaaaagagtcaactattatcgtgcaacaaaatttatcagtccaaagcaaaaaaggaaaagaaacgacaacgtattcgtaactcacaggtaaaggttgttgcctcctatctttgacaatgccagtgaataatgttgttaattgttatggccataacttgaaatgagtcaacaaaattatccacagaggacgaatagagtcagttaagaaactgtcatgagtacagttaataatatctcatcacattcaacagagacagccaaaaaaaaaaaaacgattggtttataaattgggcgggggagagaggttgctgtgacgtctctctctacccatctccttaaccgaaacggcatgcatttcttccttctttaacttcctttctccattccttcacgacaacaatgaaataaactcatcacaaattatgtcattttgatgtttgaccaaacaaacttagttctataaacaaaataatttattatcttttttgtgtgacaaaaacccaaacccaaaaacggttaagaacaaagggataaaagagtccttttcctctttcctctccatattcttctcctgattttcctcttttcattttcttctcttttctggtaatatgaacaagttctgagctgtgaccattagaccaacaacagtctttatatcttcttttagttctttctctctctttttatttccttcttctgttttaagttctatttcttcagaaaaaaatccggcattctcattcgattttacctccacttgttgcctcggcttgctcttcaggtatgccttttgacctttttatcattctctctgactcctgtagggttatcaaatcgtaaattgaatgctacatagaaacttttattaacagttctctcatcatatgaactagtaaccaccataaagatgatgattatgacgatgaagatagatttaggacatgaaaagccctcttcattgtcattcctacaattagtaagagcaccaaactttgatatagatatttgagtatacaacaagtcaaagcaaatttaggagaagccaattttttattatttttccccacataagaatctagtgctcttgtaaaagtggtgaggtttgagtacacgactacctcatcttttgtatctgtagctatttatgttttgagttgcttgtttttgaaaaattatgacgaaggaaatctttaacaaatacctaattttggattacaagaagacttctgagtatttctaaccttccatcaatctaatctctgaactcacatgaagttgacattcctcggttctcttgataggacctttcatgtttgaatattttttcatcttctcatcaactgcataaacggtagttttgttgcaggtcagagaccaaaataggtgtaaatcaaaggttgttttgtcagagaaacacttacatatgaatagcaaagggagtcaaaacgttgcaacaacctgcaagcctgtcactacatttgtccaaactgacaccaacactttcagagaaattgtgcagcgcttgacaggtccaacagagaacaacgctgcagcagcaacaccagaagcaacagtgataaaaaccgccatacaaaagaggccaacttcaaagctccatgagagaaggcaatgtatgaggccaaagcttgaaattgtcaaacctcctctgagctttaagcccactggtacgacaccatcatctaaatctggtaataccaaccttttaacaagtccagtgggcaccccttcttcattgttctctaacttgtccttgatagaaggggaaccagatagttgtacaacaaacatcgaagaagaggagaaagccattaaagaaagacgcttttacttgcatccatcgccaaggtctaaaccggggtatacagaaccagaattgcttactttgtttcctttaacatctcccaattcgagtggcaaaccataaacccgacagattaatcataagtttgttctctgcctactatcccaaagattatgtacatgtagagtttcacaacaatatcattggaagaggaagattgttctcttacattgttcactcaagatttgtctgtgtcatatgtgcaattgctttgtgtagaccatcatgatctagcttcgcagcgttttaacaattttcatcgattaaaacaccacaggctctttcatctgaagatataaagcatttactaagtcaaaaatactgtctctacgagggtgagaacaatctccagacacaaagacattcctttgcccatccacttctagccagctacatcccgctggctttttcatttcctttttcttcattaggtttctcaactccatcacgccttcccatttagcatctgcagcatacatattcgatattagaacgtggtttccggtgtcgtcagattcagcttgcaagagatgatttgcaactgagtgccccagatccatcctattataggttgtacacgcccttaacagtgttccccatatatttgcattaggttcaactggcatctgtgtgacaaaagaatatgcatcatcaagtcgaccccctcgagcaattagatctacagcacaagcatattgttccattgtaggtttcataccgtgaactgtccttattgagtcatatatttgcaatccatcctgtattaaccctgcatgacagcatgcagtcaacatagtagttatgaaaacatgatcgggctttatgtttgattcagtcatatgagagtagatcataagtgcttccttgcccctaccatgtacagcatacccagctaccatagcagtgaacataaccagatctctacgagcatctgactggaagacagaatatgcatgcttcaagctgccacatttagcatatacatctagtagagtccccttcaggcggatatcaccaagtccgcctctaataatatatccatgacattgtcttactagatgcagagaggctagctgcgcacaaacaggaaggagattcatgatagtcacagtgttaggcctcattcctcgagcttgaatctcacggaaaacaccaatggcttcattagggcaacaactttcagcatagatacgaaccatcaaactccaagtggtgagatcagtagtagacatctcagtgaagagcatctgagcatcatcatgacttccactattaacatatcctgataacaatgagttataggaaaccaaagttctcctctctgataaacccagaaaaatcttatgagcgtattcaacattaccacatttggcatatgcatcaagcaatgcattgccaagcttgggttcctcttcatcgtgtaaaagaccagccttaactgagtacccatgaacttcttttactttaccaattccctgtacatttatgcaaaactttagtaggcttaaaatagtaacagagtcaagagtgattgcttcattaagtaagtggtgcaagagattcaaaaattgaaactgctttggactgtctgcaaaggcatcaagtatagcattccaagatattatatccttcgtggacatcagtgaaaaggcccaatatgctgcacttgtgtcaccaaatcttgcatagaaactaatgagagcattcccaactgatgtatcctccaaaaggtaagaatggcgcaatatataactgtggatctctttcccagaggccaagtcagttaattgcgcacagacaggaaggatactgataatagttaccgaatcaggagaaacatcccccttatgcaccaagttgtgaaataactgaaatgctttaaaccactcacaatttgatgcataaccagctatgacaacattccatgaaactagatctttagaacccatcctggtaaacaatgaggctgcttcttctatccttccgactctcaaatagaaactaacaagtgaattacatacaaaaacatgggtttgcagccaagacctctgcacaacataactgtgaatctgtctaccacttcgacatgcaatgttcttgtccatagaagcgcaaacaggcaaaacatttgcaattgttgcataatttggctctgtaggttccttcagcattagacaaaacgatctaaatgcatcagccatcatattattctcagaaaacccagcaataatcgcattccaagagacaacatctttatcagctataccatcaaatgcagtataagcatcgggaaaaataaaaccaaatttggcatacatggaaaccaaagcattccccacaagtgtatctttctccaaaccggctttaataatataagaatgcatactcttcccattgtatgaatccccaaggcgaacacacaaaggaagaacaatcgcaaaggtaacagagctcggcttaggttcatctgcaaagtgcattgctttgaaaaacctcatcgtttcacgaccgcaagaaacagaaagtccagtcagaacaatattccaaacaacaggatcaagactgtccatttgcctaaacatcttctggcaatcatccattctcctgcatttcgcatacatgttaagaactgacttcgaaacctcagagcaggctatatgaccaagcttgaacacgcaaccgtgcagagccctccctgatgtgagatcagacactgaagcacaagctttgacaacatccagaaaaaccctgtgatcagttccaaaaccagacaaaagtctgaaattctgaacaaattgccgtaaagggcccatctttcccctgaatatcccaacaacggccctttattagcaaaaaatctacgttacattgggtcagacattttcacaaacacctgatatgcaagaacagtttctctagatataagcgttgtcgagatgtaacagacatagagaaactgaaaaagcaatatctttatcaagctcctcaatttatcaagcaatgaaggtgtctctcagtctccatctcctccacatacaagcgacagtttttgtcttgagtgaattgaaaattatgaatatatatggactattccgatttaattaaaactgaagggctaaaaaagaatatattaatttacttaggtccttacatgaaaatttactatttctattcttattcgaataattagaagaaaaaaaacaaattccataaatatatatatctttcgtcgactctgcttttacacatctctcacacggtaaagttacaataatctcagcttgaatcacactgacgaaggcatcttcctgcgattatggcgtcgccggcaggtgaaacagcagcggttgttgagggcggagatgggcagcagcaacgacaagctggtgggtttgggcagacaattaccggaatcataagaatcgccgtcttctgttactttgcttctaagttcttttctcccaaacaaaaacctgcggatccttccaagcctactcatctcatgtccaatctatttcagaggggcgagcccatagtaatcttctggttaattgtgttgattacttgcttattcgttaatatatgcaatttcattcgtttctctcttcttccaaaacaaaaaaaaaaacgtttctttttggttcgaaacttcgaatcagagtttttcaacttctgggtggtttagggtttttccgttttgtgtttttgtttgtcaggatatgtggttttatctttcggagcatgagaaattcaatgacttcggcaatgaaggtgcgcttatttggcatgagacaaacataccttatgctgtgtggaaaccagagagcactaggaccttgtcaatgacgtactatccttccgaggtaatagaagtttggttttttttcatatgcttccttcgagattaatatatttgctgcattgaattaaagatgtttgttgttccaggcactgaagaataatggaagtctgtatgctcatgtcttctttgctctatctggttatcctatagatcttagtgatcctgaataccagcctctcaactgctttggcaggactcaccgtaagacttccctttccttagacaaacaacctttttgatagttgttggtagtgaaattcttgtatccgctaaaattgtatgactcttttcactatttcagctgttgcaacttacttaccaaagcgaaaagcagataagaagaagagtctgttgggaaatcccaaagactctgatgaatcccatgtggaagttgaggtatgtctctacagaaatttttgtatgttgttatgttaatgtttggcctgtgatggagccagtgtgatggcaatcattcttatgaactaacacaaagcaaacttcgcaggaggttgatggtaaggactcggatctcaaggatgagggccctgtggaatgggtatcctactggaaaccaaatgtcacaattaacctagtcgatgactttactcggtaagttagttagtactgataattggtagatgaataatggatttatggcatgcttggttttcttgggttcactcttaacaatgaacttcataagacgtttgctgattgtttcgatttccatacagctatccacagcatggtgtaccaccaaacatttatccttgtatccttttattttatgatgttcctattattatttgagtttttgacaactctctatgcacatctttttctaacaatcgaaggcagtagcatgtgtatcatctggaatgccatttttgaattacttggattaaacttgtttgaaaatttcaaattctcaaggaccaaaactttagttctgggttcgtggaagtagtgccacatctccttactttatatatgtgcacaaatgctcaaagaacctatgcttcctttttctttttggcttttctgttaatctttggaatgggaatttatgaggatttcactttgccatgctaaaggtgtgatggtccatatctgctctttcctttacttaaatattggcagacttactggtggaacctagtacaataaactactaccctacagttttcttcaatgagttttggttgctaagggacaagttgattttaatcaatgagacggtctcagagctgccacttaatctggaagtaagccccataagcatgacaaagtggcagctgtttcagcagattgatcagtctttccagattcaccgtagctatggaagcatgcttgatggtgaatctgacgaactaaaggtaattctggtccttccagttggcttcatttttcaataatatactaggatgtgcatctaacgactcttaactatgaattctaaaagtaggtagagagatgtgattattattttttcctattaattggagctgaggtgatcatgtgttttgttaataatttacttgcagagggtgtttttggaaggaaatccctatctgttgggcgtcactatgtttgtttcgatgcttcattctgtattcgacttccttgcattcaaaaatggtaaagacctgaaagaacatctactttcgtaaaatgcctcttgaaactagctctttagttacctgttacttttcctgcagatatccagttttggaacaagaacaaatctatggaaggactgtctgcgaagtctgtcgtactaaactttatctgtcagtttatcatcttcctctacctgcttgacaacgacacttcatggatgatactggctagctctggagttggtgtctgcatcgagttctggaaaattgggaaagccatgcgcattgaggtaccatctgatatgacacacaatctgataactgagtcaactattttcgtgcatgtgtaacatcattcaaaaatcagtgacacgttcatcagatgttttttgcttttgtgtgttaatccatggtaaacatttaaaattcccaggttgatcgaagtgggatgattccaagattgaggttccacgaccgtgaatcctatgcaagcaacaagaccaaggagtatgacgacattgccatcaaattcttatcctatgtgctcctccttcttgttgtgggtttctccatatattcacttgcctatgaacgccacaagagctggtactcatggatcctatcttcactaacgagctgcgtctacatgtttggtaaaaatccttcaaaattaccttagaccagttcaaaactctcgtgtggttgattcaattgagtcgaaatcaatgtgttttgtgtttttacaggtttcataatgatgtgtcctcaattgttcatcaactataagctgaagtcagtagcacatttaccatggaggcaaatgacatataagttcctcaacacaatcatcgacgatctctttgcttttgtcatcaaaatgccaatgttgcatcgcctttctgtcttccgagatggtgaatacaaatccatcttccctgagtttattgacacatgtctctaggatagttttggaattcacaaaaatcgatgatgatctaaatttggtgttgttgttgcagatgtgatattcttaatatacttgtaccagagatgggtttatcctgtggacaaaacacgtgtcaacgagtttggttttggaggtgaggatgagtctgtggatacaaagaagatctctgaccaagaagatgacaagaaaacaaactaattagctttgtgcttttgtttttccctaacaattttgagtttttttgggtctgctttagtaagttttgttaatgctacttatatccaaaagtaatttcgttttagggtaatataaaaaaaaaagtgttaaagaatatcacttagttataattttgttttgtttatatgtaactttagttctcaatgtttttctagacactcttcttcatctggtaccagatatagagacagatgatttgctagataaagattttgtagatcggcaaatgtcataattgagtaatttgttgttttggatagaataacaattaattaaggtagataaatgaccttttgaactcaaatctcttccatcaaatcaagtgatcaatagtttttcacacaagtgtcaaaagcataaatgtttgaaacaataattatgcattcatccatgtgtcattcatgtgtgcaacaacataggttttcattattacattgtccatcggcagtccccattgagctacagaattcaatgcatttcaacatcccttgcagacatggtcttgtgtcgaaacactgagtcaatttttctccaaacactagacaaaaaggtaccaaaaattcaaaactgaaagactaagaaaacagataagaattaccaaaagaagaaacataataaacaaaatcttacaagggatgggtttgaaacttggacggcaatgaacagaagagatccccaacataatggtgaaagcaaatactactaatattttcttagtgaaatccatagttatatgatgcgaaatgcgaatgttcatcatcaaagtacacaagagaccatttatatatagatgaattattttaaattatgttattattttaatatttcattagttttagtatagaatcatagtatatatatttgtttagaggatactttgtatataaaactattttaattactgaacaatattatgagtttcttatgtttaaactggactttaaaaatatctaaaacataatttacatatatgagatccaataacaccaccatatttagatgcatgatttaaaatcaagtcttgaataacaataaattatccatatatatatatatatatatatatatatatgtcttataaaatctatgattgaataacattaatatattagattttttaatatactttgtgaattaatgaggatatatcctacaaattcatttttatcattttccaattttatcataaattctcctatctattttagatatcataaaagcttttatattaaactataaatttgtaattttctagttttgtaagaaataagatatatgggccgtagtaaggtgggtcagttgatacggcgtcgtgttagctgctgacttatatgggccgtagtctcaaatcttttagcaatgcaattattgaaaatttgagtccaatacacataattaatgctaataaacgtcgtgtatatggcagattttggcgcattcgtagcacgtgcgaaaggtggggattgtgaatgaatgggatcaagcaactccacgcgcactgtctgagaacaggcgtagacgaaaccaaagatctcttacaacgattgcttctgataccaaaccttgtttatgcccgaaaactcttcgatcatcatcaaaattcttgtactttcctctacaacaagctcattcaagcttactatgttcatcaccagccccatgaatctatcgtcctctataatctcctctccttcgatggtctccgtccaagtcaccacactttcaatttcattttcgcagcttctgcttcgttttcttccgctcgacctttacggttgcttcattctcagttttttagatctgggtttgagtccgattcgttctgctgcactaccctaatcactgcctatgcgaagctaggagctttgtgttgtgcgcgcagagtgttcgacgaaatgtctaagagagatgtacccgtgtggaatgcaatgatcacgggctaccaacgacgaggtgatatgaaggcggcgatggagttgtttgattcaatgcctcgtaagaacgtaacctcgtggaccaccgtcatttctgggttttctcagaacgggaattactctgaagctttaaagatgtttttgtgtatggagaaagacaagtccgtgaaaccaaaccatattactgtagttagtgtactccccgcttgtgcgaatctgggggaattggagattggccgaagattagaaggctatgctagagagaacgggttctttgataacatttacgtgtgtaatgccacaatagagatgtactcaaaatgtggaatgattgatgtagcgaaacgcttattcgaggaacttggaaaccagagaaatttgtgctcatggaactccatgattggtagtctagctactcacgggaaacatgacgaagctcttacgctttttgcccaaatgttggtgagctgcatttttgtttgttccttcaattcaagcatgttgattccttggattgtaagagtttttaaccccctatggttttctgttgattcttcagcgagaaggtgagaaacccgatgcagtgacatttgttggattgttgctagcttgtgttcatggtgggatggtggtgaagggccaagaattgttcaagtccatggaggaagttcacaagatttccccaaagctagagcattatggatgcatgatcgatctcttggggcgtgttggaaagctgcaagaagcctatgatctcatcaaaacaatgccaatgaaaccagatgctgtcgtatggggaacccttctgggtgcttgtagtttccacggaaatgttgagatagcagagatagcaagtgaggcactgttcaagcttgaacctacaaatccaggtaactgtgtgatcatgtcaaatatctacgccgccaatgagaagtgggatggagttttgaggatgcggaagttgatgaagaaggaaacgatgacaaaggctgctggatatagctattttgtggaagttggagttgatgttcataaatttactgtggaagataaatcacacccaagatcttatgagatctatcaggttcttgaggagattttcaggagaatgaaactggaaaagagtcgctttgattctttgcttcagcctgaacaactatgcatatgaaagtagatgttttgttcactttgccaataacaatgactgaatcttttgaaactgtatgtgattttggtgtctttacattcctatgttcaatcaaatgaacgttggtacacattgagtaagaagactagttggatatcgaggtagatcgaacacgaagagatgagacggaatagttgaagaaagctgacatggattgagacgatattatcactggttttcactattccttttgaaattccatgtcaggtgcatatcatatgtgtcctaaatgtgattaatagagggtgtgcttgctataaaatatctgtgtatttcttatgttattctttgtaatctgcttctgtttttcttcaactacgaattttctgtcacagtatatatcattatacaagatccaaaatgagttacaacttcaaaataaggaattgcacgttgcagttgataattcaaagagattgttgaatgtgagaacaagatatacaatgttgctttgttgtaagtctcataacagaggctttattgtgttcacatacaaacaggagtatttttgcttctcgagtctggaaactaatcatgtcatcttcatatcttattcggacctcatacaaaatccccacaaactaagtaataaaaaaaactcactcaaggaacaagcttgaatattcactaaatcctttacacatcttctttcttacacctaaaaacaaagtgcactatgacagcaaaggtgctttcgagttacctatgagccgttggtgtacgcggcatggtgtacggcatttgaccaatgttcattgctgcaccaggaaccactgagccagggactggagccgcatgaactccataagccatgtgaggtggagctgggaggttcactggtgttccaactgctggctgacctatggcgggtgttccatacataggaggtccaggtggtgcttgagagacggcttgcttggctgatttgtttcctcctccagcaacagcaggagaactgttgttgttgttgttgttgttgttgttattgctgttgttctgaccagtgattggtccttgtggcgttgagacatctgcgttgccaacactagtgatgtcgtgaatgcttgatcgccttctgtctttgttcattgaatttagacgaatgaaatacttttgagcatggctcgcaacttgggtcggtgttcttgttactacaaagttgcgagaaatgctacgccaatcacctttcccgtacttatccaaaccaagaagaaataacctgtaacatagaaaagacagacaacagctcattagaatcgctgcataaccaaaagggcagaaacttccaggccatagtctcaaagatgaaaacacacaaaccactgctaaacggaaacagtctaaaaccaattgcaggtaacacagtaaggtcttgtcttgcatctacctcaacagctaatctgcagatagaatgccacacaagtatacagaaccctacttctaaattgcttctccactggattttaatctcctaactaagcaggaaagacatttctaaacacccgtacaacgtatttgaaaatgaacctcgtgatttcttgtccaggaggttcttctatcaccgccaaaatccaatttctcgaaaaagcacatgtaaaccaccaaattatcaagatgacacgggagtagatcaagataatggcgaaaacacaagtttataaaaatggtgtaagaatctcttttaaaggtttcaatcagacagataagcattttttttaactctcccagcaaaacattcaatcaacaaagatagattttactgttacatcagtttcccatatctttggcaagtgagaaaacagtccagtaactaattatatgccactaatataaccattatatacttaactctagtttttacgccttatctaccctaataaggtcccaaaaccacttgcatcttcaagagagaaaaatgaagactaaacttcaaagtaagatttttttgtctctttctaaaaggaaggtggggttcctccaataacagaggttggatggactgtttcaccatgtaaaacagcatctagcttcaacaagtggtggaaaaagatggtcaaaatggtcccgggggttagatagcatctctccatcatctctaacatggtggatgtaatgatatagcaactaggacagggaggtaaagcgaatttatgagaacagctttctctgtcccatgccaagttataattccaataacatctgagacttttaaaacaatcacgaaactaaaaccacttcaagaaatctctacttttctttcaagcatcctctagagtaacctcgggtcagtgccccctaaaaaaaactcaattcatccttttttaatttaaagtatcagataggagaccaaggacctaaaagttccagtgaaggtattgcttctaactacagtatgactttgaaaactcttgatgtcttaaaggttcacagaattagacacccaagagtaccaaaattgtcacttaagagaaataatattaatgttctagaacacaatgaagacatggagcacagaacaaacataatttggaaagaatcataaaagaataagaagaatcagaaactgattagcagcaaaaataaacaaagttcacctgtgctcatcttctgtccacgcgataccctttcgtcgttcttgatcggactttgatttacctgcttggttagactctcccgcatgactgttacctcctttcttactacttgctccttcatcaccagcatggccattcgatccttcaggagacccataggcaggaagaggcacacatcctgattcaatcctagtaacatcttcaactaaaagctcgtaatgttctttaatctgttcaacacttttgcctggaacgtctgcagcaatcttctcccaccgttcctctgattcatcggtattattggctagagctctctcaaaggcaatatcatcctccctactccacacagaaccatcactaacttcctccaccgtcataattccaatcaaacccgcctcaaattctatagaatctaccctaatccctctaaaagtctgggatatcaaccagatttctacaaatttcgtgtcttttagatctccacaaacttaacagaatcccaaagaactcagatcttccaagtatcagtgaacctagctaaaaactaccccttgatattccaatcaaaacccaaccatacaactaaactagggatataaagagaatcttggggactcgaatagagattctcacctccaacaaaatgaaattccctaaaaataagcggaaaaaaccctactctctctactgatgaactaagacgcaaagattaattcaacttatcgttatgagatagaaaggaaagcaagaagaaatttatctgataggcaaagcaaaacggagattgaaacgagggaatcagagaattggcagaagaagaagaaggaaaaatgtgaactttatgagaaatggaaaattgggggtttattgggttttcaagggattgcagcaacttgaaggagagagagagaaagaggaataggaaaaacccagaagactgagagagagagagagagagatagggaggggtcaaaacgccattgttaaaggaaggggaagttcaaaacaaagaaacagtgaataaaaaccataagcaacagttttcacagctcaagtccgctgttgttatttttggtattgttgactcttttattatttgttacacttccaattcatattggaatttccttgttgaccaaattatgccatatgtattttattactgctactcctcatcgttggtaatttcatatcagttttttcttttttcactttcataatgctttcgcatgtgactagatttttcttttggtgacatttggggaggcaatcattgatgaataataattatttgtacggtgattataaaaggcaatgaaatactatatcaaactatttgtaaacattgttcaaacttaagctcatatcgaaaatcgaaaacaacaaagatgctaattgcctatatgacgactttccgagttatgcaaatatgtgattatgtaatttcatcatacaacaacttgttgattcagtagttctatcgattaagtaaagaaattggaaaaggggggaaaaaggtgggagaggtggacaaagaagttagggaagatgttgacgtcttatccataaatatcctccaaaaataatatccaatcagaccggtccccatcaccctcacaggtcttccttgccttcatttatctcttttcctttttctctctttctccatttcaatgcgaatatatatatcacttccatttcattttattctttaagttattccatttagaaatttctagtttatagttttaagatgatttctactttgtttgattttacgaaatcaagttgggactaatcacattttggttatacattatccaaaaaaactaattttggactatcatatcaagttgtatacagaacaatgatataccaatttatatcctagagatatttttcagaaaatgccaaaaagaaacattgatttataatttatttgctatgtgaactacttataaacccaaaaaggagcattctttatttcaaacatgaaaagggtttctttggttgttcccaaaatgtgctttcatactcgaataaacataacaagcaaacaataaagaaagtagagtaatgcaaaagagcaaatcgcgctctttctgatacaactttaagagagttttaacattaaccattcaaacaaattacattaccttcttctccttctgaagtagctttgcatcccaaaaccgttactagttgttcattcagattttatttccatggagaataatagcaaactccctgcaaaaacatcaattttgtaagacagggatagagcagaaagatagttacggaaactaactgttcattacggctcaagttcttgaaatgcccaaagaaattagatacagagcagtctaccttgtcacaaatacattctaaaaggctgcgtaaactctagacctcagcttttaagtttgcaacagaagattaaaagagcaaggactggagatgcaaacctctggttaacaaggtacttaagcagcagcctgtagcaactccctttcagcgcgttccctgatccttctctcgagctctggcctaaagtgtcttatcagaccttgcacaggccatgcagctgcatcacccaatgcacagattgtgtgtccttcgatctgtttggttacctcctgcagcatatcaatctcttccagctttgcattgccaactttcattctctccatgatcatccaaagccaacctgttccctctctgcaaggagtgcactgcccacagctttcatgcttgtagaagtaagagagccttgcaattgcatccacaacatcggttgatttatccatcacaatgactgctgcagttcctaaccctgattggacagccttgagcgcatcgaaatccatcagcacatcctcgcaaatgttcttagggatcagaggaacagatgaaccaccagggatgatagcaagtagattgtcccatccacccctaacacctccacaatgcctctcaatcagttccttgagaggtatactcatctcctcttccaccgtgcatggcttgtttacatggcctgatatacaaaagagctttgtcccagcgttattcttcctaccgaaactagaaaaccactcaggtccacgccttaaaatggtaggcgaaacagccactgtttccacattggtaacagttgtgggacaaccatataaaccagcattagcagggaacggaggcttcaacctaggttttccttgcttcccttcaaggctttcaagaagcgcagtctcttcaccacaaatgtacgcaccagcaccaaagtggatataaacttcaaaatcataaccagaaccacatgcattcttccccaagagaccagctgcatacgcttctcttctagccttctctagattcaaacgctcattcacatattcacccctgatgtaaatatacgcagcactagctctcattccaacaccagcaatcaaacacccttccaacaatttgtgagggtcatgacgcatgatctccctatctttacaagttccaggctcactctcatcagcattgacaaccaaataggagggacggccatcagaaactttaggcataaaggaccacttaagaccagaagggaaaccagcaccaccacgtccacgaagtccagatttcttcatttcattgacaatccaatcagtacccttgagcaccaaatctttggtcctatgccaatcacctctcttcatcgcgcctttgagaaatgggtcatgcagaccatagagattagtaaaaatccgatcttcatccttgagaccaccgaaatgagtcttttccggaggcggaggaggtggaggaggctgtggagtggtggaagtggatgcagcttgagtgctgaatgatctcaaagctggagtcagtctgttactttccttccaaatggacactgccctttgcaagccaagaatccccctcacgggtgcctatcatcaaatccatataacaaagacggtaaatggcaaattaactcaaagtaacacatgatctactttaaaagcatacaaaaaattgaagcacgaaatcagtaaaattgatgatacaggagttaagtgtcgcgtataaaatcgctgtttcaacattaggaaaccaaacaaaaccaacaaaagcaggtgaataaacccaatcgctctaaatcgataagctcgaccagatcaatcataacccgctagatctatgtataagaagatgccgcattttgaaattgttcagct

SEQ ID NO: 1413 - DNA, 103534 bp, Arabidopsis thaliana
ggccgcatcattcagactatgagggctacggccatcttctagagtcctcaagctcccaaagcatcctcaagctctccccatttaggctcgctctgaacctccaaaacatccggtgacaccacgtgaccgtgaccacctgagctgctggaatcatcctcttgcaatgtcgggtaagtcgagtctgatgtatcaaaaggtgatgatgactgttcagccattgtcgtggtcctcggcttctcatccgcggggaaatacttctccatggttcctttcttgttgtatattcgacataaaacccaatcatcaagctgtacagcaaaacccaccacaacaaagttaataatctaaatcatcattcacgaaaagatgatacataagttaataagaaacagaacttactcgtaggttgttctttttgttaacagaagctgatctatcaacattagcgagacgatactcatgcattatccaattggtcttaatcccttttggagctttccctgcgtagaagacgagtgctttcttgatacccaacgtcttcggtttaccaatcggtttatctgctccggtagctttccaataaccggttcctgctgcccggttaggacgcgaaccgtttgggtatttccgatctctaggtgagaagaagtaccactctttctctccgtacagagacatctctgaaagaagaacaaacatctcaataaacaacgattctcgaagacacatgatttcgcgaaaaataattagaagaagcccataggtgtacctggaagctcccaaggattgaacttgtagagatcaatctcggcgataaccggagccgagatctgctcggaagcacatttccggcacaagtagaatttcacaagctcctcgtccgttggatggaatcggaacccagctggtaaatttagctccgacttcattctcttcttcttgtctgttgctcttggaaaaatctcttcttcgttggttgaaaattcaatttcagctggatctggattttttttgggttttcttcgtctgctcaagattgtaatcgaggatatgtgagtgaggcgacgaaggttttataaggacgaaaatcgccgaaatgttttaattaatttaaattgaaaaaacacaaaaaacagaaaagagatgacacgaggggattttcaagcacgtgcggcaaaacagaccgttttcttttctacgctgaccgcagccagctggatatatacgtggcgtaatattattggatagtcgacttagatgttgtcattgcttgcgtcacttaaaccttttgtgaattgttgaccgactttagaccatctccattgggaaagagagtgtagaaagtttcttacttgagaaactttgagatactttacaacccatcatgacaattctcatcttactattggttcaattttttaacaaaaatacttttttaattaaataattaaattataatataatattaatattttttttgtttgagaaattttgtggatttctcgtagatggaaatgcctttatatgtcaaaccgtaatctcctgcttctcagtgtagcttatcgcttttgttcctttacttaccactaagatttaccactaagatttaaaaagaaaaatctcagcagccactacttttttatgatattgaaattgacacattattgtaaccttgctgaagataagtcagcatttcttggggcggaagttgtagttttgactggtgattggacagtttgatgaaactacggtgagcatctccgcagctgattaatttccttcttcaggcgaagctttgcgtcatgatggatgacgtcatttaaagttgcaatcgccaatcatagtcactaattataaatactctcgactaataatactacattcacataaataaaaacattggagttcgcaaagaaagcgtttgcgctttagtttgagtttccccgttacataaaaatatgtgttaaggacaactatttaaccactagcttaatccttaattaagtacccattgagccgctttcattacagacttaatttataattcataagtttgattcactagcaaataatgcccatgaatcctcttctattttaaaatctttaaatgtaaagttgaggtaggtgtgtatgcaagcatgacgtgggcttgttccccgttttatgatcatcatcacttacgttttctatcatattataaactaattatgatcgattcaacgtaatgttttataagatcatggtcttttccttttactattaaaagtcccttagtagccaaattaattataatacgaaatatttgtggtcaaacatgactttttgttgttgtcaataaggattctttatcgatataagaatgcaagttatataagtcgtatcatttcatacacatcttttaggcttttagctaaataattttcgtgcactgacgacttcatttttttctgtcgttttagatgataacagtcaagtctagaataaaagatatgaccactaatattaaaccaaaaaaagaaaacaagaaaatatataaaagacatcgtaacgcatgatttgttcctattataaaattcagatcaattggatctggacttgatctgaatttttatgataaagagagaaatcgactttatagtttttttgcagttgtttgttaatttagtcgcggtgtgaattgaaataggaagcttcgtggagcttgatgttatagctgccgaacttgacccaaattatgcaaatataatgttttggtgatggattattacctttatgttttgtcgtttctagaaatttacattggaatatacttgagaatttggataaggaggagacaacttgggacctcattgtcggaacttagaacctatcgttaacaacaattagtatcacatatactacatactattctctattcatatgactacttgtcttattcttatgtgcgtgcgtatgacaaaagtcttactatataacattcgtttgaaaccgtgcatatattgtagttaattctagcattttaattggaatgtttgagtagtgaattataagtttatgatagatttctccaaccttccgagtttctaaatcgaatttactcaaagctcatacctcttataatcgtgtgtaataaacaacttgcaaagtttcttcaaaaaccaaactacttgctaattgcaaaaaaaaaaaatcaaataaatacatccatttgtcacaccattttgtccctctctctcaatcaattcgtcaccgcaacttaaaaacatcggcccaatttgtctttctcgacacaacaacttaggaaataatgggtcacgtttgggccttaattttgggtcacttacggaaaacggtttcggttagctggagatcaacatccaatccgaattcattgttaaataacttttatccttacggaaaacggatcggttagctggagatcaacatcctcctagagactgaatgatctgacaatttcctcagcgtgtccatgttcatggagctcaacaagtattttctttaacctgcgggcgagaccagtggtttccgtatcgaccagtcccgaggcaaacctttttctcgagtattcttccaagtgtcagagtacaatccacaaggggttgcagcagatgactgaaaaatcaaataaaacatgcatgtgagtatgcatcaaagcaaagttgcaacacaaagtggtaatgtcctaatctgagatgtggatatcatggggaaccaaatgaagataggttaatgatactttggacgtgcgtagacccgtttttttttgttttgttttaatgtagacacacatcttagtttctcactctcacgttggcaatcgtatcaaaacagtagcttaatttttcatgcagactgattgttataactgaaatgggacatactatgcgacatcacaagctcaatttcacagccctggactatgagtaaccttgatgtgtgcgagtcaaagcaaattttctgatgttactgttcaaagagattaaagttacctgtgggttcttgtgacacttggtccagtccatactccagacaaagaagcaacgatcctttcagtttttgtcacagcatcatggatatttgattctgatgcaatgcttctgacatgaggtaaaacttttccaaacaaaaggtcactcagagccaacttctccaagaccggaagctccatgacgtctttccacatacaaatatttctcataagacggactgatgtcccaaacctatatgctgcaacttgtggagcattaggtacatcctttgatacctgaggatcccatgttggaacctggagaacagagaaaaagatcagaggatatcactagtccagtaatctcataacagactaaaagggatttattaggaaattagcaagagaaattcaaagtcatacactaatagctataatggcttcaacaaggcgagcatgaatagcaagagaaagttccgctagggcctcactcgaaggaaaaacatatcttgccaccaagcttgtagcagcaacaacatttctcgtctccctggtgctaagtatatcccagcaacgaactatccgatggtgcaaaatgggaaccgcaacatatttcactagctcagatacaaagttgggattagtacaaactggtgtagaaccacacacaatcctagaatgaaacagcagtccatgcctggagatccacaaataaatcgcaagtcagaccacttgcaaaaaagcaaagaaaacacaaattaatggcaagtgagatcacttgcaaaaatggaaacaaaacaatgggtttcattagatgatatgcttaagagatggtgctgaaaaggtgaagtgtgtgtttgacaatgaaagtttggataattaggaaaaagttggaaagcgctagctagctagtagctttaccaattcatgtcagagaaatcgacatcctgatgaagaggatcccatctcaaaagctccagtcttagataaggtgaatacatggaaggaacggtcaaagacgtgtaagcagcccggaaagcaggtgaagggtgtcgcgcaccccttttaaatatcgacttcacccttgaaagctcggagtacaccacagatgcatcactaaagattttgtcggcacgctgaagtaagctatctcgtgcctcctcataagctgaagtctcacagtcactctcatcatcggtgcttgagtctccttctactatcagggaatatccatcaacctgctttctctattctagaatagctgaagcatgtctttcagtaattaccttcatctgatcttcaattgccgtgattaagtaaccgtttttctgcgaaagaaagaagattgacaacagccgtttgatggaaatgaaagcaccagatacacagacaaatgcaacacatattcccttggaaaaggacaaaagtaaaagagcaggcagaagaggagtacctgcataaagttgcggaaaacagatttgaagtcactgatttcctgcaaagaggcatacttgtaaacaggagcagatggacaactttcagcagctgcgatgctcatagtcaaattctcatcaggttcctggatcatcagaaaccaaattagatagaacaataaatagaaagaaggcaagttcaaagagcaataccttagcaagctcctctggtctcccggcatacatctgcggttgctcctgtggcatacgcgaattcactctttcatcataagcattgcatattctatcaagcgcagccatcttatcatcagctgtttgcggcatcggacagacgaagacataagacaaaccatccataccaatgctgcgcactcgctcaccgttgaatactatctccatgggcctctcatcctgactatgttccttcaaacgctgctgcatctgctcttgcgtataaaattcgtccccccttgataagtcgagcagccaagaggatttggcatggtctctgcccttcgcatcgtcgtcgttcttcgtgggaatggccgggagctttctacgtttccacgggtaaagatcagaagaggaaggtttcgccgggtaaagatcagaagaggaaggtttcgccgcggcggttgcatcttcaccgtcgatttcatcgttacagcgacgccggtaattcctaggttgcttagttcccattctctctctaaaattagggctcgaaatgaattgttgaacaagatagagatctttttctgatccccgtcgaacatttattcaaggccaaaaaaagcacacgggaatttagagtaccaatacatatcaaaacctaatgggctttgaatggttgcatgtgtgtgtttatttctgatatgcaaagcgatcgatagtcttttccatacaagtgtaaactgtaaacaacgtaattaagcataacaatacaactctttcttctctttttttttgtaaacacaaaataaaattacatcaattcatgcttttcctagttcatctgacattttccaaaattcatgttccattgagtccctaatacttgttcatattcatattagggtacatgaataaaagttatcattcttgaaactactaaattttcatagtttatttttcttcttttcgtttcactttcgaacaaaacactacgcgtggcatttgcaatgaattccacattatatggaataacaccatgatgaacattctacatatataattattatgtttaagcacttagacagcataaattctttctaattatataaatctaaccttgttacattgtacatctataaattacttgaagaaataacgagttctatttctttttaaaaattaaaaatactataccatatctcagtgattaagttgaaccaaaaggtacggaggagaaacaagcatttgattcttccttattttattttattcatctctcactaatgatggtggagaaaaaaagaaaatacctaacaaacaaatatatattgtcatacaaaaatatttctatatttttagttaattagtttatattcctcacttttcagggcttatataagaaagtgagcaaacacaaatcaaaatgcagcagcaaatactatcatcacccatctccttagttctattttataattcctcttctttttgttcatagctttgtaattatagtcttatttctctttaaggctcaataagaggaggtactattactacacttctctctacttttacttgtattttagcattaaaatcctaaaatccgttttaaattcaaaaataaacttagagatgtttaatctcgattcggtttttcggctttaggagaataattatatgaaattagtatggatatctttactagtttccattcaaatgattctgatttcaatctaatactctcactctttaattaaactatatgtagtgtaatttcacactgttaaatttctaccatgtcatgtatattagagttgcatagaaaattgtaaaacatccatttgaattcgaatgaaacaaaatgttttaaaataaaattttggtttttaaaagaaaaatctaaaactgaattatatcgtttaaccaagttgtaaaagtcataaaacgtagtatcttgtaaatcgctcttccacggtccaaatagacttctagtaataaacaagtaaaactaattttggtttcttactaattttcacagatgggtgaaaccgctgccgccaataaccaccgtcaccaccaccatcacggccaccaggtctttgacgtggccagccacgatttcgtccctccacaaccggcttttaaatgcttcgatgatgatggccgcctcaaaagaactggtcacgatttaaaacataacaaaaatacatgtcaaacttatgtttctttcattgttttataaacgtaaatgctgaaacgcaagacaaaaatgcggttttgctccagggactgtttggaccgcgagcgctcatataataactgcggttatcggatccggcgttttgtcattggcgtgggcgattgcacagctcggatggatcgctggccctgctgtgatgctattgttctctcttgttactctttactcctccacacttcttagcgactgctacagaaccggcgatgcagtgtctggcaagagaaactacacttacatggatgccgttcgatcaattctcggtaacaaatactctgtttttctcactctgtttttggctctgctttttgttttgagtattgaaatgctctgttttcttgtaggtgggttcaagttcaagatttgtgggttgattcaatacttgaatctctttggtatcgcaattggatacacgatagcagcttccataagcatgatgtgaggtcttttctttctttttaaaatcttcttacacaaataacgaaacgaaggaaaggttttaaaatttgggtaacttggatggatcatgcagggcgatcaagagatccaactgcttccacaagagtggaggaaaagacccatgtcacatgtccagtaatccttacatgatcgtatttggtgtggcagagatcttgctctctcaggttcctgatttcgatcagatttggtggatctccattgttgcagctgttatgtccttcacttactctgccattggtctagctcttggaatcgttcaagttgcaggtgaaaaataactacgaaagactcttataagcttcacgagaattaaaaaaaaagctaaatcttgatgtgaattgtctcagcgaatggagttttcaaaggaagtctcactggaataagcatcggaacagtgactcaaacacagaagatatggagaaccttccaagcacttggagacattgcctttgcgtactcatactctgttgtcctaatcgagattcaggtaaacaaaagaaagccttctttccacagaagattcaaaaaatttctataaccaaaaatgagaagattcatttttaggttaagaaacactttctttgcacacaagtttcaatttttcaattaaatttttgattctttttgctctgtgtaattaggatactgtaagatccccaccggcggaatcgaaaacgatgaagaaagcaacaaaaatcagtattgccgtcacaactatcttctacatgctatgtggctcaatgggttatgccgcttttggagatgcagcaccgggaaacctcctcaccggttttggattctacaacccgttttggctccttgacatagctaacgccgccattgttgtccacctcgttggagcttaccaagtctttgctcagcccatctttgcctttattgaaaaatcagtcgcagagagatatccagacaatgacttcctcagcaaggaatttgaaatcagaatccccggatttaagtctccttacaaagtaaacgttttcaggatggtttacaggagtggctttgtcgttacaaccaccgtgatatcgatgctgatgccgttttttaacgacgtggtcgggatcttaggggcgttagggttttggcccttgacggtttattttccggtggagatgtatattaagcagaggaaggttgagaaatggagcacgagatgggtgtgtttacagatgcttagtgttgcttgtcttgtgatctcggtggtcgccggggttggatcaatcgccggagtgatgcttgatcttaaggtctataagccattcaagtctacatattgatgattatggaccatgaacaacagagagagttggtgtgtaaagtttaccatttcaaagaaaactccaaaaatgtgtatattgtatgttgttctcatttcgtatggtctcatctttgtaataaaatttaaaacttatgttataaattataaaaccgtgtgttttcaattctatatcaaattatagtagtttgtactttgtagtgttggttgtttcttgttcaagtgattattatgaatgagttaggtgtcgacatatacatggtgatggtaaaatggaatttgaatcaaagtgagacactgacatttcaatgatttgatttataaaggagcaatttggatggtttagcatgaaagagaatctcctcaaataagtataatttagctgtccacccaaaaaagcctatttcaagaaaataatataatgttgttcctttttctaatagtctatctcacttatcaaaaacatgtagggttcatggatcttggcaatgatcagaatctttgaaagtatctacgattaataacacgtgtttgaaaaatccacagaaactttcaagatttgctacaatgaatctaagctcagagcagaaatgtgaacatgccttctcagatattcagtaatcagagggtaactagtttcttacaaagaggaattctgatttaagagactgagaagatgtagagaagagttcatcatccaacagatgcttgagtagctttttgtgttgagtttaaggatgcagctgcggcttcacgctcctgccggattcgctctctctgtagagattcaatgtaacaacagagaaacaaacaaaactaaagttagtcagtaatgacacaagacgccaggaaacggagggaaaaaaataaaaataacagtagagttatttcgtgcttggtaatgcaacatgatccaatttgttagtttacaatgtcgaaactgagagcatacgtcatgctacctatgcaaataacctactgtgccaagatagttagctccaagcaacttgtatgacatttttctgagaaacaacagactccatcatctgaatagttagctaacagtctcagtatttagtaatataactagtttgtatctaaaatctaagcgagaagagaaccaatatagctacctatttaaccacagaacaaaagaggttcgagcccttaaagaaatgtaagctaaattgccctagcaaagcatcagaattagttaccatgatcatgaaccagatgagttaatctacacacttgggagatacagaaacataatgaaaacaggaagtgatcattgtatttgtctccaagttaaagtacacacttggagacattggaacaataacgaaaacagaaattgatattatagtcttgagagtttaaaatctaaaacatacccttctctcccagtaaggcaagaagcagacaaagtcatagactggagtaatggtctgcaccaacacaaagtttattccagtgaaaagcaagagtcccttcaacggccttgttctgtgaggcatatttgttccaagtcaagaatcttcagctctgtaattatttagtccatatatctcaattactactaccattaactatactgattcagttgaatcctattatcttctcaaaacataatcaaattcaaagtaaaagcctttcctagtaaacgtttccattcaacattattattgcagtttgcttcaagtgacttaccagagattttgaaatcaattctgaagaaacttccatcaacaaatgtacattcctgtagtagagaaaattgaaaaacatcattaagtagaaaataatcgaatgatataaacaaaagtaatctttggaatcataaagaacaataaagtacagaatcgagttaataaacttgtttctcatacacaagataatagaggtattaagaatcagttaaaaaacactactagagttcataaaaacaatgaatcaagaataatctaatgtggctccaagcagcatacatatccaaaaataaacaaagcacaagtgattacaagctctaccaaaaaaaaaacaaccactgattctgtgaggcatttcatcaaacacttggttggcaacaacaataagaacagagcaagtgaaatttggacaaacctacaagctgaaatcaaaggaagcatatgcggaatcaacaataacaacgaatagcgaagaacaaagcgatgaagttgcatcaagacaaaaatcgacgagagtcacatgaacgaatatttgacagagaactaaccaggagtagcagtcgagagagagatcgaagcgagggagagatcgaagctaaagagagagagcttcgtccgcagagagagaacaaaatcgacgtatgcggtttctgttttattccaataacgacgtcgtttgcattagtgaactattcaacggtggataattgcgctacgtggctacttgcttagccaataatgagtttcagacgtccgatttttgccaccttgtcttcaacaacaacaaaaaattctggaaaaaaataaaacgcaaaactgaagaaatctcgtttcatccgccattaacgacctctcaaggtaatcttattactatatatgctcttgggtattaatttcaatctgttagcttctcggtgaaaaactcgattggtggctttattttgatctcagtagtacgatactttctagctagatcttcttcattgaatgtaattggcttatcatagattcatttctccattacttttttttgctagtgaaattgtgatcatagattcatctctgcgatttattaggctttctatgaacatgagaagagtgtttggaggtgtatctacaggcaagtatgagaataatgaatgttcttcctcatctttgtgtcctagcttgttttgattcattacttacctatgcaaatgcaatgagttaataatgttgctgagtttttcttcttttccttcttctagatttgtttccgtcgcgaagtatgtaccggccgctgcagtctgggggaaacttggttatgttgtttaaaggatgcagacggtttgtgagaacaacgtgtcgcgtttcgatccctggtggttctttggggaatgaatcaaaagcacctccaaggtttctgagggatagaaagattgttccagatgctgatccccccaatatggaagatatccacaagttgtatcgactttttgagcaaaggttgatatttccttcaccatctttttccagcagtgagcatacatgtgttgtatctaatggctttcctcttctcttttggcagctcgagactcaccatcttgactggagctggggttagcacagaatgtggaattccggattacagaaggtaattcatttgatcgattagtcttgtctgaagatgccttgcattctcgttttgatggtctcatgggttacatgtggttccatttgatgatttggtgcagtcccaatggagcatacagttctggtttcaaaccaattacccatcaggtgatctgaaggcaagatctatgaaatctttacagttcttaatgcaaaccttggatcattttactattgtataactgtattaatctattgtctacaacctccttcacaggagtttactcgatcaagccgagctcgtaggcggtattgggcgaggagttacgctggatggaggaggttcactgcagcacaaccaggaccagctcatactgctttagcatcactagaaaaagctggacgaataaattttatgatcacacaaaatgttgacaggtatatccttcagttcctcttccgtaggatctctgttggatgtgaagaatgttgactctaagctctaagttgttaggttgcatcatcgtgctgggagcgatccacttgaattacatggcacagtatatactgttatgtgcttagagtgcggcttctcttttccccgagacttgtttcaggatcagctaaaagcaatcaatcctaaggccagtgtataccataacctgaataaactggattaatgtatcatctcgcaaagttacaacgtttttgtttcaactgtagtgggctgaagctatagaaagtattgatcatggagatccaggatcagagaagagctttggcatgaaacaaaggcctgatggtgatatcgagattgacgaaaagttttgggaagagggttttcatataccagtatgtgagaagtgcaaaggagtcctaaagcctgatgtaagattgacttaatcagatagagacgaatcagtttagctctgtttcttattatgttctcgttgaattgaaggtaattttctttggagacaacatcccgaaggaaagagctactcaagcaatggaagttgcaaaacagagcgatgcattcctcgtgttgggttcatccttaatgacaatgtctgcttttcgcctttgcaggtgatgcaggagaataatcatccagttttgagtttgcatcttactaagaagctttctatataccttttgcagagcggctcatgaggctggtgctatgaccgcaattgtaaatataggcgaaacaagagctgatgacattgttccattgaaaatcaatgctagggttggtgaggtatgagcatagcataaagctcttccctttccttcagccttgaaaatgccttaaatatccatattatttcatgattgtcagccttaataatttgtcatttcgtgattggtttgctgcagatattgcacagagttcttgacgtgggatcgctcagtgtcccagctctctagcacaatgtccggatcatttaagtaaactttggcaagagctatgttatcatttagatcacctatatatattatttataactaatcaaaatgaatgcttgtattcctgcaacgtatctcaagttgtaaatccaacatcaaataaaagagtaatcaacatcaaataatagattcaacacatgaactaactcgaagcagctaacacttgcagaacatggtgttgttctgaaaaacaaaccaaaacaaccaaagccaccttccaatacccgattacacaagcttttaaacctcagaaagctcagagagggccttatcgatatcctcctcatggttccgaagatcgttccactgcattaagaaaaaggtctcgtgtaataagcaggacatatgcacgtgtggaagacataaacaatggaagagagatgtgaatacctgttccaggcttagagagatacctgcaacatataggagacatcgaaaatcttgtcaacatgattatgcaaagaaagcaaactaatatagctggccctaggagacaaaaaccaagacgttgttgatgaaaagaaaacactctgcgcatctcctcctctcagtcccaaaccgcagaagtactagatatataataaaagtccctaagatctgctaactaaatgcagaaccttaacgaaacaaaacatgaaaacaaagggatgaggatacattgttgaccataaaaaagaaaagagaggaggatacagagtattagcaaatgtggaattgtgagaagaagagagacagtcaaaagaagatatgtagttaaaaacaaaaatttaccttgcttgctattacaaggtaaagttataccgtccttgacaaagaactgacgaatggcaatccaaatcctcccattgcaattcctcacaaagactctccgattcttatctaactggaatgtaaacaaaacataacatcataaacaaatatcacaacttgatccaaaccctaaaactcatacgaactgctacagacaaaaaagagatgaatagtagagagactaacattgcagatgaagatgtcctcaatctcgtccgctggctttgccactttcttaggcggcgcgtgggtctcagattcgtcgcggtcgtctgatgctctgacatcctcgtctttcctttttccgttctcagacattttcttaacctctaaaaaaaacactcttctactgcaaaaattgactcttgagattctcaagttaaataaaaagcacctctctccttttctcgcgtaatatatctactgcgttcaccgaattacaactgtgatatcagattcggaacgccattttacaagcgcacagtttgagaacacgcgcggccaaacttaaaacgggggagttttttgggaaggtaaatattctttggaaaagagcaactatagcaatgaaagtagcaacacagagtgatacatttattgtgatgggttcatcttcaaagacaatgtctgcttatggccttgtccggatcaagtgaagtttggcaagagctatgtaacatttagacctatcttgtttataacttatcaaatgaatacttgtattcctgcaacgtatcttaatttgcaaataaaacagcactacagcagtaaataaaagagcaatcattatattcttaataccaaccaaagcttgtctgaaccaaaagtgaaagattccatacaccaactaatttgaagcagcttacactagcagaacatggtgttgttctacaaaaacaaccaaaacaactgagccatattctaatagacgtacaaccaatgatacaagttttaaaacctaagaaaggtcagagagggccttctcgatatcctctgcgtggttccgaagagtgttccactgcattaaggaaaagctgtgtaataagcaaataacaagaaaacagaaacacttctaggagacataaaacagtggagagagatagaaagagatgtgagtacctgatccacgcttagagagatacctgcaacgtataacaaacatagagataatcttgtcaacatgattagttatgtagagataaactaatatagctgtctctagagaaagacatgaaggagcaatagcaccaaaataaacaaaacgttgttgtacaaaagcaaacactctgcaccatctccgctcatacttacaagtccataaacagtctcaataagcagaattgcctattataaaaccctaagatatgcaattctataaacctgactaaatgcagaaacttaacaaagcaaaacagtaacgaaatataaaactaagagatgaggaaacacattactagaaataatgaattatgagagccaaggggcattggtttaaattacaaaataaagttacctttcttgccaggcaaagtctttccgtccttgacatagaactcacgaatgtcaatccaaatcttcccgttccaattccttacagagactctcctattcttagatatctgatgtataaccaacatgaaccctaatttgattaaaaccctaattttgagcaaaacacatcaacaaaattaaaacttgaccgaaacccataagctcactgctaatagagtagataacgaaattgaaagatagacagaaagtgtagactaacgttgcagacgacgatatcgtcagactggtcggaatcgtctgctggctttgcgactttcttagccggcgcgtgggtttcagattcgtcatctgatgctctgacatcttcgtctttcctttttcctctagaagacattttctccaactgtaaataagcagacccaaaatgttctcttcagaccagagtaaactcgcactaaacaaaaaaccgagcaattacaaaatttagtaaaagtgagaaggaaacctggtcgtgacgctgcaacgagtttctcggagacggcgaaaggactcttctactgcgaaatcgacaaaagagaattgagagattctgaagaaaaatgaatcggcgcgtctcttctcgcgtatttatgttaatgtgttcaccgaccacgcgctgttgcagagcgtgtgataaaattagaactgtgacagttgttttgattcggaacgcttttttataaacgcgaatttgagaaaacgcgggagcttttttgcttgggaaaggtgaaaacaaaaagatttggacttggtttgaaatcgccgaacccttgacaaaactcgatggggaatttattcgtgaagaaaccgaagatcacggaggttgatcgagcgattctctctctcaaaacccaaaggcgcaagcttggtcaatatcagcaacaggttcttgattccttcgccttgtgatttcgcatttctagggtttattcttgctcgaatttggtctgagacagaaagtgcagtttgattcgattcactaatggttatgaataagggtaaaggttactgaatttcggctatgggttctcgaggtttaagaagcagttaaatgtagaagttgccttcagaatctgtcttggatccaaatgttgattcttatgtcaagctaatgatggtttaattatttcatcgccactattggtagatagtgagtttgatcgctgagaaagtggaatgcaaatgttttttttttctttcctatgatcctgagctttgacctttctttctcttaaacctttctttttagcttgagaaagtaattgaagcagaaaagcaagctgcaagagacttaatccgtgagaagcgaaaggacagggctttgttagcattgaagaaaaaacggacacaagaagagttgttgaagcaagtagatcagtggctcatcaatgtcgaacaacaagtaaattggcttgaccttcttcttatcatctccttgtttccatcacataaccttagtgctatataaacagtacttttcttttcttttatagctgattttatgttttgaaagaaacataaacgaatatattttgaacctgtctttatgactcagttggcagatatcgaacttacaagcaagcaaaaagcagtctttgagagcttaaagcaaggtaacaatgcaattaaggcgattcagagcgaggtcaaccttgatgatgttcaaaaactgatggatgacactgccgaggccaaggcttatcaggatgtgagttaatagtgaatcttgttgttcctttttgtttgtgtggttcgcttatagttacaatcatttgtcacatttgccgagcttctccttgtttttctccttcatggttatgagtattcccttgcttgatctaactgttaaacactttgattttaggaactgagtgccatattaggtgagaaactatcagcggaagatgaagaagagatcttagcagaattcgacaacctagaaagtctggtatgctacataatggattctcttgtttctcagatacaattgtttccagcattatgaccgtactgccctattgatgtttcgagtaccaccatttactttgtgaaacaatcttcttgagtggagtcaaatgtgatatataatgtttgtttgttttgaagctgattgttgaagatatgcctgaagtgcctacgacagagctcatgcctgaagaacccgagaaaatggatctccctgatgtgccaacaaaagcaccagtcgcttccaatgaaaccacttcaacaaagagaaaaggtttttgtgatgtttgttcaagtaacaattgcttcatacaaagaacctttaactcatagatgcttttgttgttgcagttcttgaagaacctttggaagcttgattcagaagtgaagaatctgatagactactacatagccacctcggattataatcattctttggaaacctttttgttatgggctcttgaagatctttgtgtattctcttcttactcctgcagcttgtaaagaaccaagttcatggagtctctctccttgtaaaatggtttggttgtttctaaaaccgattcagagtctttgacctgaacatatgaaagtatgaatgacaacatttaggctcagtgggaacaattgtttctctttctttgtataggattttcctcttttctgagtgaaaatcaaagctacaaattcttccagaaagaattcactaaaagatatttgtaaatgggaatgtcaaaccaattggtttgtcaagatttcaaaaccagaaaaaaaaattcttaattgatattaaaccaaaccgtattaaattggtatggttttttaatctacaacaaaccaaagaaaaaaaaccgatacggaaacacgactatttagcaaaactatgcacctatcaataatacctcgctcgatctgggtttttgcaaagctttatagggtttaagaactatggctctctgagcttcatttggaaatcttcattgttcttcgacgactttgtttgactccaggtacctgttttgtttttgtattcttagaacaaataagatcccaaggaatttctttttgtaatttctgggttttgtagccatagatctcctagatgcacagaaagtgtttgaggaaatgcctctgagaaggttgatttaaactctattgcccgttcatttcatagatctcgccgccaattttagtttcgaggatttgtgcaaagcttttagatttcgtccctcttttggttgtattttcctcaaaaatcctatgcaaatgtggatccagtttcgcagtgccttacgattttagatttcaatagtatggttatgaacattcatggaatttttcaacttccctttaaatcttttagattacttttttcttaatatgatcttagtttgtttcacttcatgaggtccatatagattatacaatctaaagcatttcattgtttatgctttgagatctcacgcctaatgtatcaagtgtcaagtaataatcctataacgttaactgttctttcgaattcttgctaatccacagatttgttgattcagttttgtaatcagggactgagcttagcctttaccatttcctttctttaatgtataagtactactctacactcatctgcatgtctcattgctttacatctttccttcttttgcttttgttcaggcttagtcagaagctgatttgggatttgagatggcgacagagcatagcggtttagaagatcaggagagccaaccaagccaagtggctcctggttttgtaggagcaattgaagaacaatacaaaaaactcagagatcacgctgaagcttatccatatgtttggggttcttatactgttgtctatggtggtcttttcctttggacagcttatagatggaggaaacttaggagaactgaagatcgagttcgtggtcttcagacaaaacttcggaaactcgtcgaaaatgaacaagcagcagtaacagcttctaaatctgctcaatcagtggacaagtcttcttcaattcccgacaagaaaacgtcttaattagtaagttacaatcagaaccattgtctctgttagacttttgacgaggttagtttcttacaacggaatcaatattcccggggtttatctgtttcgtcacagtatttgtgttctttatcagcataaaattcatgtacatgaatgaagaagagaaaacgcttattcgttgaaacgctaaaaagtcatgttaagcgttgttgttcttatagatggagtaaatgccttaaaccccgattatttgtttgtgtgtcaatgctataccaactgaattaacattaccgggtttaactttgttttgtttgaacttttattaatgtatcggtatataatatcattcttaaacaaaaacatatacattttgatgtacatgagtgagaaagacaagaaaacgtagaaatgatgaaacgctaaaaagtcatgttaagcgttgttgtactaacagacggagtttctggtgcagtgtaacgctccggctgaagaagtgagtactttaacctgtttagcgtttgcgactgtgaacctttgatctgggccgtaattgggccgtgcttttccaacacctttgtgtaggccaaaacaagctccgttctcgaagtaatcattcactgagtagaatttccattgcatttggtctccattgctacgtttcttccaagttatctacaacaagttcaaattcaaatgttagatgagataaaaaaaaagaaaatgcgttttgtgttttagcgttttccattactacttgatacggacctctttgcttccggattttggtgccacgaaatagtttgattcactctttacacgagggctcatgcttcctccaattgcatattgagtccatccttggtaatagttattggcaacatgagcatatccatgtctcactctgtatatttcacatatttcatccaaattagaaatcgaaatatcaataaacgaaaatcaattagtctaggcttctgtcaattttgtaccttggcattctctggttgcaattaggaccaaagtggttaaacacaacagttaccctcatatctttgtcttttacatagccatcatcatgtccaagaagcatgaccttgtcctggttcctaaaccaattgttcgacactgtgacgtcagtactccctagtgtgacatctagaagaccgtcttcgcaatcatagagagtgttgtggtcgatccatactttcttagccgtgactagcctgatagcgtcgccatccatgtgtccaagttggatgatctttgagtcaggtcccatcactgagcttggtggatgagctttacaatcatggatcttaagcccatgaatgatcacatcggtggctctatagactatgaggcaagcgggacccgagatgtgaacactagcacctcgaccatcgagtgccgtgaagctgctgattagaagcggtttatgaagcttgatcttcatgtttcttttgaatgtgatccattttttacctttgacgagtgttgctccgtatcttagggttccaggtttagggttcagaggatcatcagacgggtcggttactttgtattgtgtgactcctttaccgatatttcccgtcatttttccggcaaatccgactgaacaccgcgcaagctgattgcgggttctacgccaatgggggtttggtctccaacatttgtccatcacattcagtttcgtggcctccaagacatttgcgacaaacaaaacgatcaagagtaaaatcaacgcgatgttcaagaacctaaccatgtttcttgattcgagaagtgaatcaagattttcaagaagaaggtttttgagaaaaggttgagattatgattacaagctttgttgtgtttgatgatttgtgtattatagatggagtttatatatcgcagtgatcgagttaggtttttgtttaaccaacaaaatgttagttttatgttttctatttagtatgagttcttgacaaacttaacaagttgtaagttgtaacaacttgaagcaaacatctaaaagtaaaaaagaaatagtggaactgttgttattatgagctacctcgtttttttcttagcttcctatatttagtattgaaatgttgagttttgatgattcgtttcatagcgtgttaattcgattccaaaaatatatattctgctgcacatatcaatagttcttacagctactacgcatgcctgttttaccagataaatatgtatcagttaaataatatttgattgatcagagaaaccataggcctagattaatatttaacaactaaagaaaatgtgttgaaacttccacgaaactccggttatatattaacaatgaccatatactttaaaatatttatattggatgaataaatccataatagatgaacacatgacctgaataaactcttcttggtcttcgttttattctttcttgtttcgatgccttacgagaaagagctcgctgctgctaagaaagccgtctctctagctgctcgtctcagccaggttagtaaccacatatgtctaatttattgacaaaacttttactaatgacagttttttttcatgaactgtgtgttgatcaggaagtgcagaagtctctgttgcaatcagatgtccggtcaaaatctgataaaagtccggttacagctgctgattatggttaaatcaatcccattctgttgtcaatcggtttttattcgtgtaacaaaactggtcaaccaggtccaatcaaaccagtcctaagttgaccaaacctatcgataaatatgcaggatcccaagctgtgatcagtcatgtactagagagagaacttcaccctgaaccactatacttggttgctgaagaggtacttacagtctcttattaccagtcaaaaacacaccaccgaacttaatctttctctgttacatatcttttgcagaatgcagaagatctgcacaagaatggcgccgaggaatttctagaaagcattactaagcttgtgaacaatgctctagcttctgatgattcctacgccaactcttctctttcaatggatgatgtaaggaaggcgatagaccacgggaggtcacaaggcggttccagtggccgccattggattcttgatcctgttgatggaaccagagggtgagaagtcttgaaactcattacagaacaatcttctcctttttgctctaacctgcagattctgattaataggtttgtaaaaggagaggaatacgctgtggcattagctttgcttgtggaaggcaaagtagtgctcggtgtcatggcttgcccgaaacttgagaatcacaagtcttcttcttcaggatgccttttctttgctacagtgggagaaggagcttatgtgcaatcgcttgaaggcgactctcatcctccacagaaggtattataattatcagagcatttgatgtcccttaggcttgttctctcgttttgtgttcttaaaacagagtggagaaagtgtgctaataggtgcaagtgagcaacattgagaatcctgaagaagcaacctttgtggaatcatcccacaaaccaatccccatccatagctccattgccaatgtacagaataacatattttatgtgtgtagttggcatcaagcctaacctaaccaatgtattaatcttttcactaaaacttactctcttacggtaagcagaaacttgggatcaaagctccacctctaagaatccatagtcaagtgaagtacgcagctctggctcgaggagatgcagagatatacttgcgtttcactcttaaagggtaccgagagttcatatggaaccatgctgctggtgcaatcatcacaacaggtatgcaaatatttattcatggcacctattacggaaaacaaacaaaacaattacactagtgaccaaaagctgtgagcaataagccaataacctcgtgtagaagctggaggtgtagtttgcgatgctgacgggaatcctctggacttctcgagaggaaatcatcttgaacacaaaacagggatcgtggtcagcaccaagaaccttatgccacggctcttgaaagccattagagaatccatagaagaggagatgcttctctctgagacacaactgaaactgtaatatatgtactgcctgaaatagctatctggtgtatatcacacatctgccgttgtgtactgtcagacactgaagaaattgtatgcttttgaatattggtctcgatttcaataaaagatttcaatacacaatgtagattatttggcttacataaattactacacaaagcatacaactagagtctacctaaagaggcacatctgatgggtaatcttgtgggtgactattgatcgtctgcctcaccagaagttcttgttccctgaggttagatggaggaacatcgtagacatctgagaacatgttctgcagattcggtttctcagtcttctctgcaacccggagcgcttctaacatctgtatacaaggacccaaaaggataggataaattagcatttataaaaccaaaatgattcttatacaatgctcatgatcaaggttttttggttacctcttttttgattctgcttctcagatccgattccgttttatcactccaccagccattactttcaatccatgtcctaaacctagacagtgggtttcttgctttgttccaccactctatctcacctgcagagcggtacctagtggaatcatctgatgttgaatggtgtcctacacggtatgttaaggcctaccaagcaaacaaaaaaaaaagagaggatttgaacttattttgtgttttgatgttgcatctaatatcaacacatcatattaacctcaatcaagattggcctctgttctctaattgccatttcgcgagcagtatgtaccgcactgtacatggcaagtgcatcatttccatccacacgtatacttcgaattccataagcacggcctttgaccactacaccatcacctgttggccattgtgtttgcaaaagcattggcaaatccaaaagtcttaaagaaaaccaagtaaagggtatgtacatccaaagaaaaagaaaaggagttacttcggaactgatctgaggtgggagtactgatggcccatccattgttccggcaaataaataaaacaggagcttccataactgctgcaatattcaaagcagcatggaaatctccctagcaaaaacattacattgatcagccaccacagagttttcagtttcagtaatcatagtgatgcataaaaatctgaaaagctcgagaataatgcaagcaaatatacataattcacaatccattgcaatataccggcttaatgcccttatactcacctcactcgtgccaccatcgccaaaatatgtgaccgcacatgcatccttcttgtccatctttaaggaataagcagcaccaaccgcgtttggtaactgcgtactgagacaaaatagaccatgatcaagacaaatttgcaacataagcaagagaaacttaaagaatataaacagtagagaagaagagaatctgaggtgtatacgcaatggttgcagaaacggtaaaataattgagcttgttagagccatagtggacgggcatctgcctgccttttccataatcagatttgttcccaaaacactggtttgcaaattcttgaagcgtgaaaccacgccatagtagaacaccaggctctctgtactgcaagtccaacaaaaaaaaagacagctcaatttatcaatctttcttttgttactcgaaggggttgcatagtaccttgacataagttaacattatgaaaatactgtcaatttaacacatggtagcaacatgaagtataagagagtgcatttacaatatatgaatgaataaaaaacctgaggaaagataacatcttgaggagtgagagcagcagctgatgcaatattaatggcctcttcaccgattgcagtagcgtaaaaggaaagtctgccttgtctttgagcttcgtagaatatgttatccataatttgaagagtaaccatatcgctatatatcttcaccgcaacctcctcgctaacctgaagaggaagaataaagatgagttctttggcctatttagaattcgcaaaaagaggaaaagattaattctttctcttgttttttttgtgaaacctgaacaaactggctgttggtgataagttggccattgtcatcaagaacacggtagcaaggaacacgctctttatcagattctgatatgaattgaatctcaggtgtgaaagctacctttcctcctggaaagtccattacctgaacattcaaggtccacatacatatattcttcagaatgaatggagaatatcaacacaataagaaatctaaaggttcatgagaatctaaaaacaacccacacaaactagaaaatttcttgagatataacaatcatgttttagtaagtaattcataacatcaacaacagaaatatgtataaatgtcaataaaagcgatttaatgacagattccaatgatacgacaagagtggattgaacagtgagctatggacttcctataaaagtcaaaatgcggaggaacaatgcatgcacctgatgattgttggcgtattcgtgctgaacaaaactagagagtgtctctggctccgccatggtattacagagacggctaattggattctgtgaacctcgaagcggggggtcatgtggtaggatttggcggatatgccgagtcacgtggctcctagaaccgaaaccgaggttgtgtctgagaatattgagtaaagtcgattttgatgaaaaagaagatctcaaatgcagagccatttttgattttagaatttgatagagaatggatagagagagattgttgaaaactgaaacgtgaaaagtgtagttgttaagtgccgtacagattttgattccttaatcataaagtggaatcttttattaaggaatcgcgaacaaggccttcgtctgtaaaaatataagcccacaacactattaaatggcccactatataaaacgacttcatcaggacccaaacttttatttggttacaagatactctcactttaacacgaggtcacacacacaagatatgcctaaaatgaatgactttaaagtcacatccatatcttcacagttccaactttgccaaaatccaacatttagaaacagagcaccattttggctgatataacaagagaaattaaacaactcttgataactaattacttcattgattgatgaatgatccaagcagtttaatattcacagcagtatctcctcaactttttgttaaaacaacttatgattgcatagaaacacatgagaacggaattggcaaaagtcaaggccatgagatcttcctgtttctactatgtcaaagataaacgagatagagagagagagagacaaggcggtgggagctaagccaaaccagacaagccgagacgatcagcaacattgtacataaccagcttatcgtaaagagggccgaacagttgttctcctcctatcgagaacgtcaatgcccacgcggagagaagagctgtaaagacactaaagccaattgctgaccggacaacatctgcatcagcacaagatttcaaaggtgtcagagaggatagaatgtacatatttcatatctcagaaagagatacaaaagtttaaatcttcttaaatcagaagtaacaacataactcaaaagtcaaaaacaagaatgatcatcaattcattcctgaatatacttaaggcaataacacatcaaagccagtcgtgacgagggagaaagatttaatagacctagagtactgtcccccagatcaaataagcatacaatgaataatcaccaaagaaaatggataacttctgaacaacctcattagtagccactggatcagacactccccattaacttattctattaattgcttcctataaaatctaatgggcatctacacactaaatgctacaagttcattagatttgagcctgaataggccaatggacttatcatgtatccgcatcaaattagttcgagtatgatacttgcaatccacaagccataaggtttaagactgtcaagacaacattcgtagccactattacactactgaaacagtaaataccagcaaaattatacgatttcataggatctaatgccagatcaaaagatcccaatctaacattcccaaattccccggatacgaagatcggtggaaaaacaaaatcaaaaaggaacttacaattgcggatttgagggaaagcccgagagtgacggagaacaggccagaaatagaagcaattgacaaaccaaagccaaggcaagagagcgaaaccgaacttgtagaatcgacgagcgtaatccaccgatgcttcctccgttaaccccaacggaccgtcaatggttggccaaacctgagctgaagagatgatcgtcgacaatgggtttggattcggattcggattcggattccgattgcgtatagggttcagactggggtcgtcgctccgtgtagcctccatttttgctcagccactaacgaaaagttgaaaagctcgcgaataaagaagttaaaacgactttttagttaaacacaacgataacgacgtcgtttccacgtaccactcagtctttcatggaaactgcaaaatatcagcatttacttcaatttgtttaaggtgactgaactttataaatatttgattactcaaattgtacttataacatcaacaagagctttacaaatatcaaaacttcaattgtaatggaatttgaagctataaatgtctccatagacatgagtgacttgagtgacttggaacagatccaagttcaggcaatcaaaactcgcatactcggtaacattcctatgttacaagcctacatgatatggtttggctaacgacgcatcatctcatcgggcatactcggaaggtattagtattacgatatgatcaaacctcgagctcgactgaatatagaaccatgaagaaagagctacaagctctcaactctttcgctccatcattagatcaacacactagtcccactagagatttcttcatcttcttcgataaactcgagtgattcaccataatactcatgagcatcttgcctaacaatagctgataaacccatttcaccatttgattcaagacctaagactaaaaccctaaaggaggctctatcaggctcatagccaatagattgcataaaggcatagcaatccatgacaagatcaaaaagcttatgattcaagagaatcgtcaagagagtgttgaaccattcaatctcagccattaaacccttttctgatttcatagctgagtaaagataattgacctcttccatcaaactattatccgccattacagtgatcatatctgtgtacattctcacctgaggcttgtaccaatactcctttctaatctcttcaaaaacctaaaaacgattccacagttaagatagaaacacagctaaaacatgatgggtagaaagcgagagatagatagagatagagacgaaccttgagagctagagagcactcgttttggcgtagaagttctctgagaacggcgaccatatcgaatttcaagagccgacggaatttagaaatgattacacgatcaagcagagctgaggaagaagaagtcgtggaagtagaaggaacgggaggaggaggaagaagtggattggctcgcttcagggcttgaaccgcttgaatcgcttcgatactgagcattcgtcctctctgcaatggtttcctgttcttgctacggtctctcatttttatcaccatagctcgctggagaatctgaatccggccaccggtaccaccgcgtagcttgaatccgagacggagaatatcatctccgcaacttcgcagtccaatcccttccatagtcgccgttaagctctgttcctctgagtggtgtgggaatggcagaggagcagaaaatgaagcgaaattacaataatacccttttcgcttatcttggtttcatatcttgtaatgaacccttaaccggttctcagataaaaccggtaagtgtttcaatttgtcgtataaccgtagaaccgtataattagtgaatgtaaaattacatgtagcattcaagaactgaatccgattacatttggaagagataagtctgattattgttttacatctgagatattatgaacattgtctccctcaccttgtagagctcgaaacaaattatcaacgctcctgtcagtttcgcttttcgtttgaaaatctgaagacaatgttgtatgattctcagagactttagacgcttgcaatggtgaaatgcatggagttaaagatgttgcatcacccaagcctttggaaaggcaaacatatttgaaaactagctgtttataattattaagcaagtcttcaacatctcctatctttaaatcaccaacactggcaaacatgtaaggatattcttgaaatattttggttgcctcacttctatcattcaaaagcgtagcagcgcccttattttccaaatcggtaatggggtcagctttctttattggtgtttcactcagtgtttcattggtaccagagaaactatcagttgattttgtatgcagaagcatgttttccctcttagtattatgagcagtgggtaatgcagcaccgtgatccgtttgataagactggcttcccggaccagaaagacgtgcatgtgcagatttcattttagtttcaaagtcagcttcatccatggagagggattttgcatcaatatttgagatgaatgactctgcagagagtatgttggtgaataagtagccagcttcgccaaccagtttagattgacgcctatatctttgtatatacaacaagtttgagtgaaactggggagggttagcctggagaaacaaagcaaataatgtcattttcagaatccaaggataagagttaatatgaagtaaacatgagacatattcagaaatagcttttgcttaaattgtacaatccttgacaacataccttaatggtaacatatatgagaacaggaagaaattggtcagctccaggttcattctggtttgaagcaattgaagcatttagaagtaagttattaatgactttgcagcacctaaggatacacataagcttatcacgaggagcattgtacatatttatcttctggagctctttttgagctagctgccataaaataagaaaaaaaaacatcacaagtaagaaccattataagaaaacaagcaacactatggagagatagatgtgacttacaagccaagatgtttggttttgaaaagttggttgtatatccaagttttcaggagatatgaactgttgaaccaaggaaatcttctgaaagagtttctcatcggatataacatcctcggtgtttgatgcaaaaacccggggaaataactttgtcatgacatacttctccaggccctgtgtatacataaattaagtcaagaaagattattatagataaatcatgagagagataagcaggaaaaagggaagaagaataactcacatctcccgcattgtctaactcatcatcggaacaaccagaccaaagtggatgagccctgaaagcagactccatcttgtaaaagaagtcctgaactgcatcacaatctttttcagggtctggtgcagtgttcaagatcgaaacaatgaaactgcaaaacatcaaaaaacgttcacaactcaaaaaaccagtggcatgtgatgtttccatcacaacaaaaatctgcttaagtttatagcaaatcatcgatatcataacattgtcgcaaaaacgaaaaaaactattcataactactagagagcaatgtgaaatcagcaagatatcttatcttgcacacatgtaatcataactagagagtaaataaacctaaagtatacaaaaagcgaagaagagaagcgagagagagagagagagagagataaccttttgattgatttgatgaaatctttggcggagggtttactcaagaaattatgcagacccgagacgacgtctgtgttctccatcaatcccccaagataccgtacgatcgacgacaatcaaaattgaattctttgtcagcaaggtttttagtggaaagagatcaaatcggctttttaatacacgagatgatgaataatgatgcggtgggaaagctaaaatattgggccaacgaaataggattcgaaacgaagcccatttaagccctacatctacatcatctgttatggtcctaaatctggtacgatactttcttcttcttatttacttttttcattcttcgtttttacttggaacttttgttcctcccgattagtttttgtgtttttcagtattcatcattaaaattccttttagtattaatgatatgatttagacagaagaagtatatatacaataatccatagcaaaatagaaacaagaataaatgttgagaatactctgaagaaatacgagattctaaggatgaaacagagaatgttgatagggaagtttcgacacattaaaaagattttgactaataaaaatcataattcaaagacaagaaacaaaggtgcttgctcctccttctattcggtctgatttgcatctgttggatttgtaaatcctgcttctcttctcttcttctttttttacatttttggtctatgtctcatggaagcagaaaagccataaggatcatcatcattaccaccagagaagtcaaaatggccttgattatacagaaaggaggagcttctcgggtcattgcgattcccagtttgaggatttaatggagcagtgaggtcttgtagcccagtttgaggattaaatggagaagtgaggtcatgtagcccagtttgaggattaaatggagcagtgaggtcttgtagcccagtttgaggattaaatggagcagtgaggtcttgtagcccagtttgatgattaaatggagcagtgtggtcttgtagcccagtttgaggattaaatggagcagtgtggtcttgtagcccagtttgatgattaaatggagcagtgaggtcttgtagcccagtttgaggattaaatggagcagtgaggtcttgtagcccagtttggggatttaatggagcagtgaggtcttgtagctctaggtataactccgagttttcaactaggtcgtaagaggccgtccttggcatgctgctcaactctggtagtccgttgaaaatgccttcttcttctaagcaaactggagctgagacaccgggatcatatcttacctgtagattgattaaatatgagaatgtattttgcagatacaaaagagcacatattgatgttggagaacaagcagatacaaaagagcacatattgatgttggatactaagatcgaagatatagcaaagaagctttgtctaatgggtaactactacgttccaatgccactaaaacacttaacagctttaaagtagccttgctagcttaagaacatgcagtgacaccggcttgttatcactatactaagccaaagaagaagaatgcaaaaaaaaactacctcattattgttgaaccctaagaactcttcgtcatcatcaaatagatccaacattgaatataagtcatcattgttgggggtctgaacggtctctgccagaggtgcagtagacataggagtggtagctgcatcacttggatgtggaagctcgctggtggtattagttgtagctggtaggaaatccgagacacatgactctgatatcatgccaccaaaacaatccttattggagtcatctggggcagtcaaagccagagtggtttctttgctaggctcaagaaggtttgtgggattactagtagaaggaacatcagtacgtacttcctcatcactccagtcctcttccttaaacggagctccatattgagctccatttctaggtccaggaccatctttcttgaacagaacacacaccacataagtatcctgcagtccaaaacataattgtaagtaaagagagagtgatataagcttacatggatgatacataaatctataaaactaaacaagcaggaaacaatatataagtggaagaaggaaaaaattgcaggcaggacagtaacacactatcaaagcaattaaggaacaaattaaaacggcaagctatcatcagtaaatactcgtaaacctaaacacctgttcaagttgaaatcatatttgccatttataataagtagtatatattacctgaggaacattcatctgcgtcagtactttgtcgtcaagcctgtattcatgcataacccaatcagtccgctccccacgaggcgacttgccaaagtgataaaccagagttttgatctttcccacaacctcagaattgcacagaactggtctctccttccccgtggtcttccagtagccacactcagttgcacggtttgcccttaccccactagcatacttcttttccctggggcagaagaagtgccacttaagatccccacttcttataaaagacatatctgtaaagaacaagtctccgagtcagagaacttagatgcaaacacatgaacagaacaagagtgttttagaaatggataccaggtaaatcagggggttcaaacttgtaaatgtcaacttcagcaatagcatcgacaaggagctttttccccagtattttcctcttcaagtaatacctcacgagttcaacatcagtcggatggaaacgaaatccaggagcgagttgagttttccccattggcgaagaatccaaaggggaaaactttgaacaatcttctgtaaactcttcaccagtaaagtgagagtttagcaaagaaaacttagtcttcaagttcacagtaaacaggagcagcagaaacgaataccctttgatcaaatcaagcagaaaaaaaaaacagagaaacgagaaagaagagaggagaagaagaaagagagagaagtcgaggaattgaagacaagtcaagtccagtgcctgaagaggataatctgaaaacaccacaacctccccctgctcatataaccacagtcacaccaaagaaaagatggattcttcttgcagagatcaacagacatctggtgtgcaacgtaaagcctgctaatgagacattgaaacaaaccaaaagaagaaaaattgaactacccgacgaccaacttgaaaccaaactacaatagataaagtgaagaaccctaaaaatgaatcggaaaatcgataaggttcaaatcagatcaaaacccatttcaggaattacaaaaggaaaacctaagactagatcggaacacagaaaatcaccatccacaacatcgcggcgtaggattagaaacagagagaaaaagtcgtacccggagatggatagggaaaaactcgacggtggggaaaggacgatcggcggaaagggggaggagagcgagagagagatataggagagagtggcgtgaaggacgagccagaactgagtcaagggctgcggtcgtagggtttatataggattgtgtgagggtctatattaatttataaacccaaaaaaacttaaaaattaacaatatacctataatttttatagaattagttctctttcctcaacttttataaattggacaaaaatagccttttactcataataaattatttaacaatataaaaaaattattaccaaacgtcttttatttaattcaaataatattgtttatcaaatatataaataaaaatatattataaattaactgataactagtatgttaacatgataacaaaatatatattaataaatttataaatatacaatgttaaactatattgtattgcgataagtttataaatatattatgttaaactatattgtatcgcgataagtttataaatatattatgttaaattatattgtatcgcgataagtttataaatataccgtattaaatcatattatatcgcgataaattcataatttctgtgatatattatgttaacagtgacattttgttaattgtacattttatgcatttgtattcttaatttttatattttctggatatataaattaactattttggtatcttgttaacatagttatcagttaattgataaaaaagataagggaattgtaaatgataaaatagtctagaatatgttaataataacatttgtacagttgacaactggtcaaactaattatcaggtcttccattggtacatagtgatattactctttagtgaacttcagacctcacacgcgtttgctaattacagtgttgggcccttctcattcaagagtaaaaaaacgtacttattaaacagtgtttaatcttcatattgaggcatgcctaattatatttttctcattttttcactcaaaataatttttttacgctacaaataattcataactcaaattgagcttttaaaaaacacattataaccagaaaaaagaaataacttattcttcacagattttgtatacatttagtcgtgagatgaagaaaatacacattatacaactttttattttcacatcatcaatttcatcacaaatacaaatacaatcaatgtaaatagtcttattattgaaccataaaacatgggcaagactcaagagagactcttcttattattaatattattaaaataaaattacaaaaataaatcttattattattattattattattgaaccataaaccatcttctttttgttaaaaaattggtctaattacccaccacgcatacgatcgctcatatggaaaatgtcacaggctttgattttgtagtcatccatggtggttccgccatggacctcaagcactatcttgccacggtgttctaggtattggtatgcattttccatacccgtagcatcatagattttcgttttcatgtcagcgatagtagttgtcttctcaacctcgacacaatattttttcccatcttcgtctataataaacacttgcatctacattaaaaaaaaatagataaatttctaacaatagcactaaaacaaattttattgataataatagcacacacttcatgaactttcaaaaatagcactacttaacttactatgaagtttttgttctaaaagtattatcactaatttatttttttaaataataccacaacttttatagaaaaactattcaaccaaaataaattagaaataaatttaaaatattatattttggttctctatttccaatttagggtatatatttcaactatttaaaaaatattttgattcattttaatattagtttatggtattatatttgagttccatatttccaatttagggtatatattttcaccattaaaagagatttttatttattttaatattagtttgtagtattatatttgggttctttattttcaatttagggtatatatttccactattaaaaatttttattttatttaatattaaattagtgtttgctatcatttttctttctatcttatattttaattaagtttaattgaagtttatagtgctatttgtgaaattttagaaatgtactgctaattttggaagaaaaacttttttgatgttatttttgtcaattgccctaaaaataacaataagaataataattagtcaaaagattgtgagtttaatagtttaagtgttgcacacgcacacgtatacataaatatatatgtatatatatatatatatatatatatatatacatctacacaaaccttgagaaggaggttttcttttgcttcgcaaaaccctagaaaaccaagccctaaatcactagaaagagagaaagcttaatgcgagatatctcttacaaaagatttaggacctctttttatatatagatgaatcccatggagaaaaggaaccaagtttgaaataagaaattttttaaaagtaaaattctatgtagaaaaagtgaaacaatagaaattaacaaacaagaattgggttcttttattttttgtcgtcgacatataattttgtttaataactaggataccacgggttaaatattttatttgttttctttatcataaaatagaatttgtcgtttgtaattatttgcgttgattaataattatcgataaagttgtatatactttttactaagtcataattatgatattagcaagcacaccgaaatccctcccgggtgagaaacaagacacaagtaacaaaaagatggaactggacagcgtagagctgcatttcaatgagaaaagatagatcgagatcaaaatcattgaaaactaggaaaattaagcatagctaaaacttattaaacatgacttcaaaattgtttcctgtaacccaactgcataagttttgctacttggcaaacaaaagaatcaatctttaccataagaagtgcatacaatacaaatacagaagaaacaaccaaaacaaatcctttccatcacatacattggcaaaatctaacaagataaacattcgaacgattcattaccgcgtagtcttgttcggtgagatgcctcacgatccaagaattgaatatgaagacaatacttctcgaaataaactgcgtagcgaaaagtccaaatttcattccagaatcaaggaaaaacacactaattagaagcttaatacaacaaagagagtttttcgaaaaagattacaatgaagacaaatctagtttatacttgaaaatgcaaggttgattaacgttgctgtcactactggtacccatttttttttgaaaatgcaaaactcaaaagtccctcgctgggttaacgacgacgattcaattgcacgaatccaataaactttgatcccgaaaggaacatgattcaaacattaagcaatcttatcacaaattcaaaaaccaaaaaaaactttgggtttttagggttttgaatttgcggatttttatcattgggtaagaaaaaaaaaaaaaatgtcagatgtgggatttgaacccacgccctctctcgaagaccagaacttgagtctggcgccttagaccactcggccaacctgacttattgatattgatctgagtttacaactaatagtacacctaaatatgtaatcgtgaccggtaactttttttatttcattattttcacatcatcaatttcatcacaaatacaaaaaaaaaaagcagtatggaaattggtaaaggaaaaaaaaaaaaaggtttaagaagatgaagaattaacttttggctttggctgtaaaaaagattgtctttatgtacaaaagtgtttttggtcacacagtgtctctctttctctctctctattcgtgtaattgatttcctcaaaatctctttgaaggtcgaaggttcttcacatgaaatgaacatggagaacaacacaaccacagtatacctgtttagtctctgatcaggttgattcactgatgagatctcaaacttttgtattaaattaacatcatcgtattccattcaacaccctttggtagtaatcgtattgtcgagttcgccaagcatctaagctgctgctgattagagagagcaccaaagagacgcattgctggttatggcaaaaggaaacagttatgattggaaagataaatccttagaacggtgctgaagttggtagaataaaaggggagtcaagtaatttacctcttcggttaaacttaaatggaacctttttcttagattctgaatggtgcgtggaccacctttgaagcaaggaaaacctgaatcctgattttagaaaaagaaaaaaagccgcaaatgtttcagccaggaaatgattttgttactttatcaactcataatagcgctatcgcttttaagatgcttttgatcagaaagctatcaataagcaaatatcgattcagatcatgatacctgtaacatttcgacgagaagaataatccgttctgcgtgttttcgacatgttaggaatccttgaatgcatagcacctaaaacagttgaccattagaggtacttaatacaagctacaaaaggagaaaaatagagccttataagtgacttggaggagagcaaacgaaagagcctcattgataccttgaaatagtcaaagaactcgcttggaagcccttcagcatcagaatccatgacctagatgtgcaagtattttccattatatagttaaaaagtaattttatctgcttcaaagaagcgagaagatataataagagcatgcttcttacctcaagaagttcccgagttagcttaaatggggcactctcaaagttcacgccaccaggagaatttgaaagcataaagccgaaatcaatgtgtataatgtgaccttcttcatccatcagaaggtttccattatgacggtcttttatctgaacgagaagacaatcaaacaatggatattactagccataaaactaaagcaagccatcaaggaacttatgaacaccatcagagtgtcaaactcgtagattcctttcgttcttgtttcaaagcacatatatgcctatatatattaatacacaatcttgagagacgcagttataaaatacaacctacctgcagaaggtaacagaccaaagaatatccagccatgctctcaacaaaattcctctgaaaaagaagacaatttgaaaaattatacatggtgtcacatctcacacaatttgcaattatagacacaacttctaattgatgcatggagaagactttgatgcaacctatttttcatatgataatccatatttgtataatttatgaaaaccctgctgaataagaggaaattagattagaaatagtataagacatatcaagccctacattcctcattctcagaaaaggctccagtatgaatgaacgaaattgggttctccaacgaatttttgggagagaaaatttaacatatattccacagctctcattagaacaacatcatgtttaacagaaagtttctgaaagaaaacagccaacttgcttgtggacttgagccataaaaccataaaatgtacctgaagagtacattacctgagcaagcttaaaacttggagagttctctttaaacttggcatcaaaaaaatcacgcaggcttgtgatgttagggtatctacttttaatagaatgaatagaagcctgcaggagagaaaggtgatactataacatgcgctttccaagattaaaacaagatcggttgtgggataccgaataaagtagcttaattaccgtatctggaattgtttctataagggcagtgtatgaagatgtcaccaagacttcataaggacgtaaccagaggggaagccctgcttcctggaatatatctagcacatgaacaagactgtttattaactatataaggtagaaatgtgtgtatacacacatattgcttatataagatgacaggataaagaataaaacataacgatataaaaagcgtagcttgaggaaaagaactatgaaattaacagccatatggtagctaaacaaaatatcacctaccaaaaaaatgagatataagttgaaccgcaagatgttcctgccgacagtcatcaccgctcttcacaatgatctgcaaaagccagaaaagaattggaataataggtcaaacaacaaaattaacagtttcttagggttgttttaatatagtgtacagaaattcctagacaacaactttcaatgtcaacaagtataaaccaacttttacattcagcaggaaagaaattaaaaacagaagcttatcaaaagcagatccccacaatgagtttctaaagactcaaagcatatagccatatacaaaggaatgaatgtaaaaacacttcatgtattttcactgttgaaaatttttgaactttaagtagagatacgcaaccatttatctgacaagaagtaccattatgtattttatttattgctacacaagatgttcaagtggagaaatatactctacaaggaaaagccagcggaagataaggaggtttgctttatccagtacttacagagcgcaagtcccaacctggtaggttgccatatattgaatctttacgaattcttagtcgcttcccctcccaaaattcaccagataaggcatcacctgctttcagcatgccaccattggcctggtcagccacacaaaaaaaaggttcaacatctaaaagacagaaaaactaaaggaatatcctttttataaccaacatgcaattaccattggttgtgcatctgatgaatcctgaccagcccctttgagaggaagacctggaggtgcctctcccttcgctgcagcagcctgaacaagggagttgatgtaggaataatgacatcaagcaggacacaggcactttacagttgatttagcttatccaaattaagatgactgtttaggtgaatgatctgtttagtatgttaggagtcacatactcacatactaagtgatgctgaaacgctactcactgagagtcagcgtttttcagtgactcaatggagaaatggaatactagagaaaaaaaacaggacttgccttttacaatttatctatcaagaaacactcacccttacttcctcgtaggcaactatacttgaaacacgacgatgttcctttcgacgtggggttttcggatcagtaatactttccattctaagacctggatcagccgtcagcaccagcctgacccactcaagatcactttccaaaccagtcctcaggacaccagtcacaccactgcttactgatttggtatttgaattactatgcgtctccaccgagagacatgcattcacaagttttacctcagacttatgagtcattgcttgatcaattgcttcaacagttgataatgacattcggtctgcactgttacggtaaacctcctgagcagtagatagcggataagcccatggaggtggcttgtgcaagaatgcatccccgtttgccagtggaatgcctcctttagaaagcttaagggaagtagatgtggttttagcaccactacaaagtttcaaaagacaataagaacaatgagagaggttaccaagaaaccctttaaagtatacttagaaggtaagaaagtaaattctaaaacgaaaagcagtagattaatcgtaatttttgagttttctatttaccagggtgtttctgctttcaaaacttccacacatatcatataaggcaccttttccctagaattcaaaagaacatactcgtcttcaggaatattaacaacacgataaactcctctccccattggaaaacagattcctgaaattatattgaaagtataatcaatatctgatactgaatcagttaccgcaatagaaacatgaacagagtaaaaaatagccgttggaaaatgactccaatgcaaaagggtggtgccaaatgtattgggggcacatggttcactcatgtgtgagacaaaactgaacaagcaaattctaagatatttaagaaaatacctccagtagtttcagcctgagctaaatgggaattgatctctgcaatagactaacaccaaacaaaagaaacatgaaatcttagttaaataaaggataatgctaatatctacgttttaaatatcaatatagaaaggtagggatttaaagaaaacctcacgaagagcggtcttccgatcttcaatgggaaaaatgtctaccaaatcatatgacgtttcacataatgcatgtacaaactctaaagactcgtggtaagaccctttcctgaactgtgctgcagtattgtttggtagagggggctttttagatggagtattattctgcggtttgggtgaacctggacacttctgcaaatgtcagcaaattaatggcagcctgagcaaatccagcaaatataatgaatggcaggcatactaactttttccgcctactaaaatatactgaagtgagagaaatttaacatgacctgagagcagtagcgctcttggcttacgtgccatcatacactaccatcctatgtattaatgtatgagggtaaaccaagcaacacgagcacaacttttcgatagtctaatacataaagctaatatctcatataatatcctagaaagaaaccttaacagatgaagtaatcaggggatatggttgaaagagaaagaaaagagtgtctaaggctctaagcattacaaataaaacctgagataaagttatatggggacaaacctccttatatttctttgagccaaaaagttcagaatcttcaacagacctgtcacgatctctgaacaatttgcggaaaaagttttctgtcccaggactgctttcaacaaaaccgccattgctgcagttttcacttggtaaagtagtttttacgtcttctggatgtctacggaacaatcttctgaacagtgagaattctgaagattcgtcatcctcgctttcattcccatcatcggctttgccaatgtttggtttgtcttcaaacttctctttaaacaattttttgaaaaatccctcccttccgttatcttcaccagatgtttcgtcagtatacacggtttcatctgtctcattcctctcgttaccatttcttttctcatcaaacttttctttgaaaagtttcttaagaaacccatctttttcctcatcatctactgcgttagaaactttatcatcctcattcttgctctcatgaaaaagtttcttgaagaacccttctgtgtttgcatttggctcctcgtcttcatttttactatcccgcaataacttcttgaagaaaccctccgagttggcacccaattcctcttcatctcctttattatctcgtaacaatctcttaaagaatccatctgaactcgatgtcaattcctcttcatctcctttactactccttagcctcttaaagaacccctcggaattgtttgatatctcctcctcttctgacttattgtctttcaaaagtcgcttaaagaaaccctctgagtttgacctttgttcatcatcctcacctctgctgtccctcaagagtctcttgaaaaatccatccttttcacattcctcgtcttctttgtcagctgacttcctaaacaataaagcatctctaactttaggacttgggattagtctcttaaaaatcttattgtcgtccgcagataactgactaccatcatcctgcaagttgctccccgatgtaggtgagaatagtaaagacttctgggtgggtggagataaagtcaaagagaagagcttctgttttgatgacaaaaacttattaaggaccttgctccctggagttgaaggctcgttatgtggccgcataagaggcgaccactcacccaccagagtagctgcaatttggcacttctcttgaatcctactaataccttcattatcatcagaatcctcaagttccgccaacaaaaaccaatgcactttcaatgctatcttaagtgactttgcacagatatctatcacaaacttatcaagtgagggacttggtttgtgcaccatcaagtagcatatctggaacaaataactctcgataccggataaaggaagcgtatacatcctattgcataagtaatctctcacacccgaatgctggtgcttgtacaaataactgactgcaatccactcacagaagaaggaagaatcaaaaaagcggataagccacccattcgaaccggactcgctgatgaggttactgggcgaggtaatctcacgaggagactcaatcgaatcacctcgaaccaatgaaagaaactgtgccatctgcatttttgatgatcagtcttagaataagagattctagctcacagactcaaatcatccgaaccaaagaagtagatcgtgaagcttctctaccgaatccagaccaatttcaaaaacataatcttatactagaccttaatgtcctcgctaaaaacccaaatctcgtatatgctaaaatcaaaattcgaatcccccaatcgagagaaattgggacttcacaattacacgtacatgagcttctccaaatgtcaaagcacagaccaacaggttcctcgtctccttagtcaacaaaaaccggtaatgactgaaaattttccccgagacgaaaataatctcagggagaagaataagagtttagaacccagtgattagcttcttcaaagcaaacccattattcgttgtcactaaaagttgcaagctttagaaatttcaaatgcggagttgaaaatagctgagttcaatcgccgtcgtctccgccgttgtcggaggcttttgatggcaattcaacaaagagagagaaaggaagtaaaactattgttggcagtatttttaaaattaaagtttttttattttaaatttgtcgaatgatgatgggatctaacgtgcgctggaaaaccacgcaagctgaatctttctttgcaatttcgtttggtttttccctccatttattattgtctcgtttcacatggccatttgaattttgaatttaaataccacaccaaaatcttggtagtgacataatggacaactaaacttttcttgattccaaagcatttatgggactacacttcattcaaaaatggcagaaaagatcataaacactaacaagaaggaagatcaggaggaggcttgaccatacgggaagatttagtcggtccatctttcactatgaacactgtgttcattccccatgtggcatgtctctctatatggcaatgcaacaaccacacccctttaataaacaaatcaaaccatgatcgtcaatatctcaaattaggcatcacaaaaattgtattttattctcacgagttgtctaataaattcatatttttcatttaaacaataatatcttttgtataaactaatgcaaaattgatatatattttcacgtgaaacgtttgagaaacgtagagtgtgaactgacctggattattagctacgaatctgacggcggtccaaccgttacgaggaacaccgacggttgtctcctccggtggatcaactaggttatacctcaacggatctttacgacgatcgaaattcccaaaacccgaacccacgacgtagaagttatacccatgcagatgaatcgggtgaatattcgaagcccacacggttgtcccctgtagaatcagctcaacgctcgagttataatcgagaaccacaactttcgtcccgaacctagtcggaaatggaagattctcaccggtgtagttgaatttcgtcggcggatttctcgggaaatcctcctggaaaacgcctccgatgtggcgataataagctcggagaatgtcgaccgatgggttcacgaagctgatgttgttaatgctcgaagagaatctcttaccgaacggaccggtacaaggtctatcgtcggagcaattcatcaagttcacggagatcgcgtagagaagacgagtgttgattttaaccgggacgttaaccggacgctgacttctgaattggttagtgaaccgggtagatgcctcggtacgattgtaaggaggcagatagggtagaatcggtttaatccggtttaaggtatcacctttgtattgtaatatggctgtggtggtggttttgtcaaaaccggcaccaaatgcggaggagtaagctctggccgccacaaagtagtggttaggccgttggttcgcatggaggaggacgtccatagattgtcccggagtgatcattagataatcagatttgaaatgttttaagtagaaaccgtctttggctacaacggttaaggtgtggtttgcgattgcaaagaagagttcttcgtccatcacggcgttgataatccgtagaaggtatcgacggccacgcaccaccgttattttgaatgtttctgttgtggaattataaagaaaaatatgaatttttgattgtaagatttgagcttgtagtgttgaaacttacccggtttagagcaggggtatagataaccgggttgtccgtttatggtatatgagtcagagatggccggttctcctccggttttattagcttttcctggtatatgcattatgttttccttcttccaccattcgcctatcaattgtcaacgtaacgttagactatatatcacaacatgtaacgcaatcatgtactaatctcatccacatactagctagtgtacctagaatgagcgggatttcacgatgaggcttaggaaaaggataagatgagccacgtttggggtagacaatgaaagctccatggacggtggcacgtgcccattggctatgagcatgccaccaaatcgttccctcttcgaccttaagatcgattctatacacatagctctctcctggtcggatcggacattgagtcacatattcgggtccgtccgaccatggattcctgatttgtcttgctccgtgcctaaaacgataaacatgtttctctacatcatataaacattagtcaacacgaaatcaaagtgtgacacaaacacaagagagtagttaccaatggagagtaatgttgtagtttgcattgttgatgacattgacgatgagcttatcaccacggtaggcttttaacgttggtccgggaaattctccgttcaccgtcaatatcttgttggtattacaaagtcgtgtgtacgctttcgactttatctgtatagataaaaacgatggcatagtcagtttttttttaatccagtcttaatatcttcaaaataaaattttgtacaatcaataccttgaaagtgtggtggtgaatctcggcttccgcgatttggaatgcaagaagaacaaagagaaagaagactatagtctgtagagttttaatgattgtatttggaatgttgagcttgaactccatggttgttcttctcactataaaatctcaagcaggatgcaataaattttagtttttttttatatgttgcagatgtttttttctattgtcaaatagttattacatattctttatcaaatgattatattgttaaaaataaagacctaataaggaaggaaatctctgtaacgttttacacgttgagtaagaaatgtattataccatatataataggctacagtaggcattgaatatatcgaatgtataacagggaagcacataaaagtggaataatatctttggaatttaaccgaatggaacccaaccatttttagatgactcggactcgccactaaatttgaattaaaattttacaatgtatccaaaccggattatatggttattttttctccctctccagggtagtctccgctatttaaatttatgttcgacactcaaagattttgatctttaagaattatatgcaaatcttggatattttgcctgattttcagcatggaacgatttttacagtttatgagcattcctcatcacatgcataaagaatttgtcgtaaataactttttttttccttcttataattcttcgatttagagctttgttagatggtctaatggctcattatgattcaataaaacaaaatctagaaatagtcacgggtcaactcaaacaataaaagtgaacaatgtgtgtgacaaaaaacaacaaattaaaaccaagtcttaattaatggaaagacgcatgataagtcttaatggaaattattgaaacatcgactagaaggctgtcgggttttagatacggaacatggccaatgcggtaacgattacaaaggaaaagccagagattgggatcaatgaatttcctttagaagggcttggagctggagcccatcctgatccccatactggagctgtcacacaaacataacaagacaaaagtcaaaaacacaaaaccaattctgacatgcacacctttaaagcagcgaggagagaaatcacacaactaaatgtcaaagtttaacaaaatagagagtttgataaagctcttctcatattacatgatcatggcacattacaatagagatcacatccgcacaagctttaattatcttgtcgcgatggtcacatgatacataaaacggaaaaagactaaattcttattatgaagacaattgacttttacaattccccaacttcgttataacgccaaccaaaactcgattcaagcaaagagtccaaacaaattccatttcccttaacaaaaaataacaatttagatggcatgataaaaagcagattaaagaatgaaatcaacaaaaagaaagacaaataccttgcccattagcagtaggaggactagcaggaggcactgcaaccaaaacaaaacaaaaactctattatgaatccataatctgatttatcttaaggatcataaataatccataaaaaaatcaagaagaaaaacgagaaacagagagataaaggagaaatctaacatgaatcacaagctgacaccggaggagcattaagtttacaagcaacgggaagagtagcagatttagtaacgttgagtttgattcctaaaggtgccttcttcaacccttcgcatagacatatcggtttcgtatcgagaatatttttgagactggagcagcatgaagctgtgggtgtatcggccgtacccccgatcgatataaaaggtaaacatgggaacagggtaatcacaagggtgtcgcagtcggaggctccatgaacataaggagaggaaacagagaggacgaggaggagaagagatgtcgctgtggagaagtaagccatgttttaattctctgtgtttttggttactgatatatcaagaatcgagagagaagaaaatgagagttgtgatagaatgagtgaaatgtgctgtgtttatatatgggtttcaagtgatagagacgacgtcggttttggtgtacacgtcatgtgtaacgcgtaattttttttggttcttttcaatgtaaagatccttgctcatttttatttggattttatcctatattaagagttctttccttcttctttttttctggtcaaaatattttttaaaatctatcatcgagattaacgttgttaccaaaatgattagatttgttagaagaatacaaaagaaaagaaaaaaaaggtagaaaaatgaccatgtaatttcttaaaactctcttcttaaagtagaaggatttgtattcaaactttgctttgctgtaatgtacttatctttgttttttcctgctgtaaccttctgtcaaaattctaaaaatggtataaaacttaccattcataccaagaaaacaaatgccaagattttctttttaactatattgggtttatatgtttaaagactaaatattaaatatagtaatttttattaatgattttgcatacaatgattccagtgggtcagttttccattgtattggagattttaagggattggttcaaacttcaaatgtagaaacctgcttcttgttgttattgaaacttgaaagtaaaacaaaactctttttttatttctttctcaatgtcaaaaaactatgaatgaagaagaatgaaaacaaactaccaaaaaaaaaaaagaaagaatgaaaaaattgatggaacaaaaatagttaaagaatatcatatattttcgatatctttcaagattgaatcaatatcaggagtcaaaactgcatgcttgtacacatctccaaccagacaacagttcttctgctctgtgttaaccaccatcacatcttgtgcaaactcgctcttcaaccctgggcttacctacaacatcccatcacaaatccgagttagacttttactacgattaaaatggtttcactttttctgtatccgaaccaaacccgtaaaaccaaaaacatggattgaacacccctactagatattagctagtattatgcccggtaaaaaccatattgcaggatctatggtcatagaatacttagtaaacggaaaaagaatcactcacatcataaagcacttccccaagtttcatcttgacagcaccacttttgtagactaacagtttgcccatgtaaccttctggcaaggcttttaaatcaacagtcttcttctcaacggggcctttgatatttggccttgtttcaaggttttctgttggtgttgatgccaaaggaacagaaggtagcctcataaaaaacattttctgttctccactatcctcctgccaacaagtgatccacattatgtaactatagagtttgcgtgtgagttttggtttatcgaatttttatatgtaatgtcactaaccattagaccgagattagcggctgtgttaagtgaatcttcatgatgtcctccagcctgcataaactcctccacgtcaagaacctctgcaataatgagcagcatcttaaacataggcaaatggtaatcaagaatctgctttcacaaaattgttttatttttcttctcaagcaaatatatgaatacctggatctcctgcatacggtctcctcattggaagtgtgatagggtaatagctgtagtaatcctgtgagacaatccaagaattaattatgcatcaacattatcgatatatgagttcgagatataactttagggacagggtactgttataccgacccatggttctttatactctatctcctgagtagaggttgatccataagcaccatctgcacaacaaccagcatgtatcaacacccccgcagaattatcaaaaacttgtgatgtgttgtgaatacaattgcctatgtttttttttgttaaaatatataattgcctatgttttaaacaaagaaaagaaattgttacttgatctattgaggtacttatttgatctggttgaattcaccactccccccaaccaagcaacttgagaagcaggaactgtatgatacataacaaaaactaaatcagtgatgtatcaaagtgatgtttttttttacaactagataacgtagcagcaaacagagtaaagatacgagtctgagtttcaagttaaagacactacctttcttgtccgcttttggcttgcgcaatgatctttcctaaggcaaacaaaaatcaaaattaaagagaactgagtaagtaagaagacacaagagcaaagacaatttcactcaacgattaaaaaaaaaaagcttacattaactctgcgtagcaattccgatgcttgtgcactgttactattatcctcaaccacttcactgcattcataattcaaaagtttcagaagaaaaacatctgtttatgttaatcagatcagtcattagtgttgcttacggtttaacttcaggttttggcacacgtttgggtggagcttttggggcaaacttcatctgcagaagaacgcaaaatcgaaaatttagcagagccaaatattttatctaacatgagaagttaacgatgatagcaaacacaaaccttccgtactggtggtttctgctccattgcaattgaattcaaacacttcgactaaataaaaagaaccccagaagaatatttagttacgattattcaagtattcggttaatattttgaaacgaaaaattcacagaattaagaatcagaagctgacctgtgactccaagttcaatgacggccaacagcttgagaaggaggatgatcaccaattaaggagagaacccataaattagggcctgtgccaaaacggcggcgttttagtctaaccatggtaaaaaagtaaaccggtaaattaaaggaaacagacatagtaattccaaacgttaagcgcgctttttaaggcccatttttcagcccattaatacggcccaatttgtaaacgtcggcgagaattcatgctttcgtcttatttcccctcgacggcgattctcaccgcctggaaataaacaaatcgtcgttgttctcgtctaacgcttgtgcaatggcagatagttcgtcgaggaggaaccttaaacgatccttcttagaagatgaagattccgataaacaacctccgtaagtttacaatcttttccgaaaaccctaatttccaattttgttctgctaagcatgacgatacgtgtttcttcttttcgtttccggttgattgactcagttttagggtaggaaaaattgaattagtagctcttgtttcttccatctgattctctcttctcctcaattttgttagacttagacattgaacctgaaattgaatgccaaacatatgattgtcttgaacttggagtattaatcagctttgaaatttgtctcagttacaacttgagtttgtgtgcatacgctataatgtggattctaatggaggattctctctggcagcgaaaagcgagtacggtttccaaaggggaagaagtcgaaacctgaacagctcttagaggaagaagctttagcccgccgcaaagcccgtgatgctgctaaggagcgtgcaaagattcgcaatcagaatactactaagctctttatcgaagatgacagtgatgatattaatcaggctcaggagacttatgaggtaggatttctactatcctctttttgtttgttgactgttcctggaagctaattgtgtatattgcgagatctcaatgatgtttgtttgcaaaaagagttatgctgatgtgatttatttcattgtaggatgatggcaatcgcacagaagatgggatccagattgaagcttttagtctggacagagagaaagaagaaggttactttgatgctgatgggaactttgtagaatatgttagagaaaaggaagtcaaggtacacatctttcattgtaaagcttagctccaagatatcttgtgtattgtctttcattatatgtgttttctttcaggatgcatggcttgacagtattgaaaaaaatccaatgtatatgggacgatctgctgcaaatgatactgagatggatgatgatagtgggaacgaaaaagcaggggatgacctttctcaagatgaaatcggagttagaaagaggcgcattgctaatgtccttgaaccaggagaaacggtgagactcattctgcgttttaacaagtttttgtttcaaacatgaaacatggattgtattagttaaaaatgtcaccttaatatagcattgttgattatacatacttcgaacacgtaaaataaatcggtttcatgttacaggtcttgcgagctttaaggaggttgaaagggaattcgaataatcgcaaggagaagatgacatctgagaccaagcttatctttgatcagcttactgaggatgcggacaagcttatcgagaacggcgactacagtaagtctctaataacttatgctacttcaacaacaaatatgatgtcctccatttgttaatatatgtgttcctctttttatgtattgaagatgtttatcatgaggagcaagaagttttccaacgtgaagcaggttagagattctaatactttttcaatatcagctgtagatgtagctacgtttcctctgctttgtgatatcaccttttcacaacattcgggaacaattggcttgacttttcacattcttcttctctatgttggtcttttagaaggatatgagagactagctcaagcgaaagaaaatgggactgccaatatagtatcttgtgatatgtttggcgatgatgagaatgctcctgaaccttcctctgatctacaaccgtctagctccatctcgggcactcagcttaattctgattatgtgtttgatgaatcttcagggtatgtttgtatatactctcctctcgcgctctcttgttgcataagtcagctttttgtccgaagtattgtgttgctagcaatattcattatgaatctcaattttatttatctaaaagtattctataaatggttttgcaggtactactacagcagcagccttggttactattatgacccgaacactggactttactgctacgcaacaaccggaaaatggtaaaatttacttgggatgagtttagaattttgaaaacccattactaatctctttattcatgtgttcataatttcgattatcagctcaattctggttatgtgtttgattacaaaatatgcgtgcaggtacaggtacgatgaagagactaaggaatataaagaggtggtttctgaagttgctactgaagaagtttaattttcgtttgtctgtacttttgactaacacagggtcttgaaatatttcccttgttgtttttagtttgaaagtaagcacatcatacatgagtttatataaatatatttggatttattggttttctcattgatttatgagaaattatagagatgaaagtaaatttggacaatcttataattgtatgaacaaaattagctgtgaagaaagaaaacgaaattatgaaacagagcctgagaggttatcgtaatcctcacacactctcacagtatgaagcaagaaagtctcaaaccaaacgttgaccaataacacaatctaaccggttcagacttccggtacagaacatgtcacgtttgtatcagaccggttcagcagcgaactggtaaagcagagattgagaacatcggcatgaatcggcagtgaagaaacaagacttctcgtcgaaaaatctttatttgctcctgagaacttttgatcggatgcgaaactctagttctacgattcttctcgtttgatcgaccctgcgaaactttcggaggttactttagctttgattgcaatctaagagttctgaaaatggcggaggaaagcagtatggaaggttctgaaaaagaagagatcgatagctcaggtggtggttttggagatatggcatccatggattctatcgagtctcgatgggttattcaagacgatgatgattccgagatcggcgttgacgatgataatgatggattcgacggtactggactcgaatccgatgaggacgagatacctgagcatcgcctgatccgtactggtccacgtgttgattccttcgacgtggaagcgcttgaagttcctggtgctccgagaaatgattacgaggtgattgatagtttcgtgtattagtgcatttcatatcaacatatatagtgatggactagcatgatgtgtgtcttcttaggttcttaaacagtacagtcactttttagctgtttttgccagagctcggatatcaactagaaagggccactgaatagggaagtaccataagagatcaagtcaaaattagtttagcaatatgtggaaattatggattaggaacaggaatcaggaatgctttgtgactagctagtgtgcgattcttccaagttgcagtgatggagatgggctcataaatctattttgtttgggatgttgttttgatctgttttccttaatgatggttgtgtcctgggatggaaacctgcaagggatgcacggtctgagagcagtggatatttgttttctgattctaaagcgtaactacggctactactttttgcaagttctgcagataaataatgatggatgatcttagatctaagatctatgacttgtatctgtgagccagtacttttctctgcatagttaaccaaacttttttttttgtgtttttactttgctaggacttgaccgttgggaggaaagtgttgcttgcatttcaaacattaggggttgtctttggagatgtaggaaccagcccgttgtatacgttcagtgtaatgttcagtaaatcacctgtccaagaaaaagaagatgttattggagcactgtcactagttttatacactttacttttggtcccccttattaaatatgttcttgttgttctatgggcaaatgatgatggtgaaggtacgctttaagctattctgatcttctaaatataatcttgctttgaatcttttctgtacatacagtgccaactgctttgattacttatgatattcaggggggacctttgcgttatactcattaatctctcgtcatgccaagattagtcttatcccaaaccaacttcgctcagacacccgaatttcaagttttagactgaaggtgccttgccctgagcttgagagatcattgaaactaaaagaaaaactcgagaattcattaattctgaagaaaattctcctcgtgctagttcttgctggaacttccatggtgattgccgatggggttgtaactcctgcaatgtcaggttcttatataacctcttctaagtatgttcataggcatgattttgttttattgcacagggggtttctactaccatatggacttatccgacttacttgattatattgcagtaatgtcagctgttggtggacttaaggtcggagttgatgtagttgagcaaggtaatgcagatgatagtgtaattaaatttgaatttttttggtattggctttttatctttttcattgtatcttttgctattgttcagctttctcttctttcttctttgcagatcaagtggtgatgatttcagttgcatttctggtgatcctctttagtctacaaaaatatgggacgagtaagatgggactagtagtaggtcctgccttacttatatggttctgttctcttgctggtattggaatttacaacctgatcaaatacgatagcagtgtttacagagcattcaaccctgtccacatctattacttcttcaagaggaattctataaatgcgtggtatgcacttggaggttgcattctctgtgctacaggtaatttttcacttttgctggatggcttaaatttcattagaaattaattagattactcttgtagcaatggctaactgaactaagtaagcctttttatgctcaataatccgcctaatattgtgacactttctttgttgattgttcatgttatataatctttatctttcaggctcagaggcattatttgcagacctttgctacttttctgttagatcagtccaggtaaatgaagagtagaaagcctttggcggctgatgttttatctttttctttttgtatgctactttttgccactaattttctgcaactttaatttatttcgtagtggttttctgcagcttacatttgtgtgtcttgtcctgccgtgcctcatgttgggttatatgggacaagctgcatacctgatggagaatcatgcggatgctagtcaagctttcttttcatctgttccaggtaaagttcagctgcttccttcaatcagtaatatacatgcctctttggcaaatgaaaccactttgatttccctgcaaaggctgttcttgtggtgtggattagaaacttgtatttcaaattagtattaagttattgattcatcattccgttctgtaggctctgcattctggccagtccttttcatagccaacattgcagctctgattgccagtcgcacaatgacgactgcaacattttcatgtattaaacagtcaacagctctgggttgtttccctcgtctcaaaattattcacacttctcgaaaatttatgggccagatttatatacctgtcctaaactggttcctgcttgccgtttgcctggtcgtcgtctgctcaatctcaagtatcgatgagattggaaatgcatatggtaatagttgttttctatgcttccctgtctagcttcggtgatccgatatgcttcccccgttttgattttctttttcgatttcccagggatggctgagctaggagtgatgatgacaactacaattctagtgacgttaatcatgcttcttatatggcagataaacatcgtaatcgtgattgcctttctggtagtttttctcggagtggaattagtctttttctcatcagtcatagcgagtgttggggatggaagctggataatattggtctttgccgtaatcatgtttggtataatgtatatttggaactatggaagtaagctcaggtatgaaacagaagtcgaacaaaagctgtcaatggatttaatgagagaacttgggtgcaacctgggaacgataagagctcctggtatcggtttgctgtacaatgagttagtgaagggagtaccggcaatatttggccattttctgactacacttcctgcaatccattccatggtcattttcgtctgcataaaatatgtcccggttccagttgtaccacagaatgagaggttcctcttcagacgtgtctgcaccaaaagctatcacttattccgttgcattgccaggttggtctgtttttccctttcagtgatcaaattttcatggttcatatatgattgattagacttaacgtagagattcttactcaagtctgtagatctgatatttccttctctctttttgtattatataagaagtacgtcttagagccactgtttagcacacaagaacatattatctccttcattctgttccatttcgttgctgaacaaatcgaatataaacactctttgtgttatatgtggtgtaggtatggttataaagacgcaagaaaggagacccaccaagcatttgagcagctactgatcgagagcctcgagaaattcatccgaagggaagcacaagaacgttccttggagagcgacgggaacgatgattcagactcagaggaagatttcccaggttctagagtcgtaattggccccaacggaagcatgtactcgatgggggttccccttctctctgagtacagagacttaaacaaaccgatcatggaaatgaacacttcatctgatcacacaaaccaccatccctttgacacatcatctgactcctctgtatctgaagctgagcaaagcctggagagagagttatcgttcatacacaaagcgaaagaatcaggggtggtgtatcttctcgggcatggcgatataagagcaagaaaagattcatggttcatcaagaagttagtcataaactacttctacacattcctgaggaaaaactgcaggagagggatcgcaaatttgagtgtgcctcagtcgcatctgatgcaggtcggtatgacatacatggtctgagtatcttctttcttcttttaaacgtagtttctattcgtgtccatagatctaaatttgtatgttgcgttgatgttcttgcattgttgtgaagaatccgagtatttgactactccaatctatagagcatctagtagaggaaaaagctgcctatgttgatttcaggaattttcatggttccccgaatcttacatctttacttccatagaatctcgtttttgcgctatgaattaggaatctgtgattatgataacggagtctgaagcctagactcgaaaccacaagaagagaatggctagtcccccactgccgtttctcatgaaagtgctaatgtttatatattacaatgatgatgatgattgatattcacttagcttcatcaatgatggatctgatagacttattagatctccaccaagatctgagaatctccactgccagatccgccgccgcgggaaagagagggaaaagacatttgacatcaatcttgaattagaaaaaagtttaaataattaaattcaaggaaatggacttgattgcccaagaaaaaagacttgatgggccagacaaatctgacatgtatacgtgtcggaggtttattggtggttacgtggtccaaatcagtgtttaaaaacaaagcgatttacttcggttctcttcctcggtctcgcttcaataaaaaaaggaaaaaaaaaatcggtatcgttttcacacctggatatagcccgaaacgaaggaaacaagattataagcttctcagttcatgcatactcagatcggttagggttcgttgattctctttttgattacgaaagcttaagatctcttttggtggatttttgggtttatccatctatggtggatcgcagatcttttggctctataactcctcctctccaattaggtctctttctcttccttctccactgtttatttccctccgttgtttggttcctttgctagcttgaaattacgtttattttgccatatttttgagtttttcttgctgcgacatttggtaggcgaatgaatctattcattagacaggaacttagctcacttcttttttttcttactggtgttgttccacatgtttgtccgaatttattttttgtctgcttgatctgaaattgcgacgaaataatgtatttatgctcttgaaatttctgctttaaggctgaattgctctgtttcattgggaatgttcatattttgttagtggtagcgtaatagtgttatcggaagattttgtacccagattcaaaaaagtgttaagtactgatacatgttttacttctatgagtttgcagatatggaacagttgctgtcagaagcccaacacaggtggcttaggcctactgagatttgtgaaattcttcagaactatcacaagtttcatatagcatcagagtctcccacccgacccgccagtatgtttgtgtctgagttccttcgttttttttgttgcaatttatatcttataaagttattcggtggatgaatggtcactttctcttccatttttgaaaactactaggattaggatgaattttatttatgcatagcagtcaaaaattttgcatatataaagttccacatgtactgacttcaaattatacttgcactgctctaattcatcctattttttgtttcgaagaagaagtatactttttgttagatcgcttgttagtgacaacaatcttcacttttcatatattttttccctgtaaactgacattatctccccacccttataggtggttcactttttctttttgataggaaggtactgagatattttaggaaagacggacataactggaggaagaagaaagatggtaaaaccataagagaagctcatgagaagctcaaggttataattttctttagtgtctcctaaatagtttagtgttttccaatcatggaacctgttaattggttctacttccggatttgtaataaactagttgataacgtagtgtatctaaatttttgagagtaacattatataggtaggaagcatagatgtgctacattgttactatgcacatggggaagccaacgagaatttccagagacgttgctactggatgcttgaacagtgagtctgagtttgtgcatatttcagtgttttgttgttctctgtgtatactgaccttctagcttggacggaaaaaaatagtgtttatgatcataactttgaaggtactattatagaaaagcctcatctcattgggttttagtcgctactttgtctttgttttcctttggatatctgaggccttcgtgggttaggtgtggaacatggaaatagtgaacattggaattttctttagtgtctcctaaatagtttagtgtctcccttgtacgagttgactttgctttttgagtctgttttcacttttgttcttatatactttgttttatgctgtattgttacagacatttgatgcatatcgtttttgtgcactacttgcaggttaaggtatagctcgtcctgtctgtgatattactccatcatttaacattaaaattatcttttgtagtgtagttttctactgataagtgttcttaagtttattttatattgtaaattatacagggtaaccggaccagtataggaatgaaagaaaacaattcaaattctgtaaatggcacagcttcagtgaatattgattcaacagcaagcccaactagcacattgtcatcattatgtgaagatgctgataccggtatttctttctctattattttgtatgtttggtactttggtaacttttgtttataatatagttctttccatggaagaatcatcgattttcatcctactttgtgaggtgtgatgatttacatatcatcacatgctcttggctctgtgtgtaattttcaacaccaccttatatcagttttggtgcaggggatagtcaacaagcaagttccgtcttacgaccatctcctgaacctcaaactggtacttctcaaataagggagaagcaggaagttagcatattaaattcttactgttagagctctgttttgggtactcacctctctttctggtttcctgtctgcatttttgttaagaaggcctttgttttcctgtctaggaaatcgctatggttggacacctgctcctggcatgcgtaatgtttcacaggttcatgggaacagagtcagagaaagtgattcccagagattagttgatgtcagagctttggataccgttgggaattcgctgacaagatttcatgatcagccttattgtaataatttgttgactcagatgcagccttctaatactgactcaatgctggtggaagaaaattcagaaaaaggtgggcggttaaaggcagagcatatcagaaatcctcttcaaactcaatttaattggcaggtagtgtactgtgtacgcatgctttttgtaattatttatgaaagagcaatgcatagatattattagtgaaagtatagaaaaaaatgtccatggatgttaagaattatacaaaagagagagatgtgttgtgaagaaaaagcttagaaatgtgtgacgatgtcatagcatagcaaactttggagctaaattagatttatgtatgttttacatgcctttatcagcaattttctcagggttgatatttctgtcattgacgcattgttaagctagttggttgaagttgaatttatctgtcggtaattactctgaaaaggtgcattcgatgccttaatcagttttaccttgacctcagataagaagatgaaaaacatctaatacctacttttgttatatggctccttcccctctatagattgtaaagttctttatttaagctcgcattattattatcaggaagatttgttttgaagtgctctgatttcgaaatacttatctatgtaggatgacactgatctggcgttatttgagcaaagtgcacaagataattttgagacattttccagtctccttggcagtgaaaatctgcaaccttttggaattagttatcaagctcctccttcaaatatggactctgaatatatgcctgtaatgaaaatattgcgaagaagcgaagatagtttgaaaaaagtcgatagtttttctaagtgggctattaaagaacttggggagatggaggatttgcagatgcagtcttcacgtggagatattgcatggaccactgttgaatgtgaaactgcagcagctgggatctccttgagcccttctctctctgaggatcagcgtttcaccatagttgatttttggccaaaaagtgcaaagacagacgcagaagttgaggtaatttcactgtacatatttggaaaaattgattggtgatgtaccattctattaagatggttaagtttgtttatccattttccagtttccaaataatttttgtggttaagactttgaagcaattgcaaaatatttcgtgctatatttttagctgggtgctggggtttaaagtcccttattgatgttcatgcagcagtttcattttgatgatcctgctttctcattatttttattagtaatgctttttccgttttgctgatttcgctctctgttttggttgttttgttgtggtgactaatttcttttttatgtatcactctatttgcaggtcatggttattgggacatttctacttagtccgcaagaagtaactaaatataattggtcatgcatgtttggtgaagtggaagttcctgctgagattttagtagatggtgttctttgctgtcatgctccaccgcatacagctggtcacgtccccttttatgttacatgttccaacagatttgcttgcagtgaagtacgagaatttgatttcctttctggttctacccaaaaaatcaatgctacagatgtttatggtacctatacaaatgaagcatcacttcagttgcggtttgagaagatgcttgctcacagggattttgttcacgaacaccatatattcgaagatgttggggacaaacgaagacaaatcagtaaaattatgttgctaaaggaggagaaagagtatctccttccagggacatatcagagagactcaaccaaacaagaaccaaaaggacagctttttagggaactgtttgaagaagaactatatatatggctcatacataaagtgactgaagagggtaaaggtccaaacatattggatgaagatggacagggtattttacactttgttgcagcgcttgggtatgactgggccattaaaccggtgttagcagcaggagttaacattaacttccgtgatgccaatggctggtctgcccttcattgggctgcgtttagtggcaggtatggacctctatctcacatatcttcaatttcctttaatcataatattattatttgagattttgcatttcgtttaagatgctcacattgatgatgctttaactctattatttggtcaacattgccatatcaaactaactccttttcctgttaactatagggaggaaactgtcgctgtgcttgtctctctaggtgctgatgctggggcattaacggatccatctccagagcttccattgggtaaaacagcagctgatttggcttacgcaaatggacacaggggaatttcgggatttcttgcagagtcttccttaactagttatcttgaaaagctaacagtggactcaaaggaaaatagccctgccaactcttgtggagaaaaagctgttcaaacagtctctgagcgaaccgctgctcctatgacctatggcgatgtaccagagaaactttccttgaaggattcacttactgctgtccgtaatgctacgcaagcggctgatcgtctccatcaagtattcaggatgcaatcattccaacggaaacagctgtgtgatattggcgatgatgaaaagattgatatctccgaccagttagctgtttcttttgcagcttctaaaactaagaatccaggacagggtgatgtctctcttagttgtgctgctacccatatccagaagaaatatcgtggttggaagaagagaaaagagtttcttttaatccgacaaagaatcgttaaaattcaggtttgcctttcattgagtttttttttctcccccttatttctttgcataagtcttttgtctggtttctcattgctggaatcatattacatttacctttaggctcatgtgagaggacatcaggtccggaaacaataccgaacagtcatctggtctgtgggattactcgagaaaatcattttgcgttggagacgcaaaggtaatggtttgagagggtttaaacgcaatgcagtcgccaaaaccgtggaaccggaaccgcctgtatcagctatatgtcctaggatcccacaggaagatgagtatgattatcttaaagagggaagaaaacaaacagaggaaaggctacagaaggctctgactcgtgttaagtcgatggttcaatacccagaagcacgggatcaataccgtagactcctaacggttgttgagggcttccgtgaaaatgaggtacccaagacccataacataatcagttaatcatattttgttgagcattcttgtgataaattgttgttgcaggcttcatcaagtgcatctataaacaataaagaagaagaagcagtcaactgtgaagaagacgattttattgacattgagtctcttttgaacgatgacacattgatgatgtctatttctccttgattttactttctgactcgtattcatttttccttcttttactttctaactttatttcttctctgtaaataccatagttgatatttaccgcttaatttattacttggattgaaatagaattattcactattttctttcgtcttaacaatatataacttttttatttgttcatttggcttttctctgctaatattatatagccaagtgttggattactctgattcatatttgtatccgtattgaatattcttctctttattagctgttttctgcaatttatacatcatatttgttttggtcaaactcatacatcagtcatattgttatagtttaaatttgaatggtagtatgatattgagctaacttttaaaggttataaatccgggtcgacatgccattttatctaccaaatttggattggtaaaccattaaagctataaaaaaaacttaacttggattttcctataatctgaagataaaattggattgacgggcaaggctacagaaaatggaaacttaacaataaattatagcagtatatattttaattttttcattattatattgaggtttttagtggcttgactagcttaaaatctatttttccacgagtggaaaagttcattaagagaagaaatggccaacaaaagaaattataaacctaaatcaatttgtacaagcttattaaaaaaaattgaaacgagtaattctaataaataaaggaattaaaattaaaatttccatttttcttaatttaatttttttttttaatttctttatcgatttcgtaaagacaattattaatcaatcaaaaagagaagattcgccttgggcagacggacttgagttcacggctggccaagtcatcactcgtaattaaaagggtttagacacagtgcgcacgatagcatctgtgtttgcttcttccaaatctctctcctatttttctttccccttttctctcttaaaccctcctaaaacccttgtctctctctctctctctctctctttctcgtgagatcgcgttatgtcgaatacgctttctttgattcaaagcaatgcctcgaatcccaaagtttgggtagtgatcggcgtgacggtggccgggatcgtgattctggcggagacccggaagcggcggattagagcccttagagaagaagactttggtgctttcttagatcgtttcgagcttcttcctttccctccgcctcctcctcctgctgctaaacaatctctctctggtcttaccttctccatctccgacgcgtatgtatctctctctctctctctctctctctctctcttaaaaatcataacctattttcaaatttgttttttcctgctttatataatgatctcgcttataaagttcaaaacttttgtttggtttaattgagattttgacttgcttagacgaagtcatgttgcaatgaaatgaataaagttatatcggggttaatggtttgacaggttcgatgttaaggattatatcacaggatttggttgtccacaatggaagaagactcatgaggctgctgagaaaactgctgtggttgtcacgacgctcttgaaaaatggagctacttgtgttggcaagactataatggatgagctgggttttgggtatctctccactcctaccattctgcatatgaaatgacctttcggtagttggtttgaagaaagtttgtgttttgaatgtgattttacaggattattggagaaaacaagcactatggaactcctattaatccattgatgccagataatgttcctggaggatgttccagtggctcagcagtttctgttggggctgaactcgttgacttttcacttggtattgttaatctcttcgttttctcttggtaatgtgtttcttggattacgtttggttctttatgctaatcaaaagatgcttgatttgcagggattgataccactggtggtgttagagtcccagcagccttttgtggtattcttggttttcgaccatctcaggggactgtttcttcagttggagttttgcccaattctcagagcctagagactgttggtacgttacattcccctcccttttagtgtttttagtgtagtttcaatggtacatgctactctaggtgtttgccttcctgattattgaactcattgattcgttctgtaggatggtttgcctctgatccatccgttttgtgtcaagttggacatgccttactaaatctgagtgcagtaacacatagaaggcaaagatctttaatctttgctgatgatttattcgagctctctgacattcctaagcaaaagtcggtgcaagttgtcagaaaggcaatcgagaatctatctggctgtaagtttgcagctgtattgtttccttctctttgcccttctccagattcatatcttatgtctcttgaccactggctcatgcagacaagactccaaaacatgttaacgttggccaatatgtcgcttcaaatgtaccaagtcttgcggaattctgtgagcaatctgggaaatcccaaaattcagcatcaactttaagggctctttcatctgtgatgttggctatacaaaggtatttaagaagctcacacttcttgaaattttcactgcatcaatacttttttctctctctcgttccttttaaacgggtgcaataaaagattgttgttattccctctttgctggaggttactattttcttcttaagttgtattatatgcaaatatcgaagaagaaaggattttctttttaccaggcatgagttcaaaacaaatcatgaagaatggtggcaaacatgcaaatcgtttctagggccaagattttccaatgatgttgttacagctctgaagagcaaaaacgagagcattaaatccctctacagagtgaaaaatgagatgcgggccaccattcaaagccttttaaaggtaaactcgatttttggaaatttaaaattttcacagccattagtgtcttgaggacattttgccaccaaaacactgaagtctgaagagattgaattattaactttcatttttgcggcttctttttagttctatggtattatgattaaccatagatcggtatcttattactaggaagatggaattctggtaatccccacagttgctgatccccctccaaggcttaacacaaagagaaataaatctttgaatgagtttcttgatcgtacttatgcactctcctgcattgcaagcatgtctggatgttgtcaggtatatttccatctcctctttctcattcaatggttggggaacattcttgttgccttttccttactcttcagtctttagtcatgacacaaatatatacatattcttcaggttacaattcctttaggggaacatggtgatcgtccaatatccgtgtcgcttcttacttactatggaggtgataagttccttctcgatacaactctcgatgtatatgcatcccttcaagaccaagccaaacttgcatccaacttagctccagtgtctgacaccaatggtaacatggaggcttctgaagttatgaaagaaaaggtaaaactatctctttgagtttgacaaatagtatatttggttctgatccatgatatgctactggagttggaatgttctcaaagttaacagtggataaaatgtaattccagggcaatgctgcatacaaggggaaacaatggaataaggcggtaaacttttatacagaagctataaaattgaatggagcaaatgctacttattattgcaatagagctgcagctttcttggaactttgctggtaattgttctcttcatatctttcattctgatctgaatataatttattatgattttctgatctgagagtttgtttatagcttccaacaagccgaacaagattgtaccaaggccatgttgatcgataagaaggtgaaaacttgattagctgccttatttctccatccctcgtagtttgttttgttacattgtgtttttaacatggttttgtgtttaagtacacttgagctggaacaaaactattcactttttatttatttgatttgcggcgtaatacctttgtactatgactatctagtttcattatcactcagatcactcactatagacacaatgacgcattatttggaagctttgattcttataatagttatttgtttctacagaatgtgaaggcatatttgagacgagggactgctagagaatcacttgtacggtacaaggaagctgctgcaggtatgatgattaaactactctgagattgtaattttatcacattggagaaacttgttaaaagataaaattcatctagctatccagatgagttactctctctagtagggtattggagcgtaacattatggttgatcatctctgcagatttcaggcacgcattggtccttgaaccacagaacaagacggcaaaggttgctgagaagagactccgaaaacacatatgagttaaaaaggattattactcgatttctcttgttcaccaatctatcttttcacttatctaaaaccctaaaaaggaaaggttttgctccggtttcaacagactaataatttagtggttttgtgacatgtgtacagattgggatgaaaacttctacctctaattacttgatctgaaaagttttatggggtccttttagcttctttgttttcttaacggtcttttacgtaaattacaatttcccccaagtccaatactgtaattccttaaattacacggagggacccataaatgacacgtttacaatcaatttctcgacaaataactgaattcgttgtttgtttttttcctcttcgtcatcgtcacgcctccgtatcttctcctctgtttcatttttgaattattcgaatcaaaaatgtttgatcatatgaaactgctgcgatgcttcagcttcacggcgtcgcgagattggttattccggcaatcattcgcaaacgccggtctacgttccgtaacgacagatctctcccacggcaattcaatcgcatcaacagctatgcattgttggattcctaaatccccgaatcgatctaaacctaatctcctcctcctccacggattcggcgccaacgcaatgtggcaatacggagaacatctccgagctttcaccggccgattcaacgtctacgttcccgatctcctcttcttcgggttatcatccacatcggaaccaaaccgaaccgaatctttccaggctcggtgtctgatgaggttaatggaagcgcacggagtccagaggatgaacatcgtcgggattagttacggtggattcgttgggtatagtttagcggcgcagtttccggagaacgttgagaagcttgtgctgtgctgcgcaggggtttgtttggaggagaaagatatggaggacggattgtttaaggtgccgaatctagaagaagctaccggaattttgattcctcagacgccggaaaagcttaaggaactcataagattctctttcgttaaaccaatcaaaggtgttccttcgttttttctctgggattttatcgatgtaagttttttcctttataataatgtctttgtttgtttgtttgttgataaatgttggagttttgagaaatgttgttcaaaatgttgaaaaggtaatgtgtacggagtttgtagaggagaagagagatttgatcaaatcaatactcaaagataggagactttctgatcttcctaggatcaaacaggtacaaacctttattcggattttaatttgcttatgtaaatttcgcagttcctataacattgtgtgtatgtgtgtgtttattggttgaattagaaatcgttgatcatatggggagaagaagatcaaatatttccactggaactaggttacagattaaaaaggtaaacaacaacatgtatattaactatagagattaccctctgtatttttttatgtgtttataataattgtatggtgaaacagacatataggagagagtgcagagatagtggtgatcaagaaagcaggacatgctgtgaatttggagaagtccaaggaatttgtcaagcatttgaaatcttttctcattgactctttgtgaattactttttcctataatatcaaccatttttatttttacactattcttcaatatataggtgatctttctttcttgtctaaaagcttaaaacatcaactgtctattaggaaattatgttagctgttagatcacaaatacgattattttatccacgccagatagaacttgacaactgcagagcctgagttatacaatctacaacaaaaatatccaataaggcaataacaattaaaaggcctattttagctggcctttgttttgattggtgggctttgataaaggaagttagaatattgaaaacaaaaaaaaaaaattgagtttaaataaaattatatacagttctttgcatggtccaattttatgtggctcccctatcgactatcgtctaaatttgttgtacaatgtgaaggtcgaattatatatattgagaagattccaataatatggacttccgatacatgacaagagaactgggaccaatctgtgtatataagagagattggtttagtcaacatgagaagttggtcggtcggtcggtcggtcggtcggcggcaatacaaggctaacatatacacctcacaatattttattgattagttaagccaaacttatccttaacttataatgattgaatcgttaggaattttattttgttaaaagaagagatgtattttactaattaatgttgtgacttacctaatctacttagtggcacttctattctatacgagctgtggattattgccttttcttatcaatttttggctcatccgttggtgatattattatgtaactaagaaaatatatagggtttagttgaaagtggtatatattggctgcttctgcggactaataattattgaagcgtttgataaaagtgccggcactcgtcgaatgtagacaaatacttggtgacgtttttacattaatgttcaaaggacaacaaaattcaattcaagacactgacctttaattttcggccttacctatatacttcgttgattatatatgcagtaaacaaccatatgttagtcattcgacgactcatttatttgcaaaagcaacaaatgataaaatcgtaaataaattattttattaattatatgattttttttataagaatttcaattctgcacgtaataatatagcatgttagtttacaatatgtatcccgttgcttgtttaatttacagtttaccatgacgtgtttttttgtcaaattatatccccatatatccatctaacaaaatgacttttaatttgtataggacttactagcaatgttggacttacattgctttcgctagtctttttcagcatctctagtcaatagaaaagtttaattattgtagctgttgaaccaatgtcgttatcaatttataagtgtggtggtggtcgtcaattgccataatggtcatttcacttaaactataatgattttgatttttggtgtttgtattttttttaacgtttacatgtattgaattaaatatttaaattataatatataggattttagttaaatttattcaataattcttataagcaaacggaaaacaaaaacacaatttatttatgttgagatattcttattcatgtttgaaaattattttaccaaaagaatgaaactcgtacatataaattttaacgtgaaacatattttcaaagcctttcaacataatttgatcaagacactcaatcatgcttttattcttgtttcaattcgtaatcgtatatatatgctccaacttttacattctttgaccaagaattaaaaaagtttagaggaaaaaggagaaagaaaatggtagaagtgggcatgcatgcaacgttttgcccataatactgttacgtctaccctcaaagtcaaaagttaagatatggaggggaatgggtttttagccttttatacgacttcgctagctaactttaattgacttcgccgacatacatatacatcatatattcatatatatggtcccatttcataacttcatacaagtagttatacattcaatcatatattaactgttaagtatatataacacactaattatatatacttaaaacaatttgaaaaatatattttgtacgtttacccgattatatcgaacattagacatcatttggttattttatttatgcgactaggtcttcatatataatgcttagaaattagaataacgttatgttttggtttctgtattagtttttaattattttaaaaattaagtccaatgttctcgatgaattctatttttgtacgcttccaattagatagcaactacaattaatgggttagtaggttaggtcatatgtagcttccgattgatttttgttttctccatcctttgaggtgggtcatatatgtacacacggtacccatataatttgctcgtgcattatgcataattgatcgtttcaagtttcacgtataatttgtcgctttcacgagacaccatcgaaacataagtgtgtcacatttcatgccagcgaagcgttgcatggcgttgatattatcacatattttcgccgccttctgaataatttgtagccctacgaatcacattggcaactacatatacctatccagacgcacgctcacaccaaaaacacattaattgttatgacgatgaaattttagctttcttataagccgatcatatcaattgtattagtgtatggttataatatcactcaattggttggggatataatcttaattacaatgaccaaaacatttagcatagtaaattgtgttagtgactatatgtcattagtccatgctatatattaaaaggccatgcttcaagaaaatataatgataatattttattatattaaataaaactaaagagaatcgataatatgaaagaagacggccggaattagtttaaccaaaaacgtgattatgataggaaaatatcaaccaaatttatcaaactgaaatgatagtatgattgtcatctgacattatttgtatcagaagtaacatttgtcatctaatattttcataaaatatatctaattataaatgtcccaattataaattcagatcttgtattaaaattttgtttctttaatatatatatactgacaagattctgtagttacaattatgtaaaataaaaaaaaataaaaaaattatgtaaaataaattcaaaaactttttttttggtaactgcagttgtttgtttctcttaataatatatgtttttgttttcttacgttgggtacggataatttgtatttttgtaaaaatgtggcttctgtgatagatattttagtagatttttgttttttcgactgaaattcacgtgttaaatacaaaggtaaaaggtaagcttacagttctgcctagttctgagttctggcaaggtgacgtaaaataggcgtatatatatatttcaagttttaaaaaaagtacttacatgtggtgggtctacgagactcatcttcctcgtatgtcgtgccttgacgtaggtaaatccaacggctctacttttatttacctgagatttgaacttttaaagttctactaccaagtctacaactatttgatgagaccacaaccaatattgtgatgtgaacctatgaatacgtaaaattaagtatagtgagttgtagaccatgaattaagtgggtttgaaaattgagaccgcatcattcgatatccatgaatatagaacatttcacaacgttctagaatttagaaaaataaaatatactttgaagatattaaagaaaaaaaaaagacgaataaaagataaagtgttatagaatttaaaaagggaaaggcaaagaaacagaagaagagaggaccacgcagatgtaaggcaataattgacataggaaagggcgtggttcgtacgccttaccctagctatactaaccactgctcaaaatactttgtaagttgtagatctctatatacttacatactgatactgtatacatagttccatagtattattgaatattgattactgaaatacgtaaggatttgatccctactacagtaaccaagtgctttatatctccattatgggttccctcaaaacaatagattttgaatagctctgggaagcagcatttaaataatatggtttattacgatattagtgtggttagtgtatgtcggtttagatgtctagttgcagctaatcgtatactcgaatgataaactaaaatatctaatgtttaattgcaatatatatagccaagacatgtagcttagcttagctatagctagtagctttttcttagtgcatgtcatttttattttaataaatccaaattctgatttcattctctcaatgatatgcaaataagggaaatattaaaaactatatatacgtaaattttgttttaggagccaattttttttatacaccaataaaaccatctgagccaatcgtattatcaatgtatcttggtcttaccttcagcaatttttgtatgggctgagtcggtcatcttaaacgcccatgtttttgtcaatgatgattacatgtaaccgtaacttggtgttttaattaaaaacgtttagaatgcgcatagtccttaaacatttcatagccacattgtttttattcaattttttaaattaattttatttagcaggataagataacccttgaatttattgaattgcatctttcaataacttcagacgtaaactgttcaacgtaaatagtataaacttttatccggacatgcacggaagtgtttatccctgtcgcataatatctacatttcgaaaattttaaaaaccaaaaaatagtactacttgataatacacgtttatggaaactaccacgtcaccctaagaagaaccttactacaggctgtccaaaaacttgcctaaccaattaaatatatccacgtggcatacgttgacatgtacgctctttgcattttacagctcttgcccgttcaaaaaacctcggtatataaataagctctcaatggtttcacaaaactcatattcaaaaacagaacacaacctctcttctcactctatatactcccaaaatggcttataactaccgttttgccattcttctcgttctcctctccgccaccgtcggctttaccgcagccgcgttgaagcctccggttcgaaccttgaacggaaacattactcttaatctcatttggtacggaaaattcaccccaatccaacggtccataatcgtcgatttcatccgctctatcagttctgtcaccgccgccaaaggtccatccgtcgcgtcgtggtggaagacgacggagaagtacaaaaccggcgtttcaactcttgttgtcggtaaacagctcctccttgagaattaccctctcggaaaatccctaaagagcccttaccttcgtgctctgtcaagcaaacttaacgctggtggtgctcggtcaataaccgtcgtcttaacggcgaaagacgtcaccgttgagggactctgtatgaaccgatgcgggactcacgggtcaaagtcaagttccgttaacagtggagcttacgtgtgggtcggaaactctgaaacgcagtgtcctggttactgcgcgtggccgtttcatcagcctatctacggacctcagtctccgccgttagtcgcacctaacggcgacgtcggagttgacggaatgattataaacatcgcgactcttcttgttaacaccgtaacgaatccgtctccagaagctgtctcggcttgtaccgggatattcggttcgggtgcttacccgggttacgcgggtcgggttctcgtagacaagacgagtggagcgagttacaacgctttgggtctcgccggtagaaaatatctattgccggcgttgtgggatcctcagacttcgacgtgtaaaactatggtttgaattttagatggtctgtgaacgagacacgtggctagaattgatggtgattaaaagcttgttgtagtcaaagaaagtttgtagatatctatcgcgtctggttcggagtttggggaaagggatgtgtttgttttgttattttgttatgccctgtgtaaattcgatctttggaaatatgtgaaagatagattcatatatctattttaataataacgatttgtagtttccacctataatcttataacgttagtatatactgtatatagtatgattagtatcaagaccttgttttaacttttaaccagaggaatcaaactttatagataaacgaaaaatggattaagatattaattatgttgtgttgataccaatgatacggtaaaaagaacaaacaaaaagagagaatgaataatctaaaggaaggtggagaataaaggcgatgttgggacttgggggataagagaaaagagaacatatagaatcactttttcacttttaataaaagctatagcttataggttttggcgtattgcttactaaacaatagtatagtatttattgtgggactggaaaaaatgattttatttttatcatccagtttttcctaccaatctcacctttttagtaacttgaattgaattgtcccataaattcttaaatatgagcagtgggttggttggtgttgagtgcttcgagcaggcctgtcgaatcaatggactctactgacgatagtgaaagcagtaagctttcaatgaagtcgctccaataacaacttgttaaaggttttattggaggttacacaatttacacctacaattatttttattcgttcaataagagccacattctttaagagttggtaacactgaaccccataaaaatcatcttggactccaattttcacatccaaacatttcctaatcaagtcatatatccaatgttttatgtcaaatctatttcactcccccttcacttcaaaacatcttccaattcttgtcctcacatcagatccctgaactcaaatgataaagagtgtttttttttttcctttttcccctaatatcttttacttttcaatgctagacactagccctgggactaaaatccgctaaccgcgaatatccggatccggatccgtgatccgctccgaaaaatcggatatccggactaaacggatctgaatacggataacaaatttatggatcagacggacccggatccggagccggataacaaaaaaaattacatccggatatccggatccgtcaaaatatctacatattactagtcctgagactaaaatccgctagtaatatgatattacaccaattaagcttatacattgatatcatgggcttaatacatactgatattattaatcttatagcccatataagcccaatacgacaaagtgacataatttgagtttgtttgtgatttggtgggacacgtcattagggtttcacaacttgtcttctctctgccgccgttcttccatcaccatctctttcaccgtctccaaaccatctccttcaccgtctctatctcatctccattgccatgaatccatgaacgagatcttctcctcagtcgttagccccgcaagaacttctcgtcaatggtcaccacttacctccgactcgagatcgtgcgctcgtcgcttaattgggaactgaatcaatgtcgttaaaggtgaagaatagaagaaagccatggcttggaaatggtggtttgtagattgcgaaagcttatgacaaacattggtggattcgatctgggttgtaaaagagaatcggatttgatccccatagaaaaaaaacggatccgacgattttttttgcggatacccggattccgaatatccgtagcaaacggatgcggagccgaatattatatctacggatccggcggttacggaccggatccggatactccaaaaaaacccggatatccggatccgtaacaggcctactagacactatactttattttttttatcaaatatgaaatgtttacttttgaatatactatgcaaattgcaaatctaactctaggcaagtctttaattctctatgtgaagacaccaaaacgcttggtttcaagttccaactgataactagtaactagtaagtaaccaaaaatataacatttgaatctaaagagtttaaaggcctcattagagtcctgaaaatttataacagaaaaagtatcagccgcatgatagttgatagcaacttctccatataatcgtgtttgtaacaaataacgaaatcgagagactggatagaaataaactagattgagagtttacaaaaaagaaagcaaacgacaccaaatctataaaataataagaatcaagagttagccttcaactccgtaagcccattcaaggcctcacaataaccaacccaaacattccacgccttataccaatccccaaatacttaatgccttcaacttcgaattgccacatcgttggtggttgtttatcttggagctaatgggctgattttcatgggcccattagatatttttgctattttttcgacacaaaattgttgaaactcgagtttctcgaagtaagtgatcggtttttagatctttttggtctcttcagtcggaactgaaaattcatggcgactcgctcgctcttccatagtcttagatggtgagtctccctccacctctctatgtctcctactgatttcgtatttgtttcctgagataattgattcacactgcttcttatgaatttagtcgattgacgaataatggtgttctcggaagcaatttcattcgaaacgccgaatcgtcacgattctccaagtcgtacaatgctgacgcagcaatcggaaactcccttgtcgaggaatcggaggagaaagacgatctgaagagcaggattttcagattgagacttccgaaacgtagcgcgactactgttctcgagaaatggattggagaagggaatcaaatgactatcaatgaactccgagagatctccaaagagcttaggagaactcgccgttacaagcacgctcttgaggtactaacatcgatcatttcctttttcattggtttttcttcgtagctcctagtttctagattgattgcacaatttatgatttgttatgtgttgctgcacaaaactgcattcttctgggagctaattcaagtattattaacaggttacagagtggatggtacagcatgaagaatcaaagatctcagatgctgattacgcctcacgcatagatctgatttcaaaagttttcgggatcgatgcagctgaacgctactttgaaggtctggatatagattcaaagacagctgaaacctatacttctctccttcatgcttatgctgcctccaaacaaaccgaacgagccgaggccttgttcaagagaatcattgagagtgatagtctcacttttggtgccatcacatacaacgagatgatgactttatacatgtcagttgggcaagttgagaaagtacctgaggttattgaagtgttaaagcagaaaaaggtttctccggatatttttacttataatttgtggctaagttcatgtgctgcaacctttaatatagatgagcttagaaagattcttgaagagatgaggcatgatgctagttccaatgagggttgggttcggtatatcgatcttactagcatctacataaacagtagtagagtaactaatgcagagtctactttgcctgtcgaagctgagaaatctatttcgcaaagagaatggatcacatatgacttccttatgattctgcacactggtctagggaacaaggttatgatagatcagatttggaagtctttgagaaacaccaaccagatattgagtagtagaagctacatttgtgttctttcatcttatctaatgcttggtcatttgagagaagccgaggagattatccatcagtggaaagagtctaaaacgacagagtttgatgcttctgcttgcttgaggatcttgaatgcttttcgagatgttggtttagagggaatagccagcggctttcacttgatcttggtgcataacaaatgcagcttggagaatgaaggatcatcttaagatggagaaataagttggtgaaaattttatgctcttagcaagaagaatcagatcaagctcattaatcatggtggatgaataaaatagaggtttcttctcttcactgtgattcttaaatatctttttgttctttacgtgggaggtcatgagacacatagatttcctcaccagaagattttgctgcatagtcggaagatgtgtttccttaggcaaggtccataacatttcatatgtaacgtcaaatttcaaaaagtccaaattttacaacaaaaaatagattgtggaggtttttcttgtatggttgttgtttaataataagtctacaaaatttgtttttggtatagaaaaaatgatagtttgaaaggttagagcaaaatcctagcatgtaagaagccaaagaaggttccattattaacactcgagtttattacatgaacatgatacacaaacatgtttagacccatgagagaaacaacagaagcaaataacattacaatagtacaaaactacaaggcctttgaagagcttaagagccagagagattagaaaaaacaaaaaagatgacaagttatgggattgatagcaacagaagagtaataatgagacaagagagagtggggacatagattttcacctaatgaaagtgggaagatttcaatttccacaagtcacaaccactccaaaaatttcaatatttgcctttttgatttttcttcatccacacccaccaccaccagaccttcacagagatattattattactcacgagtaaagataattattaacgatcaatgagcaccaagactttgcttttttcccttctttcacttttcttccactccaagcacagaagaaagtgacttttttttggttcttttttgagagagcatgccaaatccaaaagtaaaccactattgatccagctagatgaacagtggatacggtcccactagggtcaccaggcgtgttctaattgtttcaaacccacgttaatgaatttgagagaatcttcttcatcagtcctttacctcattgattatcttttgtcccatgtcttctctttaaccaaccaaacatgccttatcaataggacaaaaggggttgtaggtttttcaccaatggttattcaaaccctttgatgagtttaagctttgcttcagcaacttgaggtaatcaatggcttcgtctagtagtaaaagagcttcttttccctttgcccctggaactacactctccaggattctcagagcggtgtgaatcttgtcttttcttgactgctcgtcgctcaaaccagaacccgtttcttgtttgcttgaaatgtttgattcaggaaggttttcatctgataagcctttgactttagtggtgcccacaagggatggtgatgagtctctgtacgaatggtccagtagtttctgtcttttaagaagtggaccatcaacagtgctttcagtttcatccagctcttctgttgttatgttgcacgcttgttgttcaactgtgaatggagagtgaccagtgctcattacttcatcatcactttcccaatcatcattatcgtcatcatcagaatacagtaacgcgttgatttcctcagtgtcttcgtgcatttccgagtcttcttcgccattttcatgatcttcatgttgcaatatcttttcttgaatggcatgatctttactaaaccctttctctgggtgtagggcaccgagaatgttccctcgctctgcatccatagaagaaggaaaccgcagaggaaatccacattgtaacaaacgagtctgctctcccgactgatcgaatactataaatcttttccgagaagacttgagtgccccctctggagcagcaccgttgctagatcgcccattcaaacatgaaacttgttttccacaagactgctgatcatatctagacaataaggcttggaacggtggctgcaaatagcgaaactgatgctcagctgcataaactttaccgagttccggaaaaggaattccaggacggaaatactcagtcgccttgtcctggacacaagcttgaggatttaagcctaatggcaaccatttctgctgtttggtatcaagaggcatgctcttgcagtttaagccaagggaactttacaggaatacaatactgcacgaaaaaggaaagggactaatcattggacatggctatgaatgagacaactactagtagcccaactcaagaaagcaataatccataaagagtcaaagattcagttagcataccgattgtggaagctgttgctcaaatgtgtggaacgcaacacttgttgattctttcttgaaacaatcgtataagaaagtagagacaaaaagaaaaaaggtgccagctccaaaaatacaaacacaagctcacaaaccaactacgtcactggtttgagtatatgtctaaagtattcagcctgcaagtggaacagagacaaaagtgttagataagaaacacaggactatgagatgaaatgtgacaaaaaaaagagtataatatcatttttgctgcaacaaacctgacaattatccatcggttggaagcaagcaataactctcactacaattgttggtctgctagagtctccgttgttctcgtacttgaatgttcgaaatcttgtttgaccagctgattgacttaccataataataacttttccaaactctcgaatgtaaaactagtgtttctccacagaacagagtaagtcaccaaaagacagatgacttgaagaagaaaaagagaagctttaagggtttagatgatcctatactggtcacagtggaaaacgtagaaacgttgggatcccattattaaagagtttagaaaaggctgaggatttagaagaagattgaagatggggtttttcaaggcagagaaaaagtttacagaataactcggcaatacagattcaagctcacaactttacggtacacatcaacagaccttgtgaaccaactcatgctgtttttctcattcactgctttgttgtgatccagagaaagagagaagaattctgttacaaaacagagaatcatctcatcaaattccagtaataacaaaccaaagaaaccaaacattcacaacaattgaaaggatagagaaaccataaacagcagaagaagataagtacatgttctgcagcattgaacaagtataatttattttagcaaaatcaagaactaaaagcttggattttgcaagccaagctacgaaaatagaagaatttatccgttttggtaacgatttaaacacatttgcatcaaattcgctgataattcaactttttcgaggaataaaaaaacagagagagcacagcgacaaacaatggttaagtgaatccaagaagcgtacatggaggaaaacagaggaagatctatgcgtggagatccagagagagtggagaggtttatgagacgaattcacgaaagcttgaacggataagaaacgagaaagcggaatattatttcgaaaatatatttttagcaaattcactaaaagtgggcgtgaagactgaagtgtgtgacattgctttatacatcttcttatttcttgtgacgattttacccttttccaccactttatttaccgtcaataatggagaccaggaaaagaaaaagaaaaagaaaaaaacagttcacatcaaccaagtttatttcagattttttttttttttttttcatttttctttctcttccaaaatttagataaccaagctggaacatcaactctaaaaactcatttgagcaaaacataacaccatctccattgcccaactttattttcttctattttaatattaactcaatttaagaagaaatataattaattttactctattatatattttagaatagagttactactaaaatagaagaaaaatgtagagattactctataaatagaacaaaagacaacttactctatatttgttttctattttagagaaaactttattttagagtcatacaatgaaataaaatacctttaaaatagagtcaattttaaaatagaagaaaaaatagaattgaacattggatatagtcttattattttgattttttactattctttttagtagaaattaaaactaaaatacactttagtatgagtttcaattcatatttctaacacatattttttataaagaaaaattaaatttatttaattcagttcaatttaaatttattttagaaaatacatatagtataatttaaaatgcatataattttgaattgaatggtagaaataatctaaatatttttattagtttggatggttgcaatgggacgaggagtagaggaggtggaacgtagaatatatgtaattatgatgtataatggcaaaccctcgcgatccataatttcaagccataaattaataattatgtaatatcataaacgtgagaatttcttagtagttcgttaaagtaaagccattatatgttcgtcttctttttaactttttttttttttttgggggggggggcaacgttttttctttataattatgagccaaatagtggaagtgagtttttaaccattttggtggtttctataatcattatttttaaagtattaacctttctttttaggtgtgtgggtgggatgatttggaacatttatgtctttacgatgacgcgatacaaattgaactatatacattgtaacatatttgactagtttagtagctagctaaataatacaatatttttgacgtggcttataaaacaccaatttagcccactcgttttttcatatataattacgaactattgtacatgatattttaataagtgattgaggtgaaaaacgttggagcatccaccaaattccatgatcataggagaaagaaaagaaaacgaataaagaggtaagcaagtttggtgaaagaagaaaaaaaaagaaaaagagaaagagacgcaagtgaatgattaaaaaaatgcacagggaattaagtgcttaattgccttgatgacttctttttctttttggaacattttttctaaagattttaatttctcgttgaatcttttttctttattttgatgtgatatgagatttgagaatagtcgttgccgtgtgagatcagtggacccaaatgcctactatgtacttcaaaattcttaaaattttaggaaacaattattatgtgttctattcggaagcaaatcattgaaacatgttaaaagaaagacagttagatagaaatttcagtgtgaaaaaacaaaacatagaaatttcagttcacataattgagactgggctttggttagatgagtggagtggccatgcaaaatggagcctaaacatggccttggacttattttgggccatgtctcagctttggataactcttatacaatctcataaaacaaacaccaaattgccaccagcttcaaactcaagtaaaaaaactttagaaagattttatttctcttttatagagataatatgatcaaagtcaataaaagaaaaacattattgttaatcttattttcttataattttttgcataatttctaatttagatttttacaaacaaacaaaagaaattgtaatttagaagcgatatttcatattttctgtcaaccaagaaaatagaacatagtacccaaagaaaaaaaggaatataccaaatgaaggtccccagcaaaagtatatcccccaagtccaagagacttggaccgtccgaaaaagtccctttgcttcaatcactatcagttttcgcatttactaaaaaaaatatttgtgcaaataaataatttatttttatacaaaaatctctagtaaatattaccttaatcgctatataattattttcaaaatattttaaacgtatatgaaatgtatgaagaaatatgggaatctcaaacatttattaacctaactacttgaaaaaaattaatcaaaatttaacgtcttttaacagaccacgaacttgttccaaggtaaggaacaagatcatcgtgaacggtccttgcctcgtcgccgtcggaacaagccctttgtacaaagccattggtccttcctctgccaccatcttcaccgcacaatccaacggtccaccgtaaatctccttatccgcattcatcatcctcgtcttcacaacgtcgatgggattcgacgccaccgccgcgacgatccccgccgcaaaactcgccgctacatgcgttcctatccctcccggcgttccacggccaccagctaccaagatttctttgacgtgatcatacgtagcgagctgagaagctgtcacgatcatggcacggttcacggttagccatgagccacgccataaacttgaaacgccttcttgccttgcgatcctgtcgatcgcgtccacgacgctcttgtagtttctgcgacggtttaacggcaagcttccgtcggcttgcattctcaccatcgccacgtcagcaggattcccgacgactgatccaacggctcctgcgatgagtccagctgtgatcttggttaccaatgggaagttacctgtttggaattatcgtttacgtttaatttatttgatcttttgtgtaataatatggaaaaaattcgaaccaaacaaaccgaaactgtttaagatcgaaaccgaaccagcatttgtttataaatccattggttttcttatttaaaaccaataaccgagaactgtaaacgacttttagtgtaatcaaaccaaaccaaaccgaataaaaaccaaaattattttttgagtaatattgttgccgatcgagtttagtattattaccggtgagttgatcagtccaccttcgtttaagaaagtcgtatatacccatacgggtggcagagtaaagcatctgacggaggatggtggcggagacgccggagaagagagcggcgggtccttcggttttgacaatgtgtgcccctacggcgaaaggggtcatgacggagcgcgtggaagaagacggcgcgtgaatgtgtaagggtaataaggaaatgctgccgatgagagagtcaagagcgaaaacgggtcggtaaggtttcacgggaagattatgatcaaggctaagattagggttagggttttggtcgagcgagaaagaatgttcgccttgaagctgcatacggactttgatgaggtctaatgggtgagtcagagctccggcgatgattgcggcgatgccaccttcaagaaatggtttgaagcccattgaaacgattaccggaggattttattgtaaggagagaatgttttgaggaatgggaattgaaagaaaagaagagtttgggagataatagatcttttgtaataaaatgtttggagaagaagaaatgaaattgaacaagttggaatggaagaagacaaactacttgagaagaaaataatgcaacgagtagttgtgtttgtgtactagtcctgaattacgggttccagcttttagcacaatgtttcttgttttgtcttgatgcacaccttggcattacagaaaaagaataattgaagctagaggaataaaccaatattggtcaatgaaaccaatgttctatatctaacatctactcataaaatttgatgtttcattaagacgaacgtcatatacaccgacaattgacacattatatctttaattaaatatcttacattacatgatttacttaagagttatatatatattttttgtaccacaagagatatacatattacaagagagaattagtacgagattatatcaggagcgtttagagactcaatcatgacatggtgaggactctaatactgtaatacatatgtaatctctcatctttaaccaaacacaaaccaaaactataattgcatatatagtttatataatcatttgacgttctttacccattgatctatggcttcttgttagaaacgttaacctcttcaactgttgatgtaggttttgtcttttcagtctttggcaaaccgccattaacaccgggaataggaaagctcggaaaccatgatggaaattcaaatgttgacccttctggctcttctggttcttcgggctcttcaggaacttcgggttctccaggaacctcaggctcttctggaatctcaggctcttctggaatctcaggctcctccggtgagggcagctccggctcttctggaacttccggctcctcaggttctgtgtattctggaacctttttgacctcttcttgcaccagagaatgacttactctagcagcaaaactaggtgtagggaacaagagggacgatgaaataaagacaaggaacaagaccgaggagacgagaataggaaggcgaacattagtcattgtgatattcttgaatcgaaaccaacttagaaagatgagttaaacaatgttgtgagtatagagagtttgtgttttgctatatattgtttacagaatggtttcttaaataatattgagatgagagagatcttagaatgtagattcataagagtcaaaaaaatttggtgagaagatctcactgcacgattgtgagaatgtgatgttagtcttcaacaaactcacctatatttcattatacgtcttagttgtataaccccttttaagtttactttcgaacctaatatatatacttgttttaaagctattgatactaaacattacaagaaatcttaaagttagcaatacctatattgtattttacgtctcatatgcatcaccccttctttacctgtgaacattcattattaatacatttacatatgattttattattttatcttgtaaccgtttcaagtgaaaagtgtatttttacgcattatgtagattattaaaatatataaggatcaaaatcaaataattttaagacttataaaataaaataaaaaataagactgagataaaaaaaaaaaaaaattaaagactaactcaagtccaaactcataatggtattaagtattatagagaaaatcaccaagaattttttttacgataataagaaaagtttaaagacactagagtgtcagagacatgatgataagaagatagatttagatgagcaaaacaaaagaaattgtaaaagcagaatgaagtcttgaaatggcttcacttgagagggataaacctagaggagtgtgtagcaccatgaccgggcttgccgtgcctaacgggtttgtaagtgattgagaattccgcaaggtaatgtccaatcatctccggtttgatctcgatttggttaaaagtctttccattgtacacaccaatgatgcttccaatcatttcaggcataatcaccatgttccttagatgggttctcactacttcgggcttctcaccagctggtgcatctagtttctggtttaaagtaaattagagactagtgttattataataatcaaagccaaccaatcaaaaggcagatcctaactaaaattattgttatgttgggagatcacagactaataacaactatgacacaataacaacagagatttatattggaaagttagagttttaccgctttgcgcaatttcttgatgagagccataggcttcctcgttaatcctctactcatcctacaaaataatcaacataattaaacaaaaccaatcatttaaaacaagagttatataatctaccaaaatttttggtgggatcaaaaccttcttcttatacgggaagggaagagctcgacaagatcatcagtgggcatgtcaagaagagcatcgagatcgactcctttgaaggaaaactttttgaacgttctcttcttcgcaagagcagctgcggaaacatctggttcgacttcagcctacggatttcgacagagaaatttaagaccatgatgggttcaaggatctaacaatcgaataattaaggtttaaagagatggagatcaagaaactaaccattgttcttggtttgagaagccgggaaagtgactgcaactagggttttgctatggagatacgacaagagacataacttggcacccaatatatatatatatatatatatatatacacagatgtattatagatcctacagtgtttctgtttaaggaaacgtcaataaatatttaccaattattacattattgtctttctaaaataacatatgaatcaatatttaaatatttttcttcccttataatagaaaaacttctttttttcttaccttataaaaactgataattaaaacatataaatacacaattttcccccaaaaaatcaaaacttaattattagtttaatgtaaaattaactgatttaggataaaattggtcatacattttgtatttatcttcgaaatacaaggaaattatgtacagatatcttatagaaatagatatatagtttgtgaatttcaaaaaagaaattgaaattttcttctatttataaatagggtcattgtgttattttttattttcaatatacaaccatcgatctgcaatacaaagaaaaaaaactaagcaatccagatattgatttttttttttttttgaagttaatatatgcagtttaaaaatgcaattgaaagatatctatctataaatcctgaattattttctaaatttaaagtaatactcaataaacagagcaaagtttaatagattataaataaaaagctctgtattatttgaaggcatgaacaagagtttgaacaaaatctaaaggagagaagagaaaaagaaagacaaaatgttctaaaagaaaaagaaacgaaagactcgaatttagagcataacaaaactccacaagagcttgattattcacttgagagggataaatctggaggaattggtagcaccaacaccaggcctaccatgcttaacaggcttatatgagattgaaaactcagccaagtaatgtccaatcatctctggtttgatctcgacctggttaaaagtctttccattgtaaacaccgatgacgcttccaatcatttcaggcacaatgatcatgttccttaggtgggttctcactgctgctggcttctctccagctggtgcttcaattttctgctcatacagagagagtcacaacctttagcgttttaaagccatttgcttgcaaaaatcatatatagagaggcatgaatctgagaagacacaatctaagaagacacgttccagggcaaagatctagttagaacaaagaattattgatggagaagtttgagttttgtaccgctttccgcagtttcttgatcaaagccataggcttcctcgtcaatcctctagagaacctatttacataacaaaactgatcagtctaaaaaacaagagacgatctacgaaattgagacaaagctctctggttcaaagagtcctctaaccttctacggatacgggaagggaaaagcttgacaagatcatcagtagacatgtcgagaagagcatcaagatcgactcctctgaaggaaaactttttgaacgttctcttttttacgattccagccgcagcaacctctggatccgcctacgtattttcccaatacgagaaattacaaacgtaacgacggaaattttgataaatgatctacactattaagagacaaagattaagaaactaaccattgtttgtttggaattgctgaaaacctaaaaaacaccacagagcctcaaacagtgactgcgcaaacgacaaacaacttaacttaagcaacaaatatatacttgggctaaacctagtaacatttatttactattaggtacatgtattttggattttattttctttgaggcccatatatttggaaaataagacgtgcacaaactttatctcaagggatttggtcattggtgagtgaatctcgggatttgccgttgagtattagatagagaaacctcataatccagatttaattgcctggtaaacaacaacacacctaaactcctgcgagtcgatagttttcttatcaatttgtaacaaacaaacattctctactactgtaatcctcaaagtgtgtctaattgtgttaaaggttgtttgcaactctgcatcatacaaaaacatattattttctatgtatggttcttgctccaggctctgatctccctcggggacaacaggtttccagatgacacagatcgaattgtaaccggaacagccgaatttcgattatccaacctctgcccaccagtagtaaacttgatctccttcaacgcatgaacggataaaaatctatatatgagtatgaactagccattgctgatagtagattttccaaaaagttttgagtcttctttaaacgaatggaacaagagtttagactcatctaaagaagagagaatcgcagcagagtagccaaacagagaagtacagacagacaaaatggtcccaaaactgacaaagaaggaggaccctataattgcataatgagatctaacaaaacaagagcacaacacagactctgtatggtcttcacttgagagggatgaacctggaggagtgggtagcaccaacgccaggcctaccgtgcttaactggcttgtacgagatggagaactctgcaaggtaatgtccaatcatctcaggcttgatctccacttggttgaaagtctttccattgtacacaccaatgatgcttccaatcatttcaggcacaatgatcatgttcctcaagtgggttctcactggttctggcttctcaccagctggtgcctctcttttctggtcacgcataacaaagcagtaatctttagaagttgaaccaatttggttgcatagaacaaacacaaaacttctcacgcatttctaagtaaagcacacagatgcaatgagaggaaaacacatagctcacaacgtagaatcagattcaacaaacatagaacagtaccaattcaaaacagttctaattagtaacgagagaaattagggatcttaccgccttgcggagtttcttaatcaaagccataggctttctcgtcaatcctctagagaacctatacaaagagaattcaaattagtcaaaacacatgagatgattctacaaaggacgaaacttttactgagttcaaaaagcctaaccttctgcgaatacgggaagagaagagcttgacaagatcatcggtagacatgtcgagaagagcatcgagatcgactcctttgaaggcgaatttcttgaacgttctcttctttggaactcctgctgctgcaacctctggttccacatcagcctagagagtcccattggagccgaattacaaacccacaaatttcggaaatgtgatagcagtagtagaattagagagatgtatgtagatagaggaacttaccattgttggatctcggcgaaagataaggtggataaactctaaatctgtggtagcttgcgttttccaaatgagcagcgaagaagatgccttgttcggcggatccaaatatatacgaggaccttggctaaaccctagaagtgaaattattttaaagatatttattgttagtgaatttgacttgacttttataaatccaagttaaattatgtattttcagattaaaaactttgttgtcaaattagtttataatagactgaaaaatgtttttaagttgttagtacttatctctcaattgtattaatccaaaccagtagattatagattttggtgataagtacattgtttctaaagtttgtatttgttatttgcgtataaattttcaatgtccacactaatagattgcttcttgagatcaatgagttgggacaccaatgttatgttttcctctgtgatatttaagtcactcatatgaagtgctttatgatacgagtacgagattatgaactcatatcactaaaaagtatattaagattcaacgagatgtgtatcaaacataccaacaagcagtggcggatctaagaattattttaatcccgcgcacaatataattaaaaataaaattaaataaaaaatattaatataaaaatagtttcttaaaaaaaagtctataaaattatcctacgttcttccatactctgaaatcttttgatcactatctcatttgtcactttatcaaataattccctttcaacaaaacaaactagacaatcgtttagaaactgatcacctatacggttgcgcaatgtagtcttcacaatcttcattgcagaaaagcatctttcaacagtagcagtgactataagtaaagtcaaaactagcttcaaaagtcgataaaccagaggatgcgaaagatatttccttgtctcgatcataacgcgtgcaagatctcctagactcttcaaattagcaaacatttcatcttctcgaatattgtcaatgtaaagaccaagttgatgctcgagtgatctctgatcgacatgagtaaaatcttgtggataaaactcagacaatctcagaactttcaactgatcaaactcatgaaacgaatcaatacggcttaaagaagcaacacaactaagtaattcagtgtttaccttatcgaaacgatcattaaactcttgaatttgcatatctaatacagtgtaaaaacactccacttgataatgatggaagttggtcatgttgcttctttttcttggcttttttggattaacaaattctccatccataataaccaactcaatgtcatgcttcttacaaaaagaaaaaacttcattaaccaaagaatctcatccatcatctctgagcttgcataattgttgcttggtagatttcactagtgacatagcattcaaaatgttttggtctttcctttgtagagccactgataaactatttgtgagtccaagaaaaagcaacatcaactataagaatttttatgggtttttttgtttaattattttgggctaaaatattatatttgttttaattgaattgagttgaacattagagtagggcacttgacgttaggcccaacagatattccagcaaatgaattaattatataaaagaatatatatatattttttaaagagcgtagggcacgtgcccaaccctctcttgctgtgggtccgcccctgccaacaaggcaacaaaggcaacaatggaatcaaagtacaagtatgagtgtaataacaatgacgagacaaataaggtacaaggatcaaggatgagatgggatacaaaaagcacatctctgtaaaatagacaaacaatacaaggggtgatacgacaatttcagtaaattagaatgggctccaaagtagatgggccttcttctggtgtaatgggcttaaggagatccaggaaactttggcattgtaaacgccggcactttggtttcttctggttttggcaattccggcaactttggaaaatcgaacttgggaaattccggcatcttcggtaactctggaaacgtcggcaattcaggcttctgaatctccggtaacttaggcatctctggttttggaatctcaggtaacttaggcaactctagcttcggaaattcgggtaactttggcatctctggtttaggtagctccggaaatgtcggtatctctggtttaggttcctccaataaccggcgagctccaacggataccggaacagaaagcaatgcaataagacatatgatcagaaatggtgaaagtagagaagcagagaaactcttcttcaatgtcattgtttccttgcaagctttttatctttctttctttctttgctttgtggtgttgttctttgtttttgtgatgagctttgatctttgattgaaatgtctatttaaatgtgtcttgtggaagaagagagatggagtttggtgagaataacatatttagagtttagaatataaaaagttcgtttaacttctctatctgtatatctatattgtcactttcaatctagctgaagtttaggtttaagtgttgacgtgttcatgtgtttggtttatacgtattatagaacatatataatcctcgtatgagaaagcacgttattatacgtttagcttttgtaaaaactttggttaatcttaaactaaaaagtaaattttagagatggaaagacagagtattacagagcataacagagcattagggcagagtaacaaactaacaattaacaaagcaatcaaacagagcattagagaaaaataaaaaaggaaccgcatttgatgtttgaggcggtgagtaatctttgaaaccaagtatacatgtttgattcagctgctgataaagaagatgtctctcgagagagtagacgaagtcttgcacgaataatacgagtgattccttctaacacaatcaattccatacaacacaattacactaacagaaacgataaccaaatttgtaaataatatgaaacacaatcaattacattaggttatgatattcaaatccattacataatgtttacttatatgaatttgattagtaattttgtagagcaacaaaaaggttataattccgtccaaaagatgacaaacatttgatgctagcgtagtagcattaacaaacaagaagaagatagccgtcgaaagtatcagaacagctaaactgatataattgagggattagacctcattgtatagcttttgaacagaaacatgtcttaaataagtaacataatcaattaaaaagtatatcaaatacaacgaaatctgtatggaaacaaacaatacaaaatataacaggatacaattatacaagtataagtgtatagtctttacccaaaaaaaaacaagaactatgactatgagaccaaccatacgacatggtttttactaaggaaacaatgatgtagacagacataagtgcatctctgcaaatagacaaatggtataacggtaaaacggtactttaagattgtgggatgggcttcaaagtagctgggccttctcttcgcttaaggagttccgggaacttttgggaattccggcaacttgggaagttgaggcatcgtcggtagctctggctttggaatctctggaactgcaggttttgtaatttctggaaccttgggcagttcaggttttggaacttctggaatcttcggcagttcaggctttggaatctctggaaacttaggagcctcagactttggaacctctggaaccgttggcaattcgggctttggaacctctggcaccttcggcaactcaggcttctgaatctccggcatcttgggcaactcgggtttctgaatctccggcatcttaggtaactccggcattttgggcaactccggcttctggatctccggtaccttaggagcctcaagcttgggaacttctggcaactttggcaactcaggtttctgaatctccggcatcttaggtaactccggcattttgggcaactccggcttctggatctctggtaccttaggagcctcaagcttgggaacttctggcaactttggcaactcaggctttggaatctctggcaccttaggagcctcaggcttttcagtctccattagcttaggcacctcaggctttgaattctctggaaactttggcaaatcaggctttggaatctctggaaactttggtaattcaggctttggaatctccggcatttttggtaactcgggcttctgaatctccggtacctttggtaactcaggttttggaatctctggcatctttgggagctcaggttttggaatttccggaaacttgggcaattcaagcttgggaatatctggcagtttagtttcctcaggctttggaatctccggtacctttggtaactctggctttggaatctccgggatctttggcaactcaggctttggaaattcgggtaacttgggcaactctggtttagggaactccggcaacttgggaacttcgaatttaggtagctcaggcaattttggtatctccggtttaggatcctccaataaccggcgagcaccgactgaaaacggatcagcgagcaatgcgataagacatatgatcagaagtggtgatgagagaagagcagcagagagactcttcttcattagtgccatgtttgagcttgcttgagaactcttgcgtttgtttcttcttttgcttttgtggtgtttgttgttgctttgtgtttgtgatgagattatgatctttgattcgaatgggtatttaaaggtgttttgaggaagaagaaagatggagtttggtgggaaaatctgtgcagagttttgaataataaaaaaggttcgtttaacttctctatctgtatatctatattgtcactttcaatctagttgaattttcggttttagtgtttacgtgttcatgtttaagctacacgtaaaaaggcttaaactttgtaaactagagaatagcattttgcaaatactatgacacaaatatcaattatataatttataaactgtatacaaaaaagctaatgaaaatcaagatgggacttggatcaaattatgtaagtcttaaaaactctagtcatttcgatattgattttgagataaaaacactaactaatcaaaacttgttttaaggtgaaacgtttgcacatgaattagatatttgcaagtatgaaagggcgataaaaatatgatgtttaggttttggccggtaatctacacaacgacttggattgttttatggttgtgtgtatgtttgttctttctcatcaaagtcatgtacaatgtattatttgattctccgtcttcaaaaattcttcacaaaagaaaaattacagatttgggtaaaactcaagtcggtaacaaaacacagttcttcaatatagcttaattgatcccttttctaaacaaaacttcttctgcagccaaaataagactgagcctatttccacctgaaaatgaacattctgctagttctgatactaactctaatctgagaataatgccttacttagacgtccctcacaagttttacatatagcattccttcatgtactcaaactaggcatgattcgcaaccaaaacatgccacataaaaccagtttatggttatgaacttatatgatacaaaagattatataccgaaagcgtaatatgcaccaaaatacataaacggattccatctaacattgattccacaaacgaatcaaaattaggtcagtttccactaggcataaacattagctagcaatacatacaacataaaggactaagggaaccacaaaacaaaagatacaaagctttacttttcaccaagtagccttgagtttataatatacaacatttgtctacttgcttctcttcgcatcatatctttaatcatcatcagaaattgcaatatatatgtcaacatcatcgtttcttggagtagccttcaaatttgattgctgatcagatgaactttgccctgtgcagacggaaagatgtgagattggcgaccaattagaggtgttaggatgacttgttaatcctacagggaacatagcccaagaaccaaagtaaacgccttcaccattactctccacaggtggcgtttgcgttttaaccgcttcaaacgctttcctacactgctgacacctcaatgtgcattcctcgtaaccctttgggtactcaaaaagtgaaaagcagtaaggacaagcggtc

SEQ ID NO: 1414 - DNA, 92491 bp, Arabidopsis thaliana
gaattcgaataaaggtattcaaagtttgaatgagaatcaagtggatatgaatgatttttcaaaaattatgcaaaaagatacaaatgatactatttcactaaccccaaaaaaacgttcaatgaacttctgaaattcttaggagatatcacatcaaatcctccaatatatctctgcaaccgttggtcaatcgtattcacaacgactactcaatgacattattgaaacaaaaattaaacaaaaagatacatccaaagtaatcaactatgtatataagtccaatcttaatcacacgttttagttagaacatatacctttcaatctttcattccttcttattttaaagaaatgacaattcttttacgcacgaacacacattatttgtatttgtcaatgtccatatattatgggataatgtttatcttaaaataccatatattttctctatgcatgtccgaataacccgaggtatttaaacaccaactcaaatactagtatatgtagaataaccttctatttgttattaccataacttataagaagagagtggatataaaatattgaaatcactactcggcttatatccatcaatattctaccaaacagatgtagcctaaattgatcgggacttgtatatatctcaacaattatcattatgtccgtaataatccacgattaggatacagtgaacatatgatatataatttcatatatatcaaattagaagacggaaaataaaaagaacaataattgtttaattagaaaccgacccttctatcctcggctcttgtacacttagagtagacaactttttatatatgtttttagtataaataaataataaaattaaagacatttcacttttgttgtgtataaagtgtctttaggaagacacaaatctcaaattaaagacattcattattttattattattattttttatagttttatatttaaagacatgtataaataaccaccaatgtggatgctcttacgtacttgcaatatttcaatggatcaaacaagttccaatattaaactaaaaaatttgatcgtatccacagcattgcccataaataaatcaaactgaaatctatttacatcagtttgaaccaaattcaaaaggggcaaaaactaaaacaaaaaaaacttacagaagtaaaaaggatgattcattaatcaaacctttgaactacaaggtgaagattaagtcttagtactacttaaaccgatttcgttatgttttctggaaggaccagaagttggaaccggaaactgacgtggcagggaccccaagaactgtacacttttgtgatcttgtacttgatgatggacatgatcatgaggtggcgaaacgacgtccttttgtttgggtggcgagcttgtgttgaagacgttcgtggttcttgctccattgcagcaactcaaaaggacaagaagaagaacaagaataggaattgttctcgtgagttgatattttcttgatcggtggcttcgagaagacattggtgtaaattgggagagtgaatagagagagatggagggagggaagtgatttttgtttgaaggagttttgggtggaagtatttaatatttaaaaggttttatttttttgttgatgggtgattgaatgaaaaagagaaggctgtgaattgttgacagctagaaatatgggcacatcaagagagagagattttgattggaaagatgttgacttatggttctatttgtatgtttctttttatttactcatatggttctattcttatctctcttattaaggaaaaccatgcactaaacctaaatctagttaatcatggatatttacgtagtaattacattattcaaaacatactaaatcaaattggagacacaagatgttttacccctatactaccttcacttgagtttaaattaactatttctgaacatgatctcatattggaatgcgtaaaaaacgttgttgggcaaaaacaataacgtctcttcatagctcttgatatgacccacaagacaaaaaaagttggaggaagactcctttatagctgtctttaattaggttcacgtataagtactattgcatatttatgatatttctaattttgcgtttgaaataacatgtattatgtgggtttgaccatgtctgatcatataataacggttttagcattgaccattaggattacaggttattaacattgtcaagatttttagtttactttcaatttaaaatacatttcacatttgtttctataatatattatcaattaatcctctctgtggagtgaaagtgagaggggacaaagagaagaaaacgaaagaaaaataattagtggtgggtcaaggtcaagccttttcatttcatgttatgtgaaaaaaatataattcatattacttgacgacaaaataaaataatttcatatcagtttgataatactatagtgtattctatccttgcaatctcttacaattgattgagcaaaccacgcgcatatgcataaaaaagtttctatatttcctagatctatcctttacgtaaaacaagttcgagctaaaacgtaacgtgacttaacgaccaggcaatacaactactgcaccgcaagaccggatcaaccaattctaaattttagtcatcatcaagacatcaactttttatttcttggacatcttccttaacgtaatcatcaacttaaagaccgtagctttagtggacacttttgagttgcatcctcttttgcggcatatatattgaaggcagagaataatgacgatgagacccctttgtacgaacaagatgtcagaacttagaagaacgaaggaaaccgaacataaaaggcaacaacagtagttgtgtcagaacaacaacagtaaatgagatgtaaaagcttgtccaggctagttccttagcgttactgtaacaacactgttgaaaatatacgagtataaaatagtactattacaaattacaaccaaagcgattttcgtgctaattaccgaccatctgttcatacacgtttttttttttttttttaccgaccatctgttcatacacgttttctccaatgcatcattctcattgattttttttttttattgtcacagtatttttttgtaatccgaaaggttaaatgcttctctctaaagtttagtgacttttgcaatacaattaccctccgccaaaaacttaagcgcaattcttcactaaaagaaacgttatttcattgcaatcgcactacatttacatatataatataaacacgatcataaagataacaaatgcgatgaggctcataccaaaaaaacataaaaagtgcgatgaggttatagcataacgataactcgccttctttctttatttgttttctatgtattgacatagaaaaagaggagtaaatttaatgggcctctgattcgcaaaataataataaatgactaagcctacgaacgatggtttgggttacatacaaggcccatacacgagcctggactgtcacattcacataaccgagtagtagtttactcttgatgtcattgacactttgtcgctaaggtaatcgataaagactttatttaaagtggactttgaaaaggaaaaggaagcaacaaaagttgcaaaaggccgtcgaatctgtctggtcaataagttcacttccttttatcacatttgttttacaaatattaatgactacaacaattcttcaagggacaatacgagtattttatttacgagaactggacaaattgtttataggctctttaaaagaaatcaaaaggttcccgagtttcctcgaacggtgcaattttaaaatgtaagtggatccttaggcgaaatctgtaccgttggtggtactgttaacggttgagatgaactcgaatacaaatcttagtctacgcgcgccgaaagatacccagactcaactatttgaccaaaagtgagagaacgaaatacggaaaagtattcatttcatgggtttggcatataataaataaatatgtcaaaaaagttttttctcccaatgttatacaaagttgaaaataaacatgcaaaattagggaaattttattaactactgtaaataataatctcaatttaacaaaaaactgtctctccatattatttaaaaccttagcataatttaaaaaaattaagattcataaaataaaataacgtaattatatttttttttaaatggaaaagtatcaagaggttgttcaaaaagtgaattttgacgtcagcatatttgaactctctctcatgactcatcatcttcttaaaacctaaccacacgagtcacgtctctttctctctcagtgattttgttatttattctctctttgaaacgttttcgccgaagaagaaagagcaaaaacatgaggagcgatgatctttacatcaccaccgtcccttgtttcttcaaatgtccaatttcacttgatgtgatgaaatctccggtgagtctctccaccggcgttacatacgaccgagttagcatccaacgttggctcgatgatggtaacaatacttgtcccgcgacgatgcagattcttcagaacaaagaattcgtacctaacctaactcttcaccgtctcattgatcactggtccgactccatcaaccgtcgagccgattctgagtctccggaatccgatactccgacgcgagacgaaattaacgctgcgattgagagattccggatcgagaatgatgctcgttcgaagattctccggttcgcgagagaatctgatgagaacagagagtttctcgccgggaaagatgatttcgtagcgatgcttgtggatctcattagcgattccagaaacttctctgattctcaattgctactcgttggagaagcggtgaagattctgagcatgattcgtcggaaaatcttcgatcggagacggttatcgaatctgatcttaacgaacggtggtgattgcttgacttccttcttcctattgattaaacgcgggaatccaaaattgaagatcgattgctccgccgtgcttgagtttatcgccgtcgacgcagagtcaaagcttataatcgccaagggagaaggattggtcaccgagattattaaattgataagctcagattccgactcaagcttaatcgaagcgaatttatctttattaatcgcgattgcgtcttcaaaacgcgtgaaactcgcattaatcagagaaaagctagtcacgaaactcacgagtttgttaacagatccaactacgagcgtttcagtgacggaaaaatgcttaaagcttctcgaagctatttcgtcttgtaaagaaggtcgatcggagatttgtgatggtgtgtgcgtggagacggtggtgaataagctgatgaaagtgtcgacggcggcgactgaacacgccgttacggttttgtggagcgtctgttatcttttcaaggaaaagaaggcgcaagatgccgttattagaattaacggcgttacgaagatactgttacttttacagagtaattgctcgcttaccgttaggcatatgctaacggatcttcttaaggtgttcaaggtgaactcaagatcttgcctttcggtatacgaaaccaaaacgacacatattatgccgttttgattatcccccctccgtattaacttctttagggattattacttgttggtaaaaaaaattcaagttgtaaggaaagagattttttggaaggtgaatggaattgttatcacggccaatgccattagaactttgagaataaattgcaatgttctttagtactagtatcattgcaatgttgatactctaaaccagaattttatgtttggacttggcaaaatcgtattaaaagtaaagctatcaatatgctctatcaagggagatgttgtctttgtatctaaaacaaactgaatcttgattgattgagcagtcaaaaacaaaattggatttaaaagattacaagaagtggatttggcatttggaggaacgttaggataaggaaggaggtctttggtgagttgcaatttcttgtcaacatcaaccttagtaccaatttccactttcattacttgaagaaattcactttccgacagaacagcctcacttgttcgacttctctaagattccctctacacccgtataactccaacaccttcaacgtatttccatcaatgctatacccacaagtacttacacactgaaaaccctgaaacaacggatagaaaagaaaagaacacacagtaagtgaaactccgagattaaatttataattgagaaagagaaaaagagatcatattatacatacaaaccttgaggatcaaagtttctagattgggagagctttttatcagagtccaaagaactttccaaccttttttcgtcttagactcaaacgatagtttaacaaggtttttaaacaagggaaattcattactacgccaataatcgaagcaatgacgcatcatctacaacacacaagcaaactggtcatgaatgaaacacaaacaaattggtcaagcatgaatgtaacaagatacatggagaagagagagacatcatactttaacggtagtagaagcaaggtcaagaatgtttttcatattcctcatattcatagggacaaaactcataaggcatagaaagatcgatgcgggcttctcgaagggaatccattgtgatggaccagtaatagtcttatttctttgatttttttggaatactatgacttaaacagtattagtataagcaaaacttacatggcgagcatatatgaatatcttgaagcatccaccgatgcaagacttaagttttcatccttgtgaagaagtgcaacaaccttaataaaggacttagccacaaaattacctagcatacaccccggttcagaaaatatgataagaaagttttgctctcatcgtcaagaatatatcaaacaaccatttcacttgttccaattatgtatattattctttatagtctataccataactatttcattaacgctaacaccgcaatttcttattaattaaaaaccttgaaaaaaatagagaaaactattcatatataaaattataagataaaaatttacaattgaaagatattatatatgtatataaaattatgaaaatcaatatggcgaaaaattcttaaatcggaaacagaaaattatgttaaaccataagacataatttattaaattttgtattttatagattcagatttatgtaatattacattgttggtcaaaccagaacactttggtttagcttgtcaaataaagaacttgagcctccaatgaggcggaccgactgttgggcttggcgttggggtggctcagttgacgaaattgacgtttactgtgtttgtattgagcccaccaacatatattttttttcaattgaaagatatctatttttgtaattacgtttgtatagtatagttaatactgtattaatttttatatcaatccctagtaaattaaataagtaaaatttagttaagaaatttagtaacaattaaaaggctttaatggttgtaaatttattagtatcacttacaatgtttaaaccttttaagacataccagtaattttgaatttgtcaaaggtcaaaaaaacaaaagagccgataaagaagagtctcaaaggaagaatcccaaattacactccaggtgatgcgcacatcagttttcgtgcgcacacgcggcggtgcacattagccccaaccaatcaaaatcatatatcccgttctccggcgactcttcgtcgtgagcttccgtcatggccacatggaacgcatcctcccctgcggcgtctccttgctcatcgaggcgacgaacgaaagctccagcgagacgcccttcctccgaatctccaccaccgaggaagatgaaatcaatggctgagataatggcgaaatctgtccctgtggttgaacaagaagaagaagaagacgaagacagctacagtaacgtcacctgcgagaaatgtggttctggagaaggagacgatgagcttcttctctgtgacaaatgcgatagaggctttcacatgaaatgccttagacccattgttgttcgtgtccccattggaacttggctttgtgtcgattgttccgaccaacgacctgtaagaagtatggattttttgtttcttcgcttttaaatttcctaattttcttgtgttctttgtttaataaaaaaatggatttttctcttgtccggtgaaatgtttagggttatctcagaagaagattttacatttctttcggattgagaagcatactcatcaaacagacaaattggaattgagtcaaggtgcgatttttgtttttggatttcatgatatgatcataaagttcttgagttgatgaatctgacgagatgtttcacttgattaaatagttagatgaatatgaaatagcttaactttggcctattatatgcttgaaattttgttgcaccttatgtagggttaataagcattgatgagaacttatacatatcatatacatagatcatagatgcttcaggattaaactaataacaagtgtttgagattgagatttctttgttttgaagaagaaactagaaagcggagacgatcttgctctttgacagtgaagaaaagaaggagaaaactcttacctttggttccatcagaagatcctgatcagaggcttgcacaaatgggaacacttgcttctgcattaacggcattgggtatcaaatacagcgatggtttaaattatgttcccggaatggctcctcggtctgcaaatcaatccaagttagagaaaggtgggatgcaggtaataaacaaaaacaatctttcagccatttatccataactctcttattttaagttacttccttgattgtttatctcggtttttacttttcgcaggtgctatgcaaagaagatttagagacattggaacaatgtcaatctatgtatagacgaggagaatgccctcctctcgttgtggtatttgatccgcttgaagggtatctctctctattccttcgatcaaccttcccataatgacaaagtggagttgtaaacatgttctttggttattccgtttgtacagttacacagttgaagcagatggtcctattaaggacttaacattcatagctgaatatacaggggatgttgattacttgaaaaaccgagaaaaagacgattgtgacagcatcatgactctccttttatcagaagatccttcaaagactcttgttatctgtccagacaagtttggaaacatatctcgcttcattaatggcattaacaatcacaatccgtaagcaacaaattcaaaattgttttccccccactaaactggtttataacattgaatcatcacatcacactgattgttgcagggttgctaagaagaagcagaactgcaaatgcgtgaggtatagcataaacggcgaatgtcgagttcttctagtggctacacgcgatatatcgaaaggggaaaggctctattatgactacaatggttatgaacatgagtatcctactcatcacttcctctgatctttcaattctaacagttctacagagtctctagatcagatgttctttttgttgccatattacaggtcaattataaatgtagggctgctgaatatatggcctttaattatgaagttagcggtagaataattggatttggaatgacattacagagattaagatgtggcaaatgtcaattgctgaacttttgtttgatatcaaatgaaatcctaacctttttcttatatgttcttggagacaacttcaccaccttaagtggttgccaaataagttataatttcttttatactcttcttcataaatttatcaaaatgaagaactaatccaatacagtcattacctaaacagaaaagtataattacagtacttgcctagtgtcgtacttcttatttccagtcaccgaaatgtattaacgccaaaagagattcatctgttatgcataataatcgcatgctatgaattaaatgaacacatccaaaaaggatgaagtcacaattgtactacagtttcagtattgagaggaaagcttttttcactttgaccactttgattgaatcatatctttgaaattttaagtggtgctttgctacatattcaacggctcaacaagacagagagaaaaatattacgagaggagatagagagtgagagagacgagcaagttgaaggagcaaaacttgtaggtgagagcttgaatcagaacatttcaaaggagagagatggcaagtaaccctgattttctttggtgcaaagaagagaggaagcaggaaagcttcttcaaagttcttaagcgttccgacatgtcttcagaggacacggtaaactatgttctaaactctttatgttgttgaattagcttagtctagaaaggttaaactttcggtttcttaaaggtttgaatcttgtcgttaactgtctttatgggtctagaaaaagcttttgtttttcttttctgaggaacttttttcatggttttgtgcttctcttagttctcagttctctgtctgaatgtgaagatgtgtactttatttcttgtggatgagatctgttctgttcattttcaccgtcttgttgtgtttgtcatttgtgtgttatagctcactgatttcatggttagatttgaaactttgtactcagattcttgatgggatgtgtaaaagctcactgatttttcactgttttatattaatatcagacatgtatcttacttatatcttttcatctttcttttatataaccacagcgagcgattccgtacgactttgtgataaacttctctgacaatgagctctccggagacatgaagttcagagtgcaatggggaaactcttggaaagtaaaaatctccaagaacccgagattctacttcatggagaagtctggatgggagaagttcgtgatagacaatgccttgggagaccacgagtttcttaccttcactcacaaaggacagatgagcttcactgtgaaaatcttcaacaaagatggcaaggagatgatgcaacctccgcaatccagagcctctttcgcttcttctagtaagattttgattctctgattatgaaacagtgaaccggattaaagacattgattcttcatacttttgatgatgaaacaggtcgtgtcaaaacagaacaagatgtcaagagggaggaagaggtgttggtgtcttctgactcgaggtctcgtggcccgacaacagcagctgaaactaatagaggaggcagctacaaaaggaagctcaactttgggaagaagaaagctgaggaaacccaaacttacaagaggactgagaggacccaaaattccaagaggacggagagagtggttagtaaggagagagtttatgcaggcgaaccttcctcttctgttgcaggattcaaaatctttatctcgaaatcatacatcaaatccctggtatgataagagcactaacacacagtttctgatattggcttttgtgtcaaacttgatatgttaatgattgacgaacaaaattggtttggtttttcaggcgatcccgaaaccttttggaaattatatgccgaaggagaaaacaagggtcaagatccatcatccagatggggagaagacatggaaggttgtttttgtggtaaaagagaggggtcaaattttctctggtggatggaaacgtttgtgcaaggagtatcctgttgtttttggggacacttgcaaattcaccctcatcacaccactcgagctgcttctagttgtctcaaagccataagagagaataactcactgatgaatgatgctgatggatgtgaaggtgccttggataacaagcaactgaagtaaactacttttatgtttaatggtgttagtttggttatgtgaactttcctactcgtctgtagctttcatatgtttgggaccaatttttatttgtttcgtgtttccgtgagacattaatttgctttctcttagttatattcagcaaccaaaatctgttggaactttttttgaggcagattccaaattttagtttagaacagaattagtcaaaaaccggtttgtaggatatatgggcccttttgtccaaaaaaaagagaggatatatatgggcccaaagcccaaacccagtaggcgcttcacagagttacagtctctcctcctcctttagggttcttctctctgttcagagatcacttctccgacgcagaaatgacgaagttcaggaagcttggtcggccggcgggtcaccgtatgtccatgcttaggtttagtctccagcttttctttttgctacgtctcactttctttttagatagaaatcgtttgatttttgaagtgttggtatcactcaggactatggtttctcagttggtgaagcacgagcgtattgagaccactgtcactaaggtattgtactgattctctttctcccattgtcagggtttaattagggtttatagaatctgccattttcctacgtctaactcaatttcatcagattctaatgtctgttttgtggaaaaaggatactccttaatagcaaattccgattcttgagctattttatactcactgtgaaacgtgtgtagtggtatttattgattgcaaatttatatgctaaagaaaaaaaatggattttgcaggctaaagaggttcgtcgtcttgctgataatatgattcaactcggcaaagaggtatttttatgtttccttcatgtctttgatactgttgttgaactcaaagagtttcatattattcgattactgattgataacattccatcttttgtatcacactatatgtgccagcttttaagccctactaagttcttctcatttctaatcagcagtactatatggtctgatagaggtgttagctcgttatgtatgataacttcatcttggtgatgaaatttataggggtcactctctgctgcaaggcgagcagctggttttgtgagaggagatgatgtccttcacaagattttcacagaactggcacatagatacaagtgagtcttcaaattcttttggcatcattttaacagtccattgcctaagcgctttgcattatctggatatatattatttgttacagagatagagctggtggatacacaagactgctacgtactcgcatacgagttggtgatgctgctcctatggcctatatcgagtaaaactagtttcttttctttatcagtctttctggttttacattcatatctccatgttagatcaaataagaagtgttaatgatttggaagctttctggtgaactaatttggtcgatacttgatactttggataggtttattgacagagagaacgagcttaggcaatcaaaaccagcaacacctcaaccaccgcaacgagtgccattggacccatgggaaagatctcggctcaccaggcagttcgctccgcctaaggaggagaaaatccctgattctgagctgtaatgtggcataagcaatttccctctgttcaccaaatatcttgtctctgtctcaaaaatgtattttcgtgatcatttatcatatgccacaatatgtttttacagaaggcaaacaataagttagctttttcatttgtttgaacattgaaaatgtactcttgaaaacattaacaggcttagagagactctttctttgcctatctacctatgaactaaactgttagtaaaaaatgttactctctttttcttgctcctacaagattaggttagagtttgagatgctaatctcttaatgtgtgccctatgatcgaccaaaagcagtaaaatttatgtacctaatgcatggaccttttacctagttaactatctttaggtgaactacttaacagaacctaaaaccccaacttgattttccatttgaaacctactcttgtttgaatttaatgtttatttacctgccctttaccagtttctgcgacctgcatcatcctcctgacttttacagccatctctaaaccattgagatggtgataatgataatgatgatgatgatgtctacttcgttgaaaacttttggggatttcgttttcttacaacaaattctgctttaacgtcaagcaaaacgcaacttgagatcctcctccatacacatttatgattttagcccaacacgctatatatggaatcattccctgcatacacctataggcaaaaaagttgctttcttccaagttttgaaactttattgttttacttcaattagtcctaagactatgaactctcaattgatataacatgaatgcaatgtttgcttttatgtttaaaacagtttatcaactaaattacaatgagatggttttcttcttttaaaacattcctaaaccccttatagtcttaaagattgatttaagcagacatcgaagcccactcatcagcctgaataaagttagccaccgaatacacatgaacatgctcgtccggtatctgactgctccatgaaaccctttgtgacctatctgatcccggacccgtgttcttagattcaccgtaataaagtgtcttgagcgcgaaatccccgctccaaggtaaccatccatcaggagtaatcaaagcctctaaattacaacctataaacacagtccttgagtaatctttccatggcctccccaagaagttcttatgcaccttagggttagctttaaacagcttcatgtactcctctgttccgttaatcaaacagttcaagaacacgaaacccgtggactgggacgggtcaatccttccttgggcagtgactgcgtttttctcgcccttttcagggttaatttgacgcggtgcgattaggatttcacagtcttggaagacagcagctgaattcccaaagataaagtcaacatttccttggatacgacagtttttgtagaactgacgaagaccatgggcatagagagtgtcttggttcccaaggaactcgcaattctcgatcagagaaaaatcgctgtcggatctaaacgccaccgcttggtgagcgtctggtcccgccgtgttctggaacgttagatcacgagccatgaatccatctcctaccactcctaaacaaaacaaaacattcaaatcacatataaattcacttttggcattactattacaattaacaaaaaaaaatgattaatatgcttatcattttggaatagctcatcaaaaaagtattctttcacgtgaccagacttaaaccacataatatttatctacatctaaactctaataacaatattaaaattatgaactttcaactcttaatttatacaaaaaaactatgttgctttaacattaaaaagttacgagagacactcaccgacagttgcagtattgtacgtagtgatcccaggcataccggcgtttaacgaacctgtaatgaccgttttgcccataccgtcaccgataaacacaacgttcttcttctcaaacggaacaataacgttctcctcgtagactccttcgctaatctttataacgaacttacgcattccgttatcctccggcgcagcgttaacggcgtcttgcaccgtcttgtaaccgcattttccgtctttacacaccgtcacgtcttcttttaaaccggaaggaaaacccaaattaagccctgtactcggatctaagcccaaaccaggcccagtcttttcccaaaacccgtcacgttccgttgctgggtaagtccacgacgcgacgttgtctccgaagttatcgtacgataccatcatgctaagcgcgttgctggtgacgtggataagtccgtcgagaaacgacatcgtttcacctacttggctcgtgtcgttgacgtacttgagcgctgaccatgaatcgtactggtacactagagcagcgctcatccaagctcgagcgtctttgattttgccacgtgttaaagcttgatccgtcgattgagtgcggtgctcggagtaagtgagaagctggagacacgtgttcgcggcgtttgtacggtttagattccctacggacgagtctacaatagacttgatttttgattgggcggttttgaggttttggaatgagaatgagatcgctgagtgaatgatctggattggtttaggatccggaggaacccgaccctgttcggatagggaagagacgcattggtctgggtaacgagttgcgttacaagcgagacggatctgagcggcgagagacgacgaaggattgaccggagaagtgtcgccggaattgtggtggtggtggtgacgggaggaggaggagggagaggagaagaggaagagagagaagagaaggatgagaatggaggacatggttatgattaagagacagaagcaacgtattggggattttctgcggtgaggatgatgatggagtttcgaagaagccattagagacgaatgtgtgtgtatatatatgtataggtgtgtgtgtgtgtggaaattaattaaaattttggaaagaaataaaattgaaataaaaataaggagagatggattacaagtcacagaccattagagagtcacgggcggtgcgtagtggaacactatgggggggatcatgcgcgcagagacggagaggagagagagagattggagttttgtgactgtcctttttcgtaattacggttctattagggaagataaggagattataatagattgtccggttaagaccccggttatgtattggtttaatgtgtttaggtccgtctcacgctattgatcttgattcttgacttgcggttggtaattgttgttttcttagtttttctttttttttcatttttcctaatatcgaattattgtttattttgtttttggattcttattttatactccctctgttcctaaaagagtgatgttttgggtttttcacacaaagaaaagtaatttttatattatttatattattttctgttaatttaataatataagtcttatttctctcctctctctattggttattaacaaaaataataatattattaacctacaacatcaatctttatgaaacaaaaataaaatctaaaacatcaaatttcatggaacaaagggagtatacgattaatagtctaattttagtaagcaatcggctccaaacactaatctggagattagaatatatgttgatttggttaggtttggtattagcaaacactatatcaccagtttcaagactcttatgtctattctgcaattacagattttatacatataaatgtagttaaaattttgaatttttgtttataatatactaaacttgtaaattttaaaatctaacttgattggaggttatatctttagttaatttgataattacatttaaatctcaacgtaaattatcaaacgttaaactagaaagaaatctgaaggatgttagaaataaactagtttcaacaaaaataacctaatttttttgatttcataatgaataccaaataggcaattacatactaaaatctctgaaatcatttatctcataagtttttatatccaacatgtttggtatatgtatatatttttggtctaaaataacataaccagatgtttgtagcggcccatatttttggctcgtataagcccactaagatggattctgcacctttgccaatgacccaataaaataacttagggctttaaggttccaaacccacaattaccatcctcaggtaagtcgggggctcggggccaggtatgaattagtccaaatccccaagtttagacaaccgattttgagaagaatgttgttttcctttacgatttggatgttatatcttctcttgtttaatgttttcttttctttcttttttttttcaaaaaatttggtgttactaacatattgactaattaatattatttattacaaatccgttgtagtctagctggtcaggatactcggctctcacccgagagacccgggttcgagtcccggcaacggagatttatttttactaattacagacaaaatttacccaatcctagcagggaacatgactgatgttccaactaattacaggtttttggttatatatatgttttattctgtcccaattcttatactctttggatttcaaaaatgttcggttttactaggacttgtactgtaatttaagacgagtgggatcacatgcctctaagtaaaatgtgttaaattaatttaatctagtaaaaaaaatcatctgaaattggctaaattgttctttacttgaaaaaaaaaaaaaactgttctttcactgtccccactcacgatgattcaattaccctgcatgctcataaacctgagctaaggaattcctttttatagaaaaatgcttatcgtcgaacaaaatgttgatcagtggatgttggaaaaaaaagaatgttcattagtggatatattaatcgttgaatgttaaaatattcatcaaaacatataattgattgagtctatttggttttttgttaaatgagtctactgtctacttctcgtgtatgtagctacaatacggcattatgcgtctatgcatggatactggaaatacgtttgtacctgcaataatccaagaaaatgaaaaccctcgaagtcaatttcatatgtgtaatattcttcccctcaaaaacaaaagagaaagaaaaataaagtgaaaaactcattaaagagttttccataacactaacactttcggaccaaacaagagacttcttcacttttcttcactgcagcttcccatgccttgtaatcacttttttgtagactttttagatcctctcgcgaaagagaaaaaataaacatgttttttttttttgctactccattttaaaaaacttagcatcattactaatattataacacataatctaccctcgtagttatagaaatcaatacaataacgcatatatatcctacctttttcgtctagctttatttttcttaacttgatatatagccaatttgaaattttatttttggatgaattaagccaagtggtgaactggtgattacttatacattttcttttttggtttgatcatttttaatgaccaaacctaaccggtgaaattggagtaagataaagtgatatcactagattacaaagtgttcaaatttggaaagaaacaacactgagtttttctttgtttgttcttctccatggtggaagcagaaagaggaaatccaaaaaagaaagaaaaagagaagtcgctgtaagagaccagactctgaggaaatgagggtgtggttctttgggaatcgtaacgcacaaagacggaagattgtatcgctattaataaaaaggaggaagaagcacaattgctgaaaaaaatagttatatatgtatggcctatatatatatatagttatttaatgcttttttatgtacgcgataatttggatgaaaataatggagattgtcagattttatgattcaatcttcatcggaaaatgttgcatagttatttcacccactcacgtgtatatgtactatatacatttacactagattcatctagttagggtttacggttacactttatacacagacgaaatgggggccgcttgagctgtcacatgtttaaaccatatcataatagataagctagtgataatttgcttaaaagaaaacatgatttagtaaatcaattgcattcaatttttgtttattacaactcggtatacatttcgaaacatattatacaagctttataaaccattatgatatttcacatcacagttgcagaaatgtacatacaaccaaaaaggaaaaagtaataataaaatactatatgtattctaaatgaaatcatagatttaagaagtaaattaaatttatgtgtcttatatattctattattttacatgtttttgtggaaatttagaaactagctgtccaaaatgaatcatttaactttcacatgtatgaaaaatattaatagacttaattaaaaaacactctaaatttatgatcaggcaataaaaaaattgttcattgctccaatccatccgaatttgtattatataaaatacatggcaaaataaaacttcttttaactaaactatattatattataagtcttgctcatgactgttatatactttaataatatgatcgaatgctagctattatattaaatacacagttactcttttaattgcggttttcattttaaaccgctataaatgcgaaaactatatagtgtatacttatatcgaatcaaattaatttccaaaacttgtgtgtgtataagtagatgttcatacatgtagttggcagttgggtggatttaataagaatataatatacagtgaacaatggattaataccaaagaagtaaccctataatgcatgattgcagcctgcatgcgcaatttgtatgattataatgcagaccaaatcataacatatgtgcaaaatatacgcttatatctcatatatgtacatatacatgtgtatttatacattgcttttgtgttgaggcatatgacataagaaacttgtcacattaaatcagaaccgtctgatttttgtataaacggatcgaaacaacgtatataaatttgcctcttttgaagtctcataaaatttcgtgtattttacggatttgtgtttgttttatacacttgtatacaagaacgttgttacgtagatgtgaactttgttaataaaaagcagaaattgcttcatggaaaatgatatattcaccaccgtcttatataaacgagtcacgacgatgatacacgtctttcttattaatgacaatcatggataacacccaaatgttgaagaagctaaggtgtccccatgcgagtgatttgatgtttgttatccttataaacctttaatcacgtcgcaagttatagaatagctttgtggaaaaaagcaagttgatcatttgttttataataatatataacattgcgagtttcacacacaatttacattcaatattggactccatcgaggggagagagaaaatcacgaccgttgatcgggataagagtataggatcaacaaaatgtgctatttcgtgaagagacaagagaatgagagaaaatttatcaagatttcctattttagtgaatgggttttgtgaagagagaaggagataattaaagggattgtaaattgagaagtcagaataagagcacacaagtggtgacatcttttgtgaatcaaagagaaactcatgttcatataaagtaattcacattcttatagctagtggttattagtttattactttggtgaaagccactttctcgatataccctaaattcaagtctcaatgtgggagagggaaaccctagccaactcaaaactatctcattagtcaactggagctgctcattaaaaaaaaaaaaaaaaaagcgattatgccaactatatgtatacaaaagtgctacaacgtttataaacattttcggagcataaaaaaacttcttattcaactatatacaatttaatctttttctttggtaacgactagtgacgtccacttattgaaaagatacatataaataaaattattctttattttttctccgaaccaaaatccttaattgcatcaccaacctaacccctcatcatatgatcacctttctttttttcctttaatatatatatatgctcacacacacacatatatatatacatataagcatcgcctcaagcattaaaatttttacgaaccaaacaaacaaaaattatgaataattataatatgaacccatctctcttccaaaattacacttggaacaacatcatcaacagcagcaacaacaacaacaagaatgatgatcatcatcatcaacataataatgatccaatcggtatggccatggaccagtacacacagctccatatcttcaatcctttctcttcttctcatttccctcctctctcttcttccctcacaaccaccactcttctctccggagatcaagaagacgacgaagacgaagaagaacctctagaggaactcggtgctatgaaggaaatgatgtacaagatcgcagccatgcaatcggttgacatcgacccagcaaccgtcaagaaacccaaacgccgtaacgtgaggatctccgacgaccctcagagtgtggcggctagacatcgccgtgagagaatcagtgagaggatcagaattcttcagagactcgtgccaggtggcactaaaatggatacggcttcaatgctcgatgaagctatacgctatgtcaagttcttgaaacggcagatccggctactcaataataataccggatatactcctccgccgccgcaagatcaagcttctcaggcggtgacgacgtcatgggtttcaccgccaccaccgccaagtttcggccgtgggggaagaggagtaggagaattaatctagacaagatgacatttccattagtagtaactaaattatgctataatgtgtgagtaatggtgcaattatggaaagtgtttatatataataaaaatggatacgaaataagggtttgttaggatatataatatattgttgttgaccgtgaaaaggttgtggaataatcataacggttagcttgagttgtgtaccaccatatatttaatattatgttatcatttcgtatataataataagttcttgatttggagtttggttgtatacaagttttggccgggcatttttcgggcataagaaccatgacgccatcaaagaaccctatttaaatagtgttatcattactgtggacttttgtctttgtatacacacaacgcatatatttgtgaagtactatattttagagcatataatatgaatgtactctattgcttcattttcatctttttacgtacatacctcactttgaacgttaatacctatacatattgaaaatcgttttgttatgattagaataagctttaagaattcctaaattacaataagctttagggctttttttttaatatatagcttcacaactagcaacgaaaaatccaaaaagaaaaaagttgttatgaaaataatatccgtacgtttagtctattagattatacttgttagtatccgattaaacatcacctgaaaactaaaaagtctaacagactaaacgtatccgattatacttgttgtaaaaatgttaacgaaaaatgtttagctatagtaacgtttagcataatgaaaattacgacaatcatcccataaaatgatgttttgtaatataaagtaatctcaaattacaacaaaccgataaggtatacagatactctactccagaaagagagtatatatcgagacatattataaagaggatggtgcagagaaaatgtacttgctcgttttgtcttcgaattaatgaatagaagttcaactaaaacagttgcaagatctctttttaccttcccaataataaaaagaaaacctttgactacaaacaagcattaaaccaccagagctttgctccacacttgttggtcagaaaatctcagaaaagtagcagagaggttaattcaaggaaacctatgctccttgttcacttcactcatggatacttccgctgacttttgtgtctcctcacattcataggttttaataaagacacaatgaaatgtcagtgagattcatggaaacctagctatatccattttgctaacgaaatcatttaatatattttctttctttttgccacatagttatacattcattcacatcctagagataattgcaagaacttaacgtctaaccaaattatttagctcaaacaatgcattaatagtcactaaatagccatgggtatgattcatatattttcaaatctaattcgttttactacagaaatatttcaatgtgattcgagataattcttacatgatcaaacaactttctaattttatgaataaactgtgatcccggtgaaaatgtatgtacttcacaccattaaatatcaatatttttaacggcccataaatataggcccaattatgtgaaaagttactaatgggcctgatttatttcaagtgtccgtttttctctctctagttctcttactcgtatgagaaagaaagcccacccgggaatctccgacccgaccgagaaatgggatcgtcagcgaatacagaaaccaacggcaacgcaccgccaccgtcgtcgaatcaaaagcctccggctacgaacggcgttgatgggtctcatcctcctcctcctcctttaactcctgatcaagctattatagagtcggatccgtcgaagaagaggaaaatggggatgcttcctctagaagtgggtactcgtgtgatgtgtcggtggagagacgggaaacaccatccggtgaaagtaattgagcgccggcggatacataacggcggtcaaaatgattacgagtattacgttcattacactgagtgtatgtcgtttaattccttatcaagttttgatgtagggttttcaattttggttgattcgtactgttgagcttcacaaaggtggaaatttagtcaagggtttataatgtaggaagaaaaaagagttaaattgcaagactttatcaattggatcattggaattggcttcaagttgtgtgagatttttgagaaggagatcaaattctgcattatactttgcttctaaagattttgaaccatttatactattgtgattaagctgagtaatatgatgacaaagttggtgattttgaaatcttatgatcatcaatgtgtttgattttggtaatttgttttcgaaactgcagttaataggaggctggatgaatggactcagctggaccaactggaccttgattcagtagagtgcgctgtagatgaaaaagtggaagacaaggtgcgttctctagttttgtattgttagttgcataatgtggatttcatgagttttctcatatacgtttagcaatgagcagagatttatgtctgtggtttctaggtaacaagcttgaagatgacacgtcaccagaagaggaagatcgatgagacacatatagaggtaatgaatgccaatataaggcgggtcctggaaacgtaaggtttgtgttgattcagtattctgtgtttcgaaatgtttttatagggtcatgaagagctggatgcagcaagtttgcgtgaacatgaagagttcacgaaagtgaagaacatatcaacaattgagcttggaaaatatgagattgagacttggtacttctccccttttccgccagaatacaatgactgtgtgaagctctttttttgtgagttttgcctgaacttcatgaaacgcaaagagcagcttcaaaggcatatggtgagcaactgtttttctttatctttgaagtcttatgatgctttttaattacatttccattgcgagcttcaatagtctggtttcacatctgtattctatgtttttgcattccagtttcattgctgaagatagtacccaacctttcagattctgttgaatattgtcactgacttgcatatccacattcacggttcattaaagttgcatttatatggttttattttatcttgtagcttttgtataatttccttacttttttcctgcagaggaagtgtgacctgaagcacccacctggtgatgaaatttaccgaagtggtaccttgtcaatgtttgaggtaatatcctgagataggtctctggtcttcttgctctggatatgatgtatcgttagctttctcttatgtttttttttttcgtatatggatgctgattagtttatctctcatctggttatgttctacattagcaggaacgtttttctctaaccgtactctcatcttacaggtagatggcaaaaagaacaaggtttatgcacagaatctctgctacctggcaaagttatttcttgaccacaaaactctttactacgatgttgatttgtttctattctacgttctttgcgaatgtgatgaccgaggatgccacatggttgggtacttttcaaaggtaatatagcaaagtagttacatatatgtttggtttccattttcctgtttgctcataaacgtaacttctactgggtccaggagaagcattcggaagaagcatacaacttagcttgcattctaaccctgccttcatatcaaagaaaaggctatggaaagttcttaatagccttttgtaagttctttgcccatttgacccttttgctcttctcaatcccatgtccacaaaaataagtaacagattgttcttctgagttgcagcctatgaactgtcaaagaaagagggaaaagttgggacaccggaaagacccttgtcggatctaggcttactaagctacagaggttattggactcgtgttctattagaaatcttgaaaaaacataagggaaacatttctatcaaggttagattgtgtttcaaactgataaaaagtcttaggctaatcctggtttctgcgatctaagaatccactcatctgtctctgtttcatgtatgatgatgtaggagctgagcgacgtgacagcaatcaaagcggaagatatattaagcacacttcagagcctagaactgatacagtacaggaaaggacagcatgtgatctgtgcggatccaaaggttctggaccgacatctgaaagctgcaggccgaggtggtcttgatgtagatgctagcaaactgatttggacaccttacaaggaccagagttaagagtaagtacactcctcttgtgccattggatttgatttgagtgtgtaagtaaagcgggctgtcttattctcctgaaatgtaagtgtactttacttgtaaatgttgaaatcgtacttggaatggtgtttgtttacaactcttataatgaggaaatttgaagcaatttcataggtccatctttcttttgctagtatgtatgtgatcatttgtatttagtatatatatatatatatatatataagccttagttgtttcaaatgcatatatttgcattttctgttgcggttttgtgtgaaaatgttatgttcataatcacaagatacattgttgacaaatatatcaaacatatttttcaactagtaaacgatatagtatagcaaacataaaaacaaggttggacaaaaatgaaatagttgcaagttattgaatcaaatattcaaatgtgcgtaaacaaatgtttcacaacttagaaaccgtaaaagttggaatctctgaatctaacgcaacattgtctgcgaaatttggccaagatatgaactaggtgacatagtattttggtttatgattacaagaaacgttgataaacaatcagttcagaatctgtctcttttacaatatgttgtaattttatagaaaatgtcaaaatgatgttgatattccacgataaagccaactcaaaaatgtcgattattcagtccacatcatcattcatgaccaccgaacctacacttttggtattaggtttattggtgccaatgtggtccatattccatagttaacatttatgtatgtatttcacttctttacccaaacatatatatccaaatagattcttcttcttcttttgttgacatgtagggtgggaatttaagtttgatacacaatatgtaaccatacaatcagattttgcgccagattttcgtagttttaagtagatgaccaatcgctatcagtattcaatatcttacataaacctagaacttaatgtaggtcttgtggttgctaaatagatttataagatttaatttttacgtaccaaaattaagtttttaccatcagaaatatgtgaaatattgtgtattgtggagtttctgtagactatagagaacaagttttcttaaagttaatatatatgtaagttataacttataagatgttctcatatgatacattagacgacgaaaaaaagttattctattgtaaaaatttccgagtttgttaatgtattgtatcgtgttcaaaaagggaagatatatatacctctgcgtggctgcatattttatggggtgcatgtgtctccactcattttttttttaataaagaatgttttacaaagaaaataagttttggaaagaaatgtgtgaaaattcttataaatatgcttataatacataaatcttaagctcttaatttttgtctgtttagaatagtatttttttttttgtactaggaaatagaatcttaatcttaccatgagatgtacaactatgtgatttactgtttcgtagaattgttttacagactatattataatttagtgtactctcctttttattgcatactgaataagacacgacaccttgtttcttattgcatactgtactactactctcatctttttgtttatgtcgaaattagatatgtcaacgaccaatcacgagacagcagtattctgcattcaatcgcaaagttgctcaaaatgtctgcgcatgactttgaaagccgcaacgctactaacgattcaataatacccaaaatagaaaacaccttacatcttgtttttattcaaaatcagatcgaattattatatgctcttgcagctttctctgttaccaaataccaatgcatttgtaaaccatttgtgttttcataactatgtctatgtaacctggatattttaaataaataaataaatatatatatatatatatgtccaaaatgaatatcctactatattatttgggaagtacattttaaatataaccttattttttgtaagtaattacataggtatgccattagaaataaaattttaaagagtaaattaattcatttctttaaaaattaaaaagtcaaatactaatttaattaattaaatttaactcaaaaacgaaatacattattaatttccaaaaaagtaaccaattaaaatcaacaaattagatttggtatctaaattatcatattaattttttattaattattatagttcacctctcatctttatatgattctatttttgcgaaaaaataatatcatcgttataaaaaaataattagagttttttcgcatatgccacaatttgaattatcatattagattttttaatgtgtatgatgtgattcaatttttaatacaaggtgaaaaatcctagaattgacgggtttaaatcaatattaatacaagatggtatactacaggtgaaactataaaattaacaatcaaaatacaagtatataattttaaacactaaacaatataaataatatcaacaaaacatatacaactcgcagtttactatacatttaaaatcaaataaaataatatcatatatttataatcaactttacaataaaagtttttagtttaactaaaatataagcctacctgctgtataagtaataaagtcatatctattttatagagttataattttttataattaaatttatctataattcgaaatttaaattttactataatatgaatatttatagacctattattcaaatatttcactatcataaacacatacaacaaaattatatgatatattaatatgtagttatattacttatgtattttgaaacttgcctaacttaattgtaacaaacaattctttattccatatattctctcgttatctagtacactaaccacatcatgatatgctagtaattcaagtcaacactttaattctcttcccttgcatatagccatatagagtctcgtgttttttgtgtgggtatgtctaatgtctcggatgaccattacgtgaaaaatgtatatcaatgttaccaagttatcagaacgcacaaaaataaacagaaataaggtcatatgataaatcatattcatataacgtaataataaaaaaatatccaactaaaattactaattaatatgaggttaggtagcaaacatttaaactacgacacaaagtaaattttagccattataaattgataactattgataaaaatattttaaaaaataagtagaataaaatgaaagtagtacttgatatattattataattttttatttattgaatgttttaagaatatttatttaaaagagagattatatagaatttaacacaacaaaagacttttgattcttccttaattaattgtattaattttttatttaattaatatagaatgacacatgtcattttcttgtatgatgatgtgtcacttatagagagttgaccaactttcatatatatgattttgtctttataactaagaaatattacctcacgaccatacatagtcatgcatttctatctgattttcagagaatcaaatttctttctcgagtcaacgaatttccctgatttcatttagataacctttcttaacaaagagcaggaaatgtcattattattcatagtgacattttatcctcaggatttgataattttactttgaccattttttaatttattacattaatattaaggtatctaataccaacttaccatcattttactttgactattttttaatttattggtattcaacttctatataaatacagtaatatatacatattcaacttttaaaaattatattccttagtttaacaattttccaaccagcgtacagcttatattagtatatatatacaacagtaatcaataaacatcaaacacaaaccacaacaaaaaatctcgagacaaagatacaatggcgagccgaaacagagcactcttctctgtttccactcttttcctctgtttcatcgtctgcatctccgagcaatcgaacaatcagtcttctccagtcttcgcctgtgacgtcaccggaaacccttctcttgccgggcttagattctgcaacgcggggttgagtatcaaagcccgagtcaccgatcttgtcggaagattgacgttggaggagaaaatcgggtttttgaccagcaaagctatcggcgttagccgccttgggattccgtcttacaaatggtggtcggaggcacttcatggcgtctctaacgtcggaggtggtagtcggttcaccggtcaagtccctggcgccactagcttcccacaagttatactcacggccgcttctttcaatgtgtctttgttccaagccattggcaaggtgaaagaactatctccttcttcattttctctatttttgggctacactgtgaaaactcactcattatgcaaaatggaaaattttgtttcttaggacataagtaatgatatatcatattttcttctcaatgctttagacatgagtagtttcttgcatctagttttaatttatttttatccatatattggtttaaggttgtatcgacagaggcgagggcaatgtacaatgtgggatcagccggtttaacgttttggtcacctaatgtgaacatattccgggacccgagatggggaagaggacaagagactcccggtgaggacccaacactctcaagcaaatacgcagtggcctacgttaaaggtcttcaggagactgacggtggagatcctaaccgtctcaaagtcgctgcttgctgcaaacactacaccgcctatgatattgacaattggagaaatgtcaatcgtctcactttcaacgctgtggtaagaagaaagagtttttttttttttttggattctttgaatattttgtaacttttgttatttgtcgcactaaatacatttcaatgtttcattctgtttttcgtgttatgttggattaggtaaaccaacaagatctggctgatacgtttcaaccaccgttcaagagctgtgtggttgatgggcatgttgctagtgtcatgtgttcttacaaccaagttaacggtaaaccaacatgtgccgatcctgatctgctttccggtgtgatccgcggacaatggcagctcaacgggtaaggttatttggatccaatggtttaattttatggagggtttggttatctaaaatcatcggttgttttttttgttagatacattgtttcggattgtgattcggtagatgtgttgttcagaaaacaacactatgctaagactccagaagaagctgtggccaaatctctattggcaggtttggatttgaattgtgatcatttcaatggtcaacacgcgatgggagcggtcaaggcgggtttggtaaacgaaacagctattgacaaagcgatttcaaacaatttcgcgactctgatgcgtttagggttcttcgatggagaccctaagaagcagctctacggtggtcttggtcctaaggatgtttgcaccgctgataaccaagaactcgcaagagatggcgcaagacaaggcattgtcttgcttaagaactctgctggttcgcttccgctctcaccttccgcaatcaaaacattagccgtgatcggaccaaacgccaatgccacagaaacaatgatcggaaactaccacggtaaattgaaacaaacataaaagaaacacaagtgattatcggtctccatgattcagttttcaagcttaaaatgtgtgaaactgagattgtatttatattcaggtgtaccatgcaagtacacaacgccgcttcagggattggcagaaacggtgtcgtctacctatcaactgggatgtaacgtggcttgcgtagatgcggatataggctcagccgtggatctggctgcttctgcggatgctgttgtgctcgtggtgggcgcagaccaatcaattgagagggagggccatgaccgagtcgacctgtatcttcctggaaagcagcaagagcttgtgactcgagttgctatggcagcaagaggaccggtggtgctagttatcatgtccggtggaggatttgacattacattcgccaagaatgataaaaagatcacaagcataatgtgggtcggataccctggtgaagccggtggtctcgccattgctgacgttatcttcggacgtcataatccgagtaatactctgttctacagattcaaccggttttaatctcccggttcggttttaaaattgcaatttctctaaccggtaattttttttctggtaggtggaaatttgccgatgacgtggtatcctcaatcgtacgtggaaaaagttccgatgtcaaatatgaacatgagacccgacaaatcaaaggggtatccgggtcggagttacaggttttacaccggagaaaccgtatacgccttcgcagacgcgcttacctacactaaattcgaccatcagctaatcaaagcgccaagactcgtctctctcagtctcgacgagaaccacccttgccgatcatcggagtgccaatctttggacgcgatcggacctcactgcgagaacgccgttgagggaggatcggatttcgaggttcatttgaatgtaaagaacaccggagacagagcgggaagccacacggtgtttctgttcacgacgtcgccgcaagtacacggatctccgattaagcaactactaggatttgagaagattcgtctgggaaagagtgaagaagcggtggttaggtttaacgtcaatgtgtgtaaggatctgagtgtggttgatgagaccgggaagaggaaaatcgcgttaggtcatcatcttctccatgtaggaagcttgaaacactctttgaacattagtgtttgattcgacggctcgttttgtttttaacttaagatattaattatggtaataaaatgagatagcaattttaaaatcttacaaaaataaaaaaatggtggttcaagcgggttacgagccagcggaccatagtggatttgtgtggcgtcgaaccgttgtccgtccactgctgagagcgggaggtagtcgctgctctgtgaagccagcctaacgcaataccctcaacctttagcaaccgtacggatcaaaccttcgcttggttcatacggttcactcacagcttggattgggcagtccagacctatgccaacaacaaatccgacccgtgggccgatccagtgttccaccatcttatagtccccacttgggttacaagctctcgttacatagctcgacgttaagaagttgatttaatgagatatataaacaagacaaattatgagtagagaaaccgatgtgggatattggagaagtttcattgtcccacgattacaaattatcgaccaaacttatatgaagataatagcatataatagcatatatatgtttttttttaaaatgttttaaaggatgcttaatatcagttgttagtaattgtgaaggatgcttcgactccatcaaacctcagtacaaaaatctttgtaagtcaaagatagttaaggatgaaaattaacaaaaagcaaagcattcaaatgtattgattaaaaaacaaacatatactatagtgtgaacctcgaaatcctaatatgaaaatggttcttgtctccctcgtcagattttgaataacccattaaaataagaccgacgactttagaggagttatatgaagaacaaaaggagcagataacggaaattccgcttttcttaattcaactgggacaaaaggtgcttttagatatcgggtttaagcagtgaagagtcgaagatgttgcctaacgaagaacttgttccggtgaagaggattacaccccagtcatcgtggagttggatttccatagacgcgacgggaaaaaaaacggtgcttgacgttgacaaatatgtgattatgcaccgtgttcagatccacgctcgcgatctccggatacttgacccaaatctcttttacccttctgctattctgggtcgagaaagagccattgttcttaacttagaggttgggacttgagacttttgtgtttctcctctgtttttcatagttttcacagctttgttggttaatcatgtttgattagttcctgtgtgtttcggtcctttgtagcatatcaaggcgatcatcactgccaaagaggtcagtctcagtgtactttgattgacttgggcaaacattaaacttgttagatttggctcatagctactgtgttaaattggtcataatctcggtggggttttgatcttgtttgcattatagactgcttagagcattaggtgtcagtgtgcttaactttaaacaggtttcatcatgctagctgatcttatgtaatagttgaagctttttctctccttcagaagtgatgatggattgggttagttatttcaaatgtttacaggttttgattcaggattcgtcagatgaaaatcttattccaaccctggaggagtttcagacacgcttatctgttggaaacaaggcacacggtggtcaattagatggtgatgtggttgaagaagatggtagcccttgaccttagtcatttttagaactcaattcttgatttattcttgatctttttgatacctatgttctataaatatcgtaagaaaaacttgtcactctttttacttttggtattaatatgattgcttgatactatatagaatccgcgtttgaatttcgggcactagaggttgctttggaagctatttgtagcttcctagctgcaaggacaatagaattagagaagtctgcttatcctgctttggatgaacttaccttgaaggtagctaacttcgaaattattgtcctcactgatccatctctaaccacatttaactctatttcagtcgatgagcaccgtttcgttttgtagttaactagccgtaacttgctaagggtttgtaaattgaagagttccatgacccgattgacagctcaggtccaaaaggtgagcaggaatcacttggaacagggtctatgtttagaaaagaaatatatttaggagttatgcataaggttcatgaaaattaaactatttcttaagtgagtcatacatgcactgatcttgttctgcttcacatatttcaagtgaacctcaaagataaaagagttcaaagactcattgaaagaaccatcaaaactggagtatatgcttttgggattataccgagtgaaagttgggtctaaatcagaatatgatgtggatttgcagataaaggatgagcttgaacagttgttggaagatgacgaagatatggctgaactctacctttcaaggaagctcgcgggtgcatcttcaccagctattgattctggtgaacacattaattggtatcctacgtccccaacaataggtgctaagatttccagagcaaagagccatttggtgaggtcagccacggttcgtggggacgacaaaaatgatgttgaagaagttgaaatgttgcttgaggttgtttattgcatgaatgttgcacatatatatatttttaccgacaaccatttgatttattttgttattgttttacaggcacacttttatgcaaatcgacagaactttgaacaaattaaccgaggtactgtatcttcttcttctttctttttttttgttgataaaccgctagagttctggacctttggcacatagtctccctcagtgtcctgagccagtctttagtctattccgaaataagaatgtctttacatcccaaagggcgattgaacccgtgcacaaagaaaccaaccccctatggttgttccttatgttcttgcctctatactagtcaaagttctgaatctttgtgacatctttgactgatgcagctacgcgagtatgtggatgagacagaagatttccttaatatccaggttatggaaatttattctttatattttccagaactttattttttgaaaaaagattattttccagaattttacacatgttatgtgaaaatgtaatctctcttgtttactaataaatgtaaattataaccatccgtatcttgcagctagacagtagtcgaaatcagctaattaaggtgagtgaatatagaaattccaagattgttgaattagttcttagataaaaaatcaaaaccacaagtgctaatcttcatcttcgtctcacttgtatcagttcgaaattattttaaccgctggaagcatctgtgtatcagtgtactctgtagttgttggcattctaggcatgaacattcctttcccgtggaacatcaaaaaacatatgttcaaatgggtatgaaataacacttcaattccatggacctgttagtcctttcgaatttccgggaccctgatatagttggtgttttttgtttttatttgaaaggtggtgagcggcactgcaacagtttgcgcaatcttgttcgtgattataatgtcgttcgctcggtacaaaaagctctttggtttttgacgatggaaggaattgatactcgtttattgtaataaacaaaaaaactcgtttattgcgcaacaattctttttttgaaaccttatccagttatgatttttttaaatatgcggttccattaattcacgtttatgctgataccgtaccgtcgtattgtattttgctctcaagttcgctgacgattgagtgcttccgtttcacatttatgtttggctatagtgtagttacttagaaatatgaggtaactatatgaactagggtaaagtacgtaaacttaccaatcaataatgggaatttgtttaaagtaaacttagcagggcagacacactaggaaagtgggagaaatagcagccctgccgcgtgcatgctttgccttcaacaggaatatttttatcgacaatttgatgcgggatagtaaaaaactcctctgacaatttgaaatgccataagccagaaatagtataaattatattcccgcgaattacacggggtcaacaattaataaccaaataaagaaagactccatcctagatcttagactagattagaacgacgacttttggggaatcataaatgaaaaagaggtggagatggtcccaagaaaacccactttgcttaatccttacagagttttaaaatattccgacgaattcgtgacatttgaggggattctgatcctattcatcaactgggtgctgtttctgtataggtttgtcttgctgaattgaagccgcgagcatcagacggagatgtcgattgattcagacgtggatccgtcagaggtttccacggctaaaagaaaaccatcacggagttggctcctcatagacgctgcagggaatagtacaatgctcaatgtagacagttacgcgatcatacgccgtgtccatatctacgctcgtgacctcagggtcttcgagtcaagcatttcttcccctttaagcattcgaacccgagagggagccattgtgctgaacttagaggttaggccatttttgtttctgagttttttcttcatacattattgggttttctcaaacgtgttaatcatttttggtattgcgctgtggtccgatgaagcatattaaggtgatcatcactgccgacgaggtcagtttactttctactcgctgccttccatttttactagactactttgtagtaggtaggttcgactttgattatatattcgcatgatcaggttaaacttaggagaaatgaaatttcatcaactcgtataatgatgatactctactctataatcttctgtcgccctctttttgttcctctgttcttgctctgttttatcctttgtttctttttgcgatagacgaactcgttagtttgatcgatccactatcttgtgctcggttcttggcttaacgtgaattttgattcgtaacagttagggtacattttctaaatatagaaaacttttgtgttggaatttggttcctcctacttgaagggttttcttttctctagaagaagtttagacaattccgaaacttgctaaagtgggttgatttcacgatttgatctcaatactaatttgttaagacatatattactttaagtaccatcaaattttaatgtgagttctctaacattctgtagctggaacattttctctccattaaactgatggcttagaattcgaatgtttgtctatgtgttggctatttcagtctctctttgttttttaacacgacatgctacaggttttgcttcgggagccattaaatgaaaatgttattcccgttgcgaaggagtttgagagacgcttgggtgttgaaaacagggaacgccgtggtcagccagatggaaaagaggactcaggtgcagaagttgatgctgaaaaagatggtaagtttaaacattacgatctcaaaacattcttgtccttttggcatatatatattttgtaatgcttttccataaaaaccgttctctattcgacttgtcgcgttgtcggtatctgatgtggtgtttccaatcttagaatctccgtttgaatttcgggcactagaagtggctttggaagccatatgtagtttcttagctgcaagaacaacagaactagagaagtctggttatcctgctttgaatgaacttgcttccaaggtagctatctcagcccgtcactcatacatttccaattgcgtttcaattttcatatgatgatgagaacaatatcatttttgtagataagtaaccgtaacttcggtaaggtgcataaattgaagatttccatgagttgacagttcgggtccaaaaagtaagcatatgattttctttttctaatttcgatagcatggtagacactcaagatatttgcctagagaggatatttatctatgaaataagcaaaagcctcgtgacaattaattatcgctcaaagtgagtagcttcattggttttcccgctatcatccgcagaagctatgtttccgggtggttgcggttgctagcgtttaaaacccatcatagaattcgcttgtaaaatgcttacataaacaacaacaacaaaaaagtgttatcaaaccctatatgtgttaaagttaattctcgaaacaaatatctcttttcttcatcaaaattaattatagcgtcaatccaaactgaaaaatgcaagatttaagtcttgtaagaatattgtcaattcggaagatgtacgaattcaaacacgtattgtttagtttctcacatttcttgatgcacattttttggtgataaaccaaatgcatgaaataataagcatttcaggtaaaggatgagcttcaactgtggttagaggatgacgatgatctgggtgatctctgcctttcaaggaagattgcgactacatcttcaccagttagcgattctgatgaacaaattaattcgtatcctacgtccccaacaataggtgctaagatttccagagcaaagagccatttggtgaggtcagccacggttcgtggggacgaccaaaatgatgttgaagaagttgaaatgttgctcgaggttgtttattgcatgaatgttgcatatatatatatatatttaccgtttcagctacatatggaacttaaacaacgatttgatttattttgttattgttttacaggcacactatatgcaaatcgacagaactttgaacaaattagccgaggtacttactgtatcttcttgttcctcgcctcttttctattcaaagttttgaatctttgtgacatctctgactgatgcagctacgcgagtacctggatgacacagaagattatattaacttccaggtaatggaaacttacactctctatcttccagaattttacacatgtaatgagaaaatgttttctttctcatatatattatatgtaaactataatcatcggtatcttgcagctagccagtagtcgaaataagctaattgaggtgagtgaatatagaaagtacaagattgttgaattagttcttagataaaaaatcaaaaacgttagacaagtgttggcttaatgtcctattcatcttcatcttgttctcccttgtatcagtttgaggttattataaccgctggaagcgtctgtatatcagtgtactctttagtcgttggaattctaagcacgaacattcctttctcatggaacaccaaagaacatatgttcaaatgggtatgaaatgacacttcaattccatggacctgttagtcattccgaatttaagggacctgatatagttggtgttttctttttatatggaaggtggtgagcgccactgcaacattatgcgcaatctttttcgtgattataatctcgtacgctcggtacaaaaagctcgttggaaattgacgactgaaagtgattgatacttgttcattgcacaactctttcttggaaccttaaccagttatgacttcttaaacaaatttcggttctatttcgcctttattctgatagtgcattgtattctcctccagagttcgacgataatgtagttaggaacgctatttttaaaatatgaagtacacggatcgccgaggaagcatcttttagaaccaagattcgtttaagagacaagcaagagacggtggttaggtaaggtttaagggcaatgtgtgtaaggacctgagtgaaattgatgagatcggaaagagtatagtcgcgttgtgtagcttgaaacattccttgagagccttgaccattagcgtgtaacaggggctgatacggtaaatatatttttaatggtcatatattaaaaggaataaaatttcgagggcttaaaaagaaaagaaattttcaccgtggacacctttctgacttttttttccacaaatagacaaagtggactggtccagccagattttagccattcagccaaaaatggacaaatttgccctggaacgagaaatgaaaggaggcggttcagtttcgtttctttatttttctggttaccaaaatttaaatttaaaattaaatcaaaaacacgttattaactttctgacaaccaaaggaaatcaaaaactgtttgtcgaagacgaagaacaattccgacgaaacacaaactccgatcgaaagtgaaatttcgattgaggctctgtgcgagttctagtcgttgcttaagttgagaaaatttcgatcgagctcgtgataaagtataacaaaaagaggattttctggtttcttgaattattgttcatactcaaatggcggagatgaagaagagtagtcggcggcgaggagttttggatgttaatgagttaacaagcggctgcaaaattagggttgcagaggttgaagacgagtgcaaaattacaattatacccttcattaaaaaaaaattgtacgtatatgtaatttacggtatacgtacacacacattactacatacattactaccgtgtacgtacacattactaccgtgtacgtacacattactaccgtgtacgtatatattattaccgttacgcatatatatttatatgatattgctaatcgtgaattgtcttcaaatgataataaataaaatattatttaaaatagaaataaacatgttagattttgttttattgtaaaggcggcatacaaaatatttattgagtttgtacattagaaacttttggttattttgattagataaaatatattttggggttttcatcataaatctattcatatataataattaaataaaaatatatggtcaaagtatagttgttcctcatacttttgaaaaatgttatgtatgtacatgtataataatgtacgtacatctttgttggtgagttaaaattgttgagaataaacaagattttaaactaaacccttaaacatacacgataatattgagatacacgtacacgtatacgaccgctctaaacagttacatcataaaaatgtataaatcacatcaatctaatactatgtacgtacacaaaattatttattggaacgtacatggtacaacattaaaatgagtttaaaaattctctaaccattgtctacgaaaaaaatttaattttattttttgacatccagattaagttattatgtaagttatatgtatgctgtatattttaatatatattatgcatatataatatttcaacgaatcgtactctcattcatgtaaaaccgatctcaagtgtcaaattcgccgaaaatccagaaaacatttaatgcatttctcgtcaatgaacagtgtacatacaaacccggttctcttggattccaacgatgtgatccgtacgtacaaaccgggttcagtttcgtcaagggcattttggtcagtttttggctgaatggctaagaaatgaaaggccagcccacaatgtcaaaatctgaaattaaaagtggatcaacggctactgtgctcaatttaccctaaaaagaaaggaatatattattttggtaccaaatcgcgtcctgggcgattggtttccacaaaccacgtccaaaatgcgattgactaacttacccttttaacagttttttaaaagtttcgtagttaagtcttctggttttcttcttcacggtcacgcctcacgagtcatgattgtcgccgtcgtctctttgataaaggcaaaaatcgaggaaccctaataaaaaaatggagcgcactacgagaacgtcgtcgagggagacagagaggggagaaataaaatgagttagcaatttaaaatgtaacgaaaaaaatggtggttcaagctgggtacgagccagcggatcatagtggatttgtgtgacgacgaaccgtggtccatccactgctgagagcgggaggtagtcgctgctctgtgaagccagcctaacgcaataccctcaacctttagcaaccgtacggaccaaaccttcgcttggttcatacggttcactcacagcttggattgggcagtccagacctacgggtttgttttaggtacattgtttcggattgcgattcattaggtattttgtatggttcacaacactataccaagactccagaggaagcggcagctaaatctatactggcaggtttggatctaaattgtggttctttcttgggtaaccacacagagaatgcggtcaagaaggggctgatcgacgaagcagctattaacaaagcaatttcaaacaattttgcgactctgatgcgcttaggattctttgacggtaacccgaagaatcagccatatggtggtttgggtcccaaggacgtgtgcacggttgaaaaccgagaactagccgtagaaaccgcaaggcaaggcattgtcttgctcaagaactcagctggttcgctaccgctctctccttccgccatcaagacgttggccgtaatcggaccaaatgctaatgtcacaaaaactatgataggaaattacgaaggtaaattcataacttatatcaaattaattttaaactcaaacctcgaacgtggatcaaatataattgttatgttttcaggcgtggcttgcaagtatacaacaccgcttcaaggacttgagaggacggtgttgaccacaaagtatcatcgtggctgtttcaacgtgacttgcaccgaggcggatttagactcagccaagactctagcggcatctgcagatgcgacggtgttagtaatgggagccgatcaaaccattgagaaggaaacattagatcgcatagacttgaatcttcccggaaaacaacaagagcttgtgactcaagtggctaaggccgcgagaggaccggtggtgctagtcataatgtccggtggaggatttgacattacattcgccaagaacgatgagaagattacaagcattatgtgggtcggatatcctggagaagccggcggtatcgccattgctgacgtcatcttcggtcgtcataatccgagtaagactctgttctccgatttgaaccagtgatttatcgaccggtttggttttaagattgtcattttcataaccggcgatttttttattggttaggcgggaaattaccgatgacgtggtatcctcagtcatacgtggagaaagttccgatgacgaatatgaacatgagacccgacaaatcaaacgggtatctgggtcggacttacagattttacatcggagaaaccgtttacgccttcggagatgggctcagttacactaatttcagtcaccagcttattaaagctccgaagttcgtctctctcaatcttgacgagagccaatcctgtcgatcgccggagtgtcaatctttggacgcgatcggaccacactgcgagaaagccgtcggtgaaagatcggattttgaggttcaattgaaggtaaggaatgtcggagacagagaggggactgagacagtgtttctgttcacgacgccgccggaggtacacggatcgccgaggaagcaacttctagggttcgagaagattcgtttaggaaagaaggaagagacggtggttaggtttaaggtcgatgtgtgtaaggatctgggtgtagttgatgagatcggaaagaggaaactcgctttgggtcatcatcttctccatgtgggtagcttgaaacattccttcaacattagcgtgtaatagggacttattcggtgaatttatttttaatggtcaaatttgaaaagactaaaagtttgagggcttaaaaacgaaaagaatatgttattttggtaccaaatcgcgtctgggcgattggtttccatttcaaaatgaaattgactacattacccttttgacaatttttttaaaactttcaaaaattagtcttttggttttcttcttctcagtcacgcctcacgagtcgtgattgtcgccgtcgacggtctctttgtcgccgtcgtctctttgataaaggcaaatatcaaggaaccctcataaaaaaatggtacttgtcttgtctctgtcgtcagattttaaattaataaacaaattttaaaaagagaacgacgaccttcgaggaatttaataatgaaaaaaaaggagcagatactacgaaaactcactttttctgattccaactgggttttaatttcttactttaggggaaaaagtttcgatctttcttctcttcaattgggtgctttttttttgttggtaggcattgggtttaagcagtgaagaatcggagatgtcacctgacggagaacttgttccggtggattcatcggcggtagtcacggcgaagaggaagacatctcagttatcaaggagttggatttccatagacgccacggggcaaaaaactgtgcttgacgttgacaaacacgtgattatgcaccgtgttcaaatccacgctcgtgatctccggatccttgacccgaatctattttacccttctgctattttgggtcgagaaagagccattgttcttaacttagaggttgggactttttgccactcctctgcttttggatttttcacagctttttcaattgattcgtgtttgttttggtcggatgcagcatatcaaggcgattatcactgccgaagaggtcagaatcatttcttactggcttgtagccaaatgtgaagacttttttaaaagttcactatttcggcttgatacttatgtgatatttggaacattttgtctccttttgaagtgatgatggcttgatttggttatttgaaaatgctttttaggttttgatccgagattcgtcagatgaaaatgttatccccgtcctggaggagtttcagagaagattacctgtaggaaacgaggcacatggtgttcacggagatggtgatttgggtgaagaagatggtacccctcaaggcctcaacttttgttattttaaggatataaattggaaaaatctttgatcttttgatgcctacataagaactaatgaaccattcactcttttcacttttggtattgaagtgtttgtttgttactatatagaatccccgtttgaattccgggcgctagaggtggccttggaagctatttgtagttttctagctgcaaggacaacagaactagagaagtttgcttatcctgctttggatgaacttaccttgaaggtagctaactcagcaattattgtcatcactgatctaattccaacttcatttaactccattcagtcgatgagaaccgtttcattttgtagataagtagccgtaacttggaaagagttcgtaaattgaagagtgccatgacccgtttgacagctcgggtccaaaaggtgagtatgtttcactggtaaacagagtctatgtttagaacttgtgttgccacatatactatgagtatgaagcttcctcacatatgtcaagtgaacattcaagatatacgatagtggaacagagaagaattaatctctctcgtcgcttttttttcaggtaagggatgagcttgaacagttgttggatgatgatggtgatatggctgatctctaccttacaaggaagcttgttggtgcatcttcatctgtcagcgtttcagatgaacccatttggtatcctacttccccaacaataggttctatgatttccagagcaagtagagtgagtttagtcacggttcgtggagacgacgaaactgatgttgaagagcttgaaatgttgcttgaggtaatacttgtttccagctacatatgaagtataaacaaccattaatgtgatttttgttaataggcatacttcatgcaaatagacagcactttgaacaaattaaccgaggtattgtatcttcttgttcctgtttcgtctttgtggtatctccgacttagaaagtataattgaacatgatgcagctacgcgagtatattgatgacacagaggattacattaacatccaggtaaccaaaaatgaaaagtcagaatttcttaaatgttgtgaaaatgtaatttctcttacaggctataatcactgtttatttgcagttagacaatcatcgaaatcagctgattcaggtgagtgaatataaaagaaaagctcaggattattaaagtttttttaaattttttttgatgtgtatgaaaagcaataaaattctctgcagttagagctaatgttaagcgcaggaaccgtctgtgtatcagtgtactctatgatcgccggaatattcggcatgaacattcccaacacatggaaccacgaccatggttacattttcaaatgggtacgagtcacatttcagtttccaccagaatggaacaccttaacctgatgatatcattggtatgtgttttttgttgttgttgatgaaggtcgtaagtctcacgggaacattttgcatagtcttgttcgtgattatactgtcgtacgctcggtttagaggactcatcggatcttaatgacaagagaggacaatttggtacatattttatagcagagaatgtgagagcagatcttgttttttggggtctcttctcgccagcattttcgttactaagtgatgggattgcataatttgtactgtgtgactacatttttttttctggttaacagtaaattgtaacttcttgataccaacccaaattaaggagccgagatagataaccgaacaaaaccaaaaaatacgaagacctttacacaaaaccgggaccaaattacaagttcggattgaatatctctgacctgaaccgaaccaaaattgtatcggatatccaacaaccccaaaacaaaaccgaattagaccgattcgaatttggtattttgattgcagcctccagagaagaacatgattattctcataagaatccttgacggccaattagatctctccctctttcgtcgctctttgttttctccactggtctttgtttctcctttgattctctgtctggagcagtctcagatccaccaggtatctatccaattttcttctagtacatctgatttcccttgttattgtttgcttgatatggattcatgaatcagaattgcaaatctgtttttgttagattaaagtttccgaatttaagaaattcccacccaataatccctattatcgtcacctttagactttgcttttgcctccaactttcgtttgtttagatcttcgtcttcttcttcccgtgagtgctttacatagactttaggttttgtttctaactgatacgaattgttatgcaaactgcgtgcagattaagctcaagatggatactagtagagatgatgatttcacattctcaaaggttggttagtttccactcatttcttcatgatttcaatgtttatgaaacgtgaaagttctagacttttatgattgattcttggtttgttttcaattttgaaggtttcaccaccagatagtgaagttaaagatcttgcatcagatgtaggtagtattacccttaaagatgggttagatcaacaaaaaagcaatggtcttatttggaaagacaagtctcttcctccaaaggaagaaacaataggttctttgtctttcacggtgactgattcttcgtcttcgaaaaagcaatccaatgaatcctctgagactttcaaaactccagctagaaagcctatcactcgtaccaaggttccatttgaaaagggttatagccaaatggattggttgaaacttacacgaacacatcccgatcttgcaggtaagcaaagctttcttttcttagtcctctttttcctaaatacattttgatgtgttggttaatgaaagagacaatttgtttatgcaggcctgaagggagagtcaaacaagaggcttattccaatggatgaagtaaagaaacaccgaacaggagattcgatgtggactgttttgaaaggtcgtgtatacaacatatcgccttatatgaattttcatcctggaggtgtcgatatgctgatgaaagcggttggaagagacggtacgctcttattcaacaaataccatgcctgggtcaatgttgatatcttacttgagaaatgccttgttggagttttggatgataccaaagtgaagaagcaagaaccctaattgctattgctaaaagagttcactcttgtagagaattcatacataagtcaataagaattttttaatgtttacattctgattcttcaaatgtaaactctgattacaatatgtactgtattagaaatttataatttttggtgtcaatatattcaaagtttccatatcagtggcatcatgttctcttttcttttacaatatttcagaatggcaaattatagatgagtaaatagaatctacacaaatttcggaatggattatagggtaaaccagaacaaagttgatgtcttaaaaacaaattccattacaagttttgttttagcaaactatcaaatccccaatcagaagtgagggctaaaagaccgagggtagtttaggtatttcacattgtagacaaaacctgactcctcgacgcttataataattccactatcatatttgccaatttgccaataatctttttgtcttctatcttcgacacctgtttctgaaatcttcttcttgtcttctccttggaattctatctgtgagcccgagtttcagatccaccaggtatttgaattctcttcttcatccttcattctcttactcaccttatacatctaaattttcttctggatttttatcattaattttgcttaatctgagttcatgacttactaataataatgcatgactgtttctatctttagactttgtttggtctatgaaatcattgttatgtagattatgctgagagtattataattacatgataaatcttgttttttagatcttcttcttctccaaagtgctttaggttcttttttgtttattggtttgtccataagttttctgatactaggatgagataaccttttgtggtgttttctgaccctgctttcaatagtcaatcttccaagtcaaacttctgaaaacaaatattttctcagattttaggatcttgtgaacttgtgtttggatcttcaatcattctaatgacaactgtatcacagaggaaaaaatcttgactttggaccttgtaaattttgattatatcatttgattaccattccccaattctgttctatcatgaattatatttgagtaaagatgtctcaagcagagtacttagctacttagcttccaatcttgtgctactacttcaaatgcctttgattgttctttgcttcggtcagccttatgctcctttcagttttttttttttttgattgtacaatgttctttgctcttcatgcttcttgttaactctcaagttgcatcctttctggatttattttcaggtcatgtggacagttctcaacagtagcatacttcaacaaagatcattgcttttcagcggaacctgataatctccaacaaacattcttcggtttacagtattaacaccagcaggatagtgctgttttcccattcttgaagatggacagggcagatacgtcgggctttgtaagtggcggaagttgttcatctctcaacttgctccaatatatgcttatagctacaagtatgatgtgctaagtggtactatttcggagctctctttcatctatatccttttcatcttcatgtgaatttggacaaaggtgtagttccattctctagtgccattaatatgggtgacaccgctcttagcctgaagtgtcttgggggctctgaaaaccaattttgttccgatgtatctagtttcactgatgatggctgccggttagtcctcggattgggtccaacgtcgacttcatactgttttagtgtcggcgttaataacagcaacaaagattctgcttctggatttactcaagctgattcagttctgcaacttggtcgtcctgctgtaagcatagacactttcagtggacttgataatggtggtgtgatccctgttgttgatgaaggttcttcttcagctaagagatcaggtggatacatgccatcgcttttgttagatccaaatgttaaaaacccttcacagattcaacaacttaaagattttggaaccggtatccattcacaagtgagccaagaaccatcaccttacacagagttctatgtacagcagaggacaagcaatccgaggaagtgtaaatttatgggatgtgtgaagggagctcgaggagcgtcaggactctgcatcagccatggaggaggacagagatgccaaaaaccaggctgcaacaaaggtgcagagagtaaaaccactttttgtaaaacccatggtggagggaagaggtgtgaacacttgggatgcacgaagagcgccgaaggtaaaacagatttctgtatatctcatggtggtggaagacgttgcgagttccttgaaggatgtgacaaagcagcccgtggcaggtcgggcctctgcatcaaacacggtggtggcaaaagatgtaatatcgaagactgtacacgaagtgctgaaggacaagctggtctttgtatatcccatggtggtgggaaacgttgtcagtatttttcaggttgtgagaaaggagctcaaggaagtactaactactgcaaagcccatggaggtggaaaacgctgcatattttcaggatgtagcaaaggagcagaaggtagtactcctctgtgtaaagcacacggtggtggaaaacgctgtctcgctgatgggggtgggatttgctctaaaagcgtacatggtgggactaacttctgtgttgctcatggtggggggaaaagatgtgttgtggtggggtgtacaaagagtgcgcgtggtcgcactgacagttgtgttaaacatggtggtgggaaacgttgcaagattattgattgtgagaagagtgctcaaggtagtactgatttctgtaaagctcacggtggtgggaaacgatgttcttggggagatgggaaatgtgagaaatttgctagaggaaagagcggtttatgcgctgcgcataacactattatgtctcgggagaacaaagatggaagcaagagcggtttgattggaccgggactctttagtggccttgtttttggctctacttctgatcattctcagtctggagctagcgctgtctctgattgtactgattctgttgaacgaatacagtttgagaataggcagaagaacaagaagatgatgataccgatgcaggttctagtaccttcatcaatgaaatctccaagtaattcacatgaaggagaaacaaacatctatgacttcatggttccggaggagagagttcacggcggtgggctagtaatgtctttacttggtggctccattgatcgaaactgaaagccatttatggtaaaagtgtcacattctcagcaaaaacctgtgtaaagctgtaaaatgtgtgggaatctccgaatctgtttgtagccggttacgttatgctggatcaaaaactcaagatttgttggatattgttatgctggatcggtggtgaaaccacttcccggttgctaaataaataaacgtttttgttttataatctttttcactaaacggcagtatgggcctttagtgggcttcctttaagcgaccaatacaatcgtcgcaccggaatctactaccatttataggtttattcatgtaaaacctcggaaaatttgagagccacaacggtcaagagacaaaaacaacttgaagataaagggataaggaaggcttcctacatgatggacaacatttctttccacacaaattctcataataaaaatcttataatacaaatacttacgtcataatcattcaatctagtccccatgttttaaggtcctgtttcttgtctgatacaaattaaaactcttaaacagcttcctaacgagaggaaactgaggaacacaacaatggagtttcgtggagatgccaaccagaggattgctaggatttcagctcatctcactcctcaggttttctttacctttgctgttaactcaagttatctttttttatattcttaaattcgatggttgttctactaaaaccagaatagtttgtattcactctcaaacaaaactgatttgtctagactcatcaacgttctgaatatttatagttcaaccatgaacttgacattcgcttctacaagtgtatatttccatttcttgaaattagtaactgaagatttctgatgccattagagagaccaatctgtttatgactccgttgaagtcatctaggactgatagtgaaatttcttcttcttattcatgattgatcaaccattagatggaggccaagaactctgtaatcggacgggaaaactgcagagctaaaggtggtaatccaggattcaaagtagcaattcttggagctgcaggtggaattggacaatctttatctttgctgatgaagatgaaccctcttgtctctttacttcatctctacgatgttgtcaatgctcctggcgtcactgctgacgtcagtcatatggacactggagctgttgtaagtatctctcttaaactttgaaaacttcacataagattacttcttcttgctaatgaatgagtaatgaccactcttgattgattaggtccgcgggttcttgggagcgaagcagcttgaggacgcgctaacgggtatggatcttgtgatcataccagccggtataccgaggaaaccagggatgacccgcgatgatctgtttaaaatcaatgctgggattgttaaaacactatgtgaaggtgtagcaaaatgttgtcctaatgctattgtcaacttgatcagcaaccctgtgaactctactgtccccattgccgctgaggttttcaagaaagctggaacttatgatcctaagaagctccttggagttactacactcgatgttgctcgtgccaacacatttgtggtaataatgcctaatgattcctcactccatttggttttgttgagttttaaacactaagaatttatctttttaaattcttgtgcaggcagaagttcttggccttgatccaagagaagtcgatgtgccagtagttgggggacacgccggagtcacaatcttgccactactgtcacaggtatcatatgaataggacgaaaggttcatttccattacattagcttctctgctaactgattgtttttgcataatcctttttcctcaggttaaacctcctagcagcttcacacctcaagaaattgagtacctgacaaaccggattcaaaatggtggaactgaagttgtggaggcaaaagctggagctggttctgcaacactttcaatggtaaaaccaaaccaaatcactttaatacatcatcattacacctgtttatttctctggaacagtgtactgaatccatgtgaaatgtactactactataggcatatgctgcagccaagtttgcagatgcttgccttcgcgggttaagaggagatgcgaatgtcgtagaatgctcttttgttgcttcacaggtgaatcttgaaaactctttcactctctttcattgtttcaacggttttaacttgaaatggcaattgaccacaggtgacagaattagctttctttgcaacaaaagtgcgccttggccgtacaggagcagaggaagtgtatcagcttggacccttaaacgaatacgaaaggtcagaaaaaacataactcatctctttcaaaatacttatctcagagagatagaaagagagttctcaagcttaatttccttattcttatgtaggattggtctggagaaagcaaaagatgaattagccggaagtattcagaaaggtgttgaattcatcagaaaatgaaactgagagataatcagagagatacaataagttatttcctcaactatatgatcatgtactcatcatcacatcatgcctatgtctcctctgcttctgatacaactttgtataaatccttatcagtttgtgtacgatatatgtgaccttttcaacgtacttctctattgttttcgattatccaaaaccaatctttaggacccaaaacagagttcatcttcacaaattaaaaaacgaaaaataaatttggcttcgcccgggttcgaaccggagaccttcagtgtgttagactgacgtgataaccaactacaccacgaaacctttgtgcactctagtccaaatttgaactatttatctattattactaaaggttggtaatacctactcaacagaaccccacgtgatctataacataaaataaatctttgtttttgtttttgtgttctgtctttcttggtggtgtgataaagaataaagagagccagtcgagggtaaaacgaaaggccaccattttcaatctttccacaataatggcggctactagagtgttaactgcagcgacggccgtgacccaaaccacctcctgtttcctcgccaagcaagctttcactcttccggcgaagaaatcctgcggcggatttggtggtctctgcttcagcagaagagctttggtgttgaaatctaagagacctttctcctgcagtgccatttacaatcctcaggttaaggttcaagaagaaggtccggccgaatccctagattatcgagttttcttcctcgatggttctggaaagaaggtaccttttgtttctgacttctccgttttctgtctccggtgtttaaaatcttagcttggtttactggggaagtattgaggaatggataacgtttgcacattgttattttggaataatctttggttaaattggttacgaatagatgaatcataatgaagaaatcttctccgagtttgcagtcaatgttttaaagatctacattgtcaatttgctttgaagtgttcatcactctgttctgtgttcaaggtttggttatggggacagattgagtaagtggattatttgtttaccaacatttttgctaaccactaagctcactataataaagagatcttctctgagaatgcaaccactgtttctaacattttgattgttgattgaaatactttttggtttattactctgttccgtgttttagtgaaaggctggataaagatggtttccaattgtgtataggtttctccatggcatgatataccattgaccttaggcgatggagttttcaactttatagttgaaatacctaaagagtcaaaagcaaaaatggaggttgctactgatgaagatttcactcctattaagcaggatactaagaaggggaagctcagatattatccgtaagtaaaatatatttctcccttttttataagttttgctttgttttaagctaatttcttagaggcttcagcatccattgatgacaagttagctcattttctgaattactatttgttatagactttgaaatcaatgacttatggaatggatttgatccaggtataacattaactggaactatgggttgcttcctcaaacatgggaagatccatctcatgcaaattctgaagttgaaggatgttttggggataatgatccaggtaaatctgtgatactctttcatgtaatggaaaatttaatcactttggaacaaagagattatgcttattcttggtttggatatatgtagttgatgttgttgagattggtgaaacacaaaggaagataggcgatattctaaagataaagcctttagctgctttagctatgattgatgaaggtgagctagactggaagattgttgccatttctttggatgacccaaaagctcatcttgtgaatgatgttgaagatgttgagaaacatttcccggtacgagctactactagtataaaccattccccatacgttcatgcaaaaacaaatttctgttgttgactctaaatctgttgatcagggtacactaacagccattagagactggtttagagactacaagatcccagatggaaagcctgctaacagatttggtcttggagacaaaccagcaaacaaagtaagtccttctttttaatcttctatagtggtggtggtttatgtttggtactgaaactgagaagagctatacacttgtggtttgtctgttacaggactatgctttgaagatcatccaagaaacaaatgaatcatgggctaaacttgtgaagagatcagttgatgctggagacctttcactttactgaacatattttgcaatgtcgacttatgaggtcgaataatgaatagactcaagattcctatatcattcttgttgtttcctttcaattgagatgtaaacattgggatttggattttgtttttcaccattgatgactgagaagtaataaaatgactttctgctttggaaatatttaaatggaatatgaaacagggtctgttacttgctatgaaacagagcctttctgattagactttagagttctacaacaacacaaaatcattgaagatttcacagaatagcatgtggcaaaattacaattcactgaacattagtcttaaactgtaacaacaacaaagagagaaagagagagaagcgagtgagaatctttagagaggttctccatcaatccatcttctgaacataagagagcattgatctggagtatactccgctgtgtgtcctcctccctgcaaaacattcaagtaaaaaaaaaaactctatcactttctgtttttcctgcagaagctttggacaagacaagaaagaaatatttgccttgatggttgcaaatgtcatcttgtttgcgtaagtccttgtatagctacaaacaccgataaaaaagagcgtctttaaagataatgaaattgaggagaatggagttagaaacaatgtatcttttgttaccctgcgacttgattgctactcatcatccaaggtctccagtcatcaacaatggaatagttgagagctctgatccatgcttgagttgaagaaaatggtaccatagaatcatgatcaccactgtttcaagtacatgagttttgtcaaattataaagatacaaaaaaactagttcttgtacttagacatcaacaaatattaatcttgcctgtagatgagagagcggaagcctttaagactattgtttacgtgataaggaactgcattgaaaatctcaaatgtatatggtatgttttggctgttgcatcggttccattttcctacttcctgcatcacattttgaattggtgatttttgtatagaaccaagtcaattcaattcacgtaggtacctttttcacgcctagagctctgcgtacattttcatcgtttgcccaaaaggcagacagaaaatacctataagtctgagaaaaaagtgtaagacatatcagaacttttcaaacccatggatatagaaaataataaagaaagtgaaagagaaaactgttacaaagcagctaggaggtggcaatgatgatgaatcgtttactgaaaattccttcattactcttcttctatcggttctgatgtttggtgtgtctgccaagacgtaatctactttgcagtttcgtaacaaaatatgctctgagtatatctctgacatacactataaactaagagaaaaagttagtctgtgaaaatgcaatcagagataagatactcaagtgatttgtgcggtataaagtctttacatgatcataagcttgaagattatttgagcatcttgcattacttgggtctacgttgaagaatttgcctccacaacttctttcaagtgactgcaatgtaataagtagtgaaaaaagaataattgtaaccaaatgtcacaacaatcatatgatatgattgatgaagataaagattacctcaaagagctcatctgaaataagtcccatcccatgagcaaatggaactctatagttagtttcaatgtttttatctgtcacagggtttccaagaacataaccctgctcaattatataggaatgtgttactacaaaacgttttcttttctcaacagtattcatattattgcaggaatagacccttttaacacctgaatatttatgagtggtgtgaggcccttctcatttcctgttttcatatagtagaatgtgattgaaagctttgagctaaaaagtaccaaaactgtgaaaagtggtgattgaaaaggctaccaagtgaaatttgttgcacagctcctggaacaattttcccggaatatgaatctccaccaacgtaaaaaggattcgatataaactccgggtgtttcacaaaccactgcaagtaatcagaatcaaaactaactcttaagataaacataaatatcactagaaaaactcatcaaaaactgtaacaaagcaaaaacaacacttaacactcctaagaaattgatcaatttggtgcatttgtttggtgtcgctcgactcaaaagcacgccgagttttcgcataagagtatccagagccagcaggagcttccaaatataaaatgttagccacctgaaaaacaatcgagtatacatgaattcaaaatgttgttacatattagagagaaatagaatcataaaaattggtgaaattatctctcaaacctttgtccatgaaaaagatgtcaactctagaggaggtactgtcccattatactcatcccctttaaaagctaaaggacctaagaaagaaagaaaaaacaataaaacttcaacttgaaagacttgtcttaaggagcaatcaagaaacatgacattttaaaacattcattataaacttatgcatgcatctatattaagactcattacaggatacaaaatggaatatttgttaccgtttgcgaagagcaatccacagatggagctgcagccaggtccaccagtgagccaaatcatgagaggatcattttctggattcctctctgatttcacaaagtagtaaaagagctcaacatctccagattcaccaatactcacatatctttagtaaaatcccacatgcaaaagaagaaaaccacgttttagatcactcaaacgacatgtttgacaaattagagagaaagagatggactttttgtttacccagtctcgagctcaaaaggaagaggaccttcaaaaccaggaagagacttcactagcaaagaagcatcaaccaaatgatgaatgaagaagagggtcaatagaaataagacgatgaagctaaggtttctcattttctctgcttcttcttagtgttgctacaacagagaatagtatgtcaacgaagaaccttaaactcaataagaaagaagaaagcaagtaattaattacgagaataaaaccaaaaaaagcaaattacgtaaagacacgttagctacgcagtgatcagaacgtggctatcgtctaccttataagcgtgttgaggcatttacatcgtgttgttaaccgtaccagaccaaccggttcaatagaagaagtcaaggactccactaccaaaccaagtatcagatgcaccagtgggaaagtcaacgtaactcagttgatttgtcagcttaatcaatttgtaccttaaacttaaatactgttgctaatctaattttagttagcttcatgttcctttttgactttttgcaaccggaaaacgacaaatagctttgattttcattctatcagctctcgaattgggaatttaaggttatcaaatcaataagttaatatgaaacattttaatatatttttaaaagaaaataaagataaatataattactcacaaaaattaaaataactgttatgcgaagaatatgctgtaatttataagtttttttttggtaattttcgttaaatagatagattttaatcgtagaatttgggaaaaatatctgttttttttttcctagctagataattttgctgggcgttgaaaataaaatagttgttccttgtttccagaaaccaatcttaacgatttagatactcagtgattcggcttggatcatctttgccaatcatcatctccctctatatatcatcatttaatggcttttggttcgtctctgtgaaaaattctgacggcacaatcagaaattctcagtcgcgtttccggtactactgctcacctttccctttcttctatcttaatcccaattgatttcggtttctattgatcaaaggataaaactttaggcttaaagagtctcacttttccaattttggtgcaaaattaagatttggtgcaaaattaagtttagttctgtgaattttgggattttgtgatctacttaatattagggcaaattcctaggaaagttgtttcttaaaaaatgcaaaatttagatgtttgatcaactattttccatcatcttgttgcagttgttgatgcgttttggggactaattggtagtacactttaagcttattagtcagaacaaatatggatgtgactggcactgtgactgtgagagatgcatttgatcgagtttctaaaaaacagaagctgtatcactcagttactcaagatgtcattgatctagtttgtgatggaatccaagatacattgactcgaatccaattaggtaacgacgatggagtagaaccggaatcggttcttaccgagttgagacgcaagcttgatgctcttttaccgattatccagcttcagaaatcacataaggaaactaaatggagtcttagtaagttggtgaaattgcttgaggtttcttaccatcctgatatatctctagcctgctttagcgttgatttcgatatcaacttagtgaataagatacttatccaccattgttaccgagaagggttgttcgacgttggtgattgtctggttaaggaggctggaagagaggaagaaactgaggttagatctcagttcttagagttccaccagatagtggactcattgaagctcagaaacattgagcctgcaatgagatggatctttgcgaaccgcggaaagctgaagcaaaagagttcaaagctggagtttaagctcttaagtttgaagtactgtgatatattaagagaaggaaagagtgatgatgctttggagtatgcaagaacccattttacgcaatatccactccattttaaggagatacaaaagcttatcacttgtttattatggattggaaactttgagaaaagtccttatgcagagatagtttctccatcatgttgggacaaggtaaccaaagagctaatcatggaatatcaccatcttctcgatcagccaattaactccccgttgaaagtcgctttatccgcgggttatgagagcttaccgtcactgttaaagctggttcatctaatggcattgacgaaacaagaatggcaagcaatgaaacagcttccggttcctctggagttagggaatgagtataagttccactcggcttttgtttgtcccgtgagtagagatcaaagcagcgaagaaaacccgccgatgcagttgccttgtggtcatgttattagcaagcagtcaatgatgagactcagcaagaactgcgctttccgcacattcaaatgcccttattgtcctgcagagactttagcttcagcatgcaggcaattatacttttgaaggatttggtaatttagttaatttgattgtttcacctcaataaatcgatgtgaacaaagcatttcatttgttctttcatcatttaaaaactcttgtttactagatcttgatttgatcttgttctctaatatgttgcatttagttgttatactatcacttagtatctctctcttggagttgaagcaaagattcacgtgaattctccaatatttggtatctttcagaaaaaatggatatattcttcagacattatatgattgcagtggtaattgattaattaatagtcattagtcaaaaccatggccttgtctcacatagtatcaataatgtttaattaaacacgcttttaaaacactaactggtccccaccaaactgccgcaaaagtccatctagttcatgactttcagctaacctcacacccccgtcaccctaatgctgtcacatccaaccaatactttacttccacgtgtaatataaccaatgagttcacgccaaaaaccacaaacactatcgtgtcacgttagcacttcccaaaaccaccaccgtgataaaacagtcctctccatttctctactcaacatccatccgaaccaactcgaagatattatttttcatggattgagcaaagaagaggacgataatttcgaaaatatcgcgatacaatggacaagttctcgtacaattcgtatccagattcagctgaatcgtcgccaagatctcgcgatgtcgaatttgaaaatccgtcgccatgggaggaccagcagcagcagaactacaaggtgaagctcatgtgcagctatggcggcaagatccagcctcgtccacacgataaccagcttacttatgtaaacggcgataccaaaatcatgtcggtcgatcgtggtatcagatttccggctttagtatcgaagctctccgccgtctgcagcggtggtggtgatggaggagaaatctcgttcaagtatcagcttccaggtgaagatctagatgcgttgatttcggtgactaatgatgaggatctggagcacatgatgcatgagtacgatcggttgcttcgtttgtctactaaaccagctaggatgcgtttgtttctcttcccgtcttctcccatttccggcggatttggctccgaaggttcgactaaatcggatcgggatacgcttaatccaatccctagccgacctgaatcggagaaatctgtaaccgctcctccgaataatgctgatttcttgtttggatcggagaaagtagctccaattccgccgtcgccagtgaaggttcctcaaccggtaccggaaccagtggtgcttgaaccgccgcagatgttcgtagatcaacggatgttacaaccggaacacggcgtaaatccggcggagattcaaagacaaatccaggaatttcagatgattcaaatcagagaccaagagcaacaaatgcttcatcagaatcagctacatcaacaacaacaacaacaagaggctatacatcaaaatcagcttcatcaccaacaagaggttatacatcagaatcagctgcttcaacaagaggctatacatcagaatcagatgcttcaacaacaacaacaacaagaggctatgtacagaagaaaaaccgaagacgaagccggaagatacttccctcccacatacactcaaaatccggcgccggtgacgaatcaacaacctccggttggctactggcaaggaaacaccaacaacagtaatattcaggggaatatctacacaacaacgtcacagaatctaccggagcaacaacaacaacaacaacaagtatacatgattccagctcaatctcaagctccagggacattataccaaagcgtcatgagaccaacggtacaaggaaaccaaggttattacccatcacctgttcagcgacttcatcatcctgatgcatacatggaacagcagaaccagccaggttacaacgtggttcaaccacagccaacgttttcaggtggtccacaagttatgactagtgttggtccgcaagttatgactagtgtcggtcctccaatggggttacaggaaccttattcacagatggggaagcctgtgtactatacggtggctggagaaggcatgatggttcaaccgccaccagcccagcctcagcagcagcagcagcagtaccagggaatgggtcaaccggttagtggcatgaccgatctcagaaccggaccggatgggaaagtggcggttaacatggctgcaccacaagtttcagattcggtgtgagtgtgagattgagttaacattgaggttaatgttatgattatccatttctttaaactttatgatatatgtgtaaaagtgtttttttagatcaaactaggaatctggatttctgatgaatcaattgaagcacttttgatgtttttattttattttattttggtaaacttctttcagagttctgtttttttaacttttgaagtatgcttttggaccttttcgtctcctgtctattgttatgcatctatttagtggtgtataaagaatattatccaatttcatattcattaaaagagttacgtttatgtatctttaattcactcacactgaaacaagaatttgagaattagtaatcctttaaatctattttgtactcgttaaaactagaaatagatttgtataaatgttcattgcagagaaaaaagtggtccaaaatctaagttaaatagtatggacatgtgttgtggagaaaaaagatgttaggtgagaaagcattggatgttaaaaagagacttgctctctcatactaacaaactaatccacatgacccatacttgtcaattgtcatagtataattcaattttgttttactaagcgacaatcattatattgtcatcatcattttggtcatctcaagtctttgtccttattattttgttgccaaattaattacatgtttcaatccagaaacaggtgtccatgtaaaagctaccatgtctttgtcattaggattcaaattgatatccttcttccccttgatcccaaatttgtcttatcaattttatttcttgtctttacatcatctcaatcggatttttttttctaccagagtcgatataaaaaagttcttaactaagatatcttggcatagtataaacgcaagaaattttctaaaaataaacacacattttttttaaagtgtttgcatagttaacagagtctattacacaagccaaaacaccaaaaaacaccataacaccactacgatagactagaccaatgaaaaaccatcagaaaaccaactaactaaaaaacaccaaaaagcactcatcagttcacatatccagatttatctggtaactgattaatccaaccaacaatttcttcttgaatcactcgcagtgtgttcctcccacgcccaatctccatcttcccaaagtgaggccttagcttctccacaaactctctcaacagtggtctcatctctttctccttcatcactctcaacgcagactgtaccacaaagttgccaaacttatcagttgtcattcttacccattctttggcattccctctaaactcctccaacacttggtctctcgcaaaatccgattttaaacacttctccaccacatagcttccttgtctctccatcgctaacctgaagaaacttccacgaagtctctcagcgattgcggttgttgcaaccggattctgaagtatcagaatgttctgcacaacgtgtgttccataggggtcaaaagataaccaatctgcgttgtttgcgacgcactcaaagattaggtctctgtatatgcctctgatttcctgaagcacattgtttagggcaaggcatccagtttctagcctggcaaggtgcagagtgtattcgtaagtgagcttgtagagagactccttcttggttttatcgacggctcgtatagcggggatgatcaagccacgaccatacttatcgctcatgagcaagaagaagtttgtgtcgacggcgcagaataagagatggtctaagctagggctgcgtctaaagaggatacgtaaagcttgtgagccgtattggttcgtagccaagtggaggaaaatgcgtttggttgtggttaacgctgatccgatcttgaacagatggctctccctctcagccgttggataggtatcgagatcttggaggtacttttggaactcagtgaaacgttgtgcacacgtcatcatgtccaacagacttgatagccagttacgatccttgtcgacgccagggctcacgaaactcagaggaggaggagggaagggtttgccggaatatctggaggaagaatcatctggttgggtcaacgacgacggagtgaacggaggagcgttgaagctagcggcggagatatgaccaacgttataaacgttgagattggggtagttgttgttgctggattctccaggttcttgatggttgtagttggcgtagagtctaagattgtcgaacgcagtgagaagaggaggattagggttgttgttgtttatgttggtggttccggattctccaggttcttgatggttatagttggcatagagttcaaggttgttgaacgcagtgacaagaggaggattagggtggtttttatttctgttgatggttgtgttgccggattctccaggttcttgattgtttttgttggcatagagtttaagactcttgaacgctgtgagaagaggaggattagggtggttgttgttgctgttgatgttggtgttgccggattctccaggctcttgatggttatagttggcgtagagtttaagattgttgaacgctgtgagaagagtatcgtagcctctatcgttgggcatagggtttttgccattatcatccgccatagcttggattgcaagaaatcaagaatgcgatctgttaaagaagaaccagagagatctcgagcgtacaaagagaatcgaagagattgtgattgcaaaagtgttacttatatagagaagaggagattctgtgttcgtagttggaataggaatcgcaggagttatagagataagagctccggtcccaagtcattttcgatttggaggactcgcatagagttttaaattttttaatttttttaacaaacgcaaaaattagcctgattaaagttattgatagaaattgcattaaaaattaaaacatcatcactgcaaataaaacaatattttaactcatcttttcctgaaattgaagttgacaaatttcatgaagaaaacttgtagcaaaaagagtaacgtagcaacagaactttggtaaacatttattacatcattcaaaaaaggtctgagaacaaagaaaagcaacaaacatacccccaaaaaagcctcgaatccaaagaaacaggtgctaaatctttaccttttcaagacagagtttaacaaatgttttcttgtctccttattaatcatctcaaagaaactcttactggagactttggcggcttcatcgaaagagctttggtaaaggtttttaatgggtcaagagtgagtgagtactcttgatagtatgataaatagcggctaatgcagtaaccgaggtgatgactggaagttgctgttgtgtatggtaaaggacttggtagaaactcgggtaggtgaggcagatcatacccatcttcaggtagagaaggtagccagcgaaagtgacaccggtcaagtaaacccctgagattctgttgaaaatcgatagcatggagttcatctgaggctggtaaacagaaaggtgaggagataaagggcgaaagcttttgatttttggttcctcctgtgttgtctttatatcccctgagattgtagaaaacaatcgtttcgatgttcccacatcaagagcacggaaagatcgagtcaattgagcaccaacaattgcagcttcagtagattttgacttctggaaaaatcgagacaaggatcaccaggcaaaaaggataagttaagctgctcttaaacattacaaaagcaaaaatcaaacaaaatgtagacaaagtcattttacctctctctcctctctaatggcattgttagtgcccaaaccagtaccaagaatgtcattcacaacaggttttgacctataaaagaaaacaacacgtagtcgaaatgacatccacagagtaattctaataggtataaaaagcacaagaaacaaacacaaacctacccgaaagctctggagaaacttgcatagttctgaccaatgtatgaactaccccaggaaggttgagcattaccagcaagctgcaaaacaagaacgtttcaagagcagtcaaaaccaacaatttctctacgcatatgcaataaacaaaacgaccataacctctaatgattgttaggcactcaaactacaacagtgatatgaagctaaactctcttcttcatcccaaccttttagcactatactcaactacaagctttctcaatcaatcaaaaggaaacaaagtcttaaggttaatttcgacagatatgtgtctacttacacaacaatctcatctcaaatttttgtttaaatgaaacgattaaacacataacacaccaaaatccgcaaatggatatatatatatcatttcctgaaaatttccggcgaagcgaagcagagctcagatgggtaaatcatgaagtcgaaagacgaaactaaacgaatcacaaaaattttctcgatctatcaataataccaccaaaaagacgcaatcaacgagagtgaaaaacatacggatttgtaaacggaaagaggcgcggagacgacgtcgcgtcggcgaatcgatcggaaaagagccgtggcagccatggactgaatcagatgagaattctctgctaatgatcttcctgcgtaaattcgagagaagtaagccaacaaaagaaatgggatctcgattaaatcagccctaattatttcataaaaattaaaataaattagaggttaattgcgtaaattacaaattccccaacgaaagttatccgcacgtttcacaatgagattatcgaaacctctggctcctttagcgggtctctccggtgagtgctacaaacaagtcaagtgataaaaacttcggaaccactgtagtggttgtagttgttccgtataagttttggcgtggtggtgggttccaaagaataagaaccaaacaatgagctagccagctgtgtcgtcgttggttcttacatcgctagttttgtggtagcttcttctcgggctagttttgtgaccgcttctttgaaaacttataagcttaaagaaagataatatccaatccaatgaaaataaactataaagtataaagtgacaaaattttgaaaacttcttctctttaaccatcacattacataacaaaggttttttagcagagaaacattaagtttagttccctgacaaaagcttattccagaaacatatccactgctcgttgttctaaaaggcaaaagttccttggacatagaacccaccatgatctaaacctaatctcttaaaacccaagtggcaagaatttaccaaatctcctcactttttcacttcctcgtactctgcttctggagcttgatcactgcctccctcagatcctcctcctggtgcagagcctccaccagaaccaccagacatgtgctccccaatcttagaaacagctttgtttgccgcctcaatcttggccttgatctcgttgagatcatccccagaggaagcgctccttagatctgccacagcatcttcaatctccttggcgatttcacttgggatcttctctctgtattcaccaagactcttctctatgctgtaaattgttgtgtcagctgtgttcttggtgtcgatcaattcttttctttctttgtctttctgagcatgcaactctgcttctctcaccatcttctggatatcatcctctgagagcccaccagaggatcggattgtgatctgttgtactttaccagtcgtcttgtccttggcggaaacagtgacaatgccattggcatcaatgtcaaatgtcacttcgatctgagggactcctcttggagatggtggaatgccaactagatcaaattctcccaagagcttgttgtctgttgccatttcacgctcaccttgaagcaccctgatcccaacttgagtctgattatcggctgcagttgagaacaccttcaagagaatgaaacgagacaatcaacattttagtaaaaacttgacaaaaacaatggtagctttggatggctcataaattagtatatatcacaggaatgtgctttcatgaccccttaaaataaaagattggaatcatgtaggaatcaatgccaagaggagtaactcaaactataacgcatgcctcatactaccctagttttgcctaacgccaatgtaatcgtcaggattccttcctagttactaagtgattttccatcaaaagatcaaatcttgacgggcatacctgactcttctttgtggggatggttgtatttcgggtgatcagtctcgtaaagacaccaccaagtgtttcaataccgagcgatagaggtgtgacatccagaagcaacaattctttgacatcaccgcggaggataccaccttgaagtgcagctcccatagcaacagcctcatcaggattgacacctttgcttggactctttccaaagatctccgcaacaatagactgaaccttggggacacgcgtcattcctccaactagaagaacctcatcaacttccttagcacttataccagcatccttgagacagttcttgcaaggatcgcgggtcctctcaatcaagtgattcacaagagtttcaaaccttgaccttgttagggtgatgttgaaatgctttgctccagatgcatcggctgtgataaatgggagattaatttcagtttgagaagtagatgacagttcaatcttcgctttctcagcggcttctctaagcctctgcagagcaagtctgtctttggctaggtctattccctcagtggtcttgaactcattaaccaagaagtctagcagagcattgtcgaaatcctcacctcccaagaaggtatcaccattggtggctttcacctgaaaaaagcaatttaataataagaacgattctcaaagaaaaagcaacagaagacctgacaaacataagatcacatgggagataattacctcgaataccccattagaaatctccaaaacagatacatcaaatgtcccaccaccaagatcaaacacagcaatcaacccctccttgttggtcattccataggacagagcagcagccgtcggttcatttatgattctctcaacatcaagaccagcaattctaccagcatcttttgttgcttgtctctgagcatcattaaagtaagctggaacagtgacaacagctttcgtgacagattttccaaggtaagcttcggccgtctctttcatcttcgtcaagataaacgctccaatctgactaggagaatactgctgaccattggcttcaacccacgcatcgccattaggtgcacgcacaatcttgtaaggcaccatcttcatttctttctgagtttgtggatcgtcgaactttctcccaatcaaacgtttcgttccagatactgtgtttgtaggattagtgacagcttgtcgcttggctggtgtacccacaagaagttctcctttcgtgttgaatgctacaactgatggagtggttcgagcaccttcagcattttcaatgactttcggattctacaagatcagataaaacacacacaaagttagctcaaacatcaaaacctcaggaaaaaaaaattataactcatttagaaatcagcagcttaccttcccctccatgacggcaacacatgaattagtagtacccaaatcaataccaatgacatcgtttccagcaggcttcgagctaaatcaagaagaataaaccttaagaaacagagaaacatagcaagatctttggtggtagcaaataaatggaaagatcaaatacctaaaggctctggaaaagcttctaaaattctgacccagataggaactgttcaatgatgctttcccactgcttgaaagctgcaacaagattgaaccagatcaggccaaggaaattcgaacaaacatcattttcgagattgcgagaaatgaaccataagaaaagagtaaaatcagatcatgtaagttagctcacttgaaactctgatttcgctaacaggtctcgtaaaagatagaagaagatcgagagaagatataaagacttacgcatctgtaagctgagaaaggagaggaaacgacttcacggcgtcgaatagagcggaggagagctgcggtagccatggtttcgaaattcaagaggtggtgacagatcagtaaaggaaaattgcaaaatgatgcgatgaaattgcgtctgtgcaaaagctagggtttagggtttttgaaggatacgaaagttgttttctagaggttgagggaagattctagatggtgataattctcgacatcgacgacggtataatgctctttgaaacgacgtcgtttaaaaacgaaaatcgtgaagaccaagtgcaaggacgtgatattgccacgtggaagtttgagaatcgttatgttgaatttcaggtaagtcaattttagagtatcgggtactgaggataaatctcaggaaacagagtggtcgaattgcaatttatttaggtactaatatatacatcttttgtatgggttttgattatgggctccttaagcccaactgtcatgggctatacaagaaagacggacgttcatggattttatttggcttttcgatttaatcactttagcttttttttatttccttagactgaataaatggcgggttgagccaagccctcgcaatagtgcaacgcatgggagactcgtgaaagcccagatagcaagctatctaaacgggcttcctcccttaaaaaatagagttaatatcgtgtgggccgatggcccacatatcagatattaaactgataagaacagatactacacttgatcttagccaaaaggccgagaaaggtatgatttgctgagtgccatggcctcgtactttataccactcgttttttctttcacgttcttttcttagcgatgtgggacttcgcgaacgagtgaaactaaataactataaccctctttctcttttagcgggtttcgtaacaacgcctgattgatgatagtcttaaacctgaagccaaacaagcttccaacttcttttaaccttttttggatagcaagaaaagaagagcgagtcaaataaaaatccagagaaaacggctcaagatactttgacaaaaaaaaaaaagagaataaacaaaatcaagaataactggagtagacatgtacacttgttgcgttctcaattttaggccgttcgatttcaccgccttacatgtagctgtagctgtgcccaaactaatctaaatcaaaaccggctcaagaaaggaatcgactcaactttcaacttcaatcttcgataatttatcagccgtttgtgatcaccaaacttgtcactagatattgacttctaagtctaatgtctttgacaatgccaaaatttcgctttgagattggtcttggagaagagttttcatggtcaaagcttcgaaatccattgattatattcatccattcttatgataaacgagcttgaactagacgttccacctcctccataagccttttccaaattttaaaaaacatggaaggtatataagtttaactgatcactaaaaccattaaacaaaaagttgcagtaagatttcgaaacatgacaaaccttagcaacttcggatgtattggttatagcatcggtacttctcaagcacattttgagattattcctttgcacaaatgtaacagctcctataggcctgatatcaaagaggtgatactaacttacactactatccacatttcttcacaacaacagaagcgtcataaggaaattatatttacctcagaccagctgcagaactttgtagactaagaagcttgccaagttcatcgcttagttgatggttaccatctgcgcgcattccctatgattagaacaaattctcaatcagtgatttttgaaacaaagagaattttgatgcaacaaaaaaaaacaattaccaggcactctccatataaccctcttcccaatctaatcttgaaagctttattcagctttagcagtttctttgcatcaataagacgagatgaaaaatacgaattcccatacgcaatgagatccgctgaacttattttcaacaactgcaacatagagagacatgaaatactatactgaggaatggtttaaggacatgcacagattcaataagagtttaattatttcacaaaaggaaacaatgtgaatagacatcggacctgttcgtacatgtaaggattgatgatacaattgatccttgagcgccaatccttaagaccaaagctgaaagctttgatatctggtaacatccatcgccgaagatcgatatcctcaatgtaatcaagaaccgattcaacccgagttttgtcttctacacttagcaaactgagagcttctacctaagcaatagataaaaacataagatctttagatatattactaacaaagcagagtcatttacacacatcattgtcctcactaacctcagaagatctttgatctgtgagtttactagagaaatatttatacacagcctttgagctactagtttcagtatcaacataaatcttaagcctcttcttgtgctcttcctttattaagccaatccttttcaatgcggagttccgatgatcaaagcaaacgatcctaaacccaaagaacaaaatcaaaccccaaaggacttaactttttgaacctaaatagttgtaagataacatcactgaacatactcgcaagctgttttctggcaagcaaaatcttttggaacaacaaaatcgagaaggtaacacctctcaaacccctccaaacacaaatcttcaaccctgcaagatttttcaaattcccaattatcaaaaccttacatttcttaagaaaaatctgcagagagtgaaaagtgtacctaaagggtatgagggaagaaaagggtaagatgagacaaggaagacggagtcgatagtggtagagatgagcgaagagagctgaaaaagcgccggagaaggaaggataattgtataacactaagtttggtactttctcttctaatgcattagctatggcttcgagcgccgcatcagatcggaaactccgtttagcttcgaatttaagtttacaagagtcggggatcgcagttagaaatctcccggagaatcgccggaaaatcatcgattgctgggattttggtaaaggtttatgtgcgcacacgactgagattttgaagcggaggaaattggcttttaattgcattgaacacctcaaagtttatagatattattaattttatccttttatttgttattttgcgtttaaagcccctgatgttcttctcttctgacactaacaaaaagaaacgtgtaatgaagatcctaaaatcgttcaaatgaagaataaatccatgagagaatccatcttctgcttaaaatgataaaacaatgcaagagtcattttcagagaaatatttgattggaaaataagaatgattgacgtgaaaaagcaaaattaagagtccaacttggaactcttcttgcacccagacaacatgttcatgtagagctggcacttactgatgtctgtttcataatcgttgaggcactacacacaaacaagaaacgcctcagagaataaatggagaatcgacaatgaaagaacgaaaagaaattcacgttaaagtaaagatggagttttgaagtaaaacaataaaattaatgaaggaattggttgatattgatctaattgctattataggtttcttgttaattatgtgatataataactccatcataaaagatcccataaaaccaaaagacaataacataaaagatcccaaatctttcaacaagaaaaccattagatttcaacaactaattattaaagacaccagagttgttcttagcacagacatctcgactagttgattaagcagccaccacggaaccagaattcttcttgcattcactcagcatgtccatgtagaactggcacttactgatgtcgcttccaaaatggttgacgcactacacataaacataataacatccaatgtcaaaccagataatctcggatacacatagtatcaacaatcaacaaagcaaaataacgttcaagaaatccatagtcttttgagtttaagcacatcaacacaatcatgttctattgtattcattctatcaatgtgcctgcttgtccttcaatttcgatgtattttgagaatgcatacctaaccaaaacaaggtcaatcaagatctagctactgattcacattcaactgttaacaatcgcttagctagatttttaacaactgctctgaaaagattggaatcaacctaaaatgctcaaggagaataaagaaagtgtttttaacttacatcttggaaagccttggagtgaatgtcacaagcagtcatggtatttgcagcagatggaacctgagaaacaacggtttcgtgcttaaaggttcgtggacccatcacagaatccacaaccctgtgtccaaatgcagttccagtaccccaagccagacctattgttccaaataaaacaaacacatcataagaaaccaaatccaaccaaaccaccaatctatgaaacaacaatgcttaagaaaatcaccaaaagaaacagataaaaagcacaaaccttcagttatggatgcaccaatattgcctaagaaagaaccaccgctactaggctgagctgttgctggaggaggagcacggttcactgaaaacccagaaacaaaacacaattacataaacagagcaaaatcttatacaatcaaatcaaaaaattcagtgaggttaatattaaccagattgaggaggcgggcttcgtgcagctgcagggcgagaaggacggtagctagatcttcctgcacaaaaattcaatcacacaaaaatcaatttttccctcgtcgccagaatcataaaccctaaaacatgtgcaaaatcgctcaggagactaaaatattctctaatcggaagatataacacaacttgcaacatcatatgagaggattatcacaagtgcaggaacaaattacagcaaaccctagattggaagaacggcaaatccttaaataacccaatgtgaaggaagagatctgaatattttttttaaaacgagaagactcacctccggagcttcctcgaggcattttgaatttcagatgttgaagtgttaagtgatgaattctccggcgaaaacttgacaatacgaacaaaaagcacctgatcggcgagaaacgtatttataaagaggaaaacggaatagtcagatgcggtgaagaccacgggaagatttacaagagtaaattcttgattggttttcacttgcgaatccaactctctagatgagaatattccccttgcccgtcacgtttcttgcgctccaaacccaaaattaggtttccttttttaatttctccgaaaaaaaaaagaatatgggctttgactggcccatcaaaaattcaacctttgtatgacgtcgttttgtgaaagcttcttccaagggattaaacaacacaaaagcttatagacctgtatggttgatcaacgctctgaagtctgaaacatctcatcattggacaacgaacaacgtaaagagcgaatctaaacttttgtacgactagtgatttagattactagtggtggttcactgattcttgatcgacagatgacacaaaagatgggtttcaaacctcaaggttattcagatgtgaacacagccgtatagcagtagattagagctcaagaccacatttgacgtctataatgatatctatttaagaaaatgaagtttaaagactcctagaagtgtaatcagtggccactgtaaaactatgatgtgaccaaaacccacttcagtgttaatgtcccaattagcctctgttttgaaactataagcaacaaggttctgtattcttttcttaacaccacttgatcaaaattagtctagtgtaattcaattgtgcgagtaagttccagcaatctaaaagcataataataaccccaatgatagaggaaagggacttgagatattggtttttcattcgatcaatcaaagtggttcattcaggacttgatgaaaatacaattgtacaaagagtcaaaaagatccccaacaagaaaaataaaatattgaaaatgtctcaaagagatagatgaaagctcttttatttctgaagtggatgaaaaaccaattgggttctagttcaggttgggccttcttctcatcaaacctgctttatctcaggatatatggcgtgaagacggtgttcagctgcttggatttcatcaggtgtcccagatatgcaaatggtcatatccatgtttcctggatcaggttcaaggagtgacacaaatgcacccgatatttaagctccaacttttctttcaaggtggcctatttcttgtccatcaagtaaacagaatatatatgtgtactattacctctctcagactcttcagtagacgattgtgaccatcctttccatatccaaacatagagcacacatcgtattctgaaactctatatcgcacagttttgagtccactgcaaaaaaaggtcactttttttagaacaaggacaggttactctctcgtaatctatctagctgttatgtactattaccttgtaagtacaaggtcatctcttgtagaaaataatcctccacttccatcatttacacttcttggagcagcaggtggctatatttatactatgtatatcagctaaagaaaccaaacatagagaggggaaaggtaagagacagagacataccggtgattcccacaacctagatgaagcttgactagagtaatggaagatatcattaggatccatagtggaagaccgaccaaaagttggagtatatccagcagtaggactgaacaattcaggaaatggatcttctgaatagttaactgcatattgagaccccctttggaacgattggttgataagatcctctcgtagcatgctggtaacttggtttatagcttctctcacatttgggaactctcctgaaatctattagaaagaaaaatataagacaatatccaaacaaaagcagtaaatcatagagttctctcttgggttacaagctagtgtacctgcacaacttgattgttctctgaaacacattttgggttctgctcaacgttcaatacagttataaaagcaccagttctttgctgaattgtagtttttatacgaccctcttctcccagcaaacaattaatctgatttgaccggaccacaagccgtgcagtgatagatgacgttaagccactatctaggacttttgcagtggcattctcatacatgttagagaaaacaagaactaaagctctctgggattcggaggttatgtctttggttttctacatgatgaacaagcagcaaacataaaccaaggataatatacagatggaacaaattaagtaaacaaagagatatgagaagagttaagcatgcaaaaaaccaacctcaaatgctgtaattgtaactaagcgttcatcacagtcaggatgtctatctcccacacttatagaagcatctgtcacacttcgagtcttgataactacactagcactttcgtttgaacaaagtatcttcagatccacttgtcggatatcatcctttgatgcttggagtggctgcttaatggtgacagggggattctttgaagcagaggtaatgagtctgtgatcataacttgggtgcggaagataatctatccttggctgagtgattgttctaaaaaaaggcctaaccagagcatcttcttgactgatctcaacatgtctatgcaaggaaccatgaggatcaacttccctatactgttgtgacctgtattccataggcctgcgtagagcatcaggaaccgcctcagcatgcaaagacgccgtagaaatcggcggacaagcctgcaagcgactggatatggatactagtgccttcatcactgcagaaagtctatttccttcgatctgccacatttggtaggtccactcagcataagaaattataagattctaactttatccctagcataagtaccatgaatgattctacaagaacttgacccgaaaagaagtgctttgatcaacgactaatattttaccagaaaacaaaatcacgagttcgtaccttgagcactacgtcaccagggtttgtgcaaattgacaaatcatgtgaacgtagttgaacattacaaccagtttcttccaatatcctctgcatcaattcaccattcttacctatcacagtaaccacatggctcccttccatcaacagattacaggagacggtactactagtgcaatctccgaaatttagagcttcgaaaaccctaatcaacgcgtattgtgctctggagacttcaacttcttgttcttgctccttcttctccctgttgctaacgttattaacaataacacctaatttcaccctagacactgaacctacatgaccgaaaatcttgatgatacggtacggagaatcatcaagaggagtcttctcgacccagatactggattctgttgatttatgaagcttcttaaccattcctccatgtttcccgatcacatgcccggcctgagacacgttgcagagaatgcgaaacgttacgtattctggcggcggtgctgatggcggctgtggcagtggcagtggcgcacgagcggtagactgcgctccaaacttctttccctccattctttctctctctatatctctctctctatctaacggcacttcttgaagaagaaagaatgaaaattaccaatggttttgcatacggtgtcgtataaaggatggggattattcactaaccgagtcggaccaatgaacggttcatatttctattttccatattaaccgagatagaccgaatccgagcttagttgagttatttacacggctttcacctggagacgtaatcaaattcgaggaaccaagacggtttagaaggaaatcggttactggttcgctaagaacgagtaaggaaaaaccgaaaaaagtcatttattaaattatgatgatcaaaacatggtattgaaacttttaaattggcagaaacaatcagagacacgagaaattatttgagtgaaacaaaatattgtatatgtaattacatttctcctatttgttccaatattgcaattgaagtatcaaactaatctttttgaaattttgggaatgttaaattgttaatcaaagaaaaaatgtaaataaacttagaaaggtaagtatttctcaaaaaaaaaaaatacaaatgaaagcaaaatcaaccagtgttttaagtaagatgaacaaaaacgcaaacttgtgttactttgaactttatgtctttatccaatagaaaaataaacaatcacttgcaatttaaaaccactcagcggaaggaaaaacgcaagttatcaattctctgcagcagcacttgcagcactcaagtccacagacaaatcaagagtctgcaaaagaaaagacagtataaaaaacttattaggattcaaaatgttgcgtttgcttgtgagtcaagaaacagccagtgatgaggtttatacctttccagtgatcttggtgtacatgtcaagtacatctacaactgtactctcgaaatgtgttgttgcatcgtaagtctgacaacacaaaacaaaaacaacaaacatcagaaaaaggtaataagatacgtaagcaacaaattgttgtgatgtgatattctcttacagcagagatgaaacagttatcttcttcttgaatattggttggaacgtatgtgtcataagaatgatagaagatctcatcagtaggtccaagcaattcgattccgggtttaagctcctcttctggattgtcagtttcagcttctgcagagacaaaagctatgtatttgccctttggtgccacattgtgagcgtatgagcaacagaacaagtacctacaaaatccaaaaactcaagagatttatcttcaactgtttcaaagtagaaacaaatcagatacatgcatgtttctgtaatttgaatgtgttcttgactatgatcttacatgtctgatttgcgaccgagttgcttctgaggaagaatgatttgaaccgagtgagcatcatttgtgtctggaataggatggctcattatacacaccgctcgagttacttttccaactttcttaacctgaaagacaaggaaaccgtcttagaaggtaactagacagtataaaaacttagcagttactgcagttgaaatgggtttagggttaccttttcagacaggtaagaaggatcacatacaactttcttgcatttagcagtttctcctgcagaagtgacaccaatagcttttccagaaccatcaaactctacctgttagggatgatattgaaggttcatgagtttctatctttaaaagagttaagttatatcatttataaacagagaaagaagagattataggttgttcataaccttgcattcgggcttgttgagcatgtaagtcccaccgtacacagcactcaaacgtgcaaaagcctgaaacagaaacagaggtttgagacagaggaaaaagtcgtaaaaataagaagaaacatgagaatagagtgaacacgaacctgtggcagctctcctagaccgtacaacggatagatgtaaggggatcctccttggaatcgagccagagactccgcatagagcttcaccagaaaacagaaaagaaaatgagattaagattggaacatatgcttattgaagaagaaaagaaaacactttaccttgattctcttaacaaaatcaatggcgggttgatccaagtagtcatcatcgttgtgaagcgctaaggcatgccctatgaagtcgattgtgtcatcttcaagtccatactttctgttgggaataaacagagacaaagcgtgtaaagcaagaaactatagtgaagtgacttgagatggagcaaaaatcgttgtacgtacgagatgatctctctagcagtgactttgcttaggtcaagtccttcgtgagacttaggatccttctcatcatagtcttgcacatagataaagaactttctcgcacgtcgcttctcgaaaagacccatcaatggcgatttcagggcttccacatcagtggctgggactttgtagatctgacacacgtgtggtacggatgatcaaaatctcagagtaagtaaccttaccaaaacaaaaaatcaggataagaaaagtactaccttgcctttcttgtagacaaagctaccatcaacggccttaaagttaagatacttggtaacatcggtgtggattagggtttgaacaaggagtccattagccattataaactgcagatcaagaaaccatattcaccatcaataaacaatacatatatatatatatatatgaattcacacatattcaccatcaataaacagtacacaaatatgtacctttgggatcatatcgacattgtattctctgcttgctccaagattttcttcaggagtgtcacttcccctaaaacgcttccatagctgagtgaggttaagagaggatgattctcctccatagtagtcgtttctatccatatgtagtacctatttagatcccaagattaaatttaaaaaactatatttcgttaatgattgcacatatttgaaaataaatctactaacttgtatatgtttcctatgccacatttaaattacctatgatctatgaaacaaaatttcgctttttgttttgcaacaacaaaaactcattcaaaagatcaaatgttataaattggattattatatttcataactatatattgatgacatactatgcaacaattttgcatactatattcataactataataaaacaaaagcgaaaactaaacataaacctaaagctttatctggatgtgatgcacaaaaacaatttaatggtaaaagaaaattatgaatcaaggagaaaaccttgaggccatcgacagagaggaggccactaaggatacactccttaagaccagtcccaaggacaatcacatcatactcttcatccattattgtaatcgatctctatctccgttattgatcgtctttaatccttcatcgatctctaatagactttttctttggagagatcacaagtgtgagggaggaaaaagaaatagaggatgatgtgtggctgttaacacagtcttaccaccacctccgatcttaccgtttaaccccatgacaatttttcacgttaaatattaaaaccgtattgttaggggagagttattcgaatatatatggttcctatgtataaaaatggttacaaaaacttactataattagacgaacaggtggtaaaaatgtcctaattacaatgacaatcgttttgacctgaaccaaaaaaaaaaagttaaataggattgtataccatgtaagtatttagcgaccgtataaagtataaactcgtatatacgtatcgagaaacgcatgcaaactttttaatgacaaaaatacccttagtgttgcattcttcttatacgattaataatgaaaatgttatgtatatacgaggtccttttggtccactggcaaagaagctctgtatttaacgcaaacaaataaaaaaggagcaaaaagagtaacggagatatggtaagcgacggcggcggcgagaataacagagcggaggcagatcagttgcttgctacatcggagaagctcttggcttcaagtgactttcatggagcaaagacatttgcgatccgtgcatgcgaagctgacccatcccgaacagacgcagctgactatatcctcgccatcgccgacactctcctcgccggagaaactacaatcggagattccaaagtaccagactggtacgcggtacttcgaatcagccgcctaacccaaagccctgaacacgtcgcgactcagtaccgtagactcactcttctcctcaaactcaatatcaatcgtcttcctttcgccgatcaagcgcttaaactcgtctccgatgcttggtatgtcctctctgatcctccaaggaaatcaatttacgatcgagagttgcagctgagtcaaactggtcaatcggagaaatttcaagattcgccattgcagagccaagctgagaccttggagaatcctacagctacaagcttttggaccgcttgtccttactgcttttcactttttgagtacccaaagggttacgaggaatgcacattgaggtgtcagcagtgtaggaaagcgtttgaagcggttaaaacgcaaacgccacctgtggagagtaatggtgaaggcgtttactttggttcttgggctatgttccctgtaggattaacaagtcatcctaacacctctaattggtcgccaatctcacatctttccgtctgcacagggcaaagttcatctgatcagcaatcaaatttgaaggctactccaagaaacgatgatgttgacatatatattgcaatttctgatgatgattaaagatatgatgcgaagagaagcaagtagacaaatgttgtatattataaactcaaggctacttggtgaaaagtaaagctttgtatcttttgttttgtggttcccttagtcctttatgttgtatgtattgctagctaatgtttatgcctagtggaaactgacctaattttgattcgtttgtggaatcaatgttagatggaatccgtttatgtattttggtgcatattacgctttcggtatataatcttttgtatcatataagttcataaccataaactggttttatgtggcatgttttggttgcgaatcatgcctagtttgagtacatgaaggaatgctatatgtaaaacttgtgagggacgtctaagtaaggcattattctcagattagagttagtatcagaactagcagaatgttcattttcaggtggaaataggctcagtcttattttggctgcagaagaagttttgtttagaaaagggatcaattaagctatattgaagaactgtgttttgttaccgacttgagttttacccaaatctgtaatttttcttttgtgaagaatttttgaagacggagaatcaaataatacattgtacatgactttgatgagaaagaacaaacatacacacaaccataaaacaatccaagtcgttgtgtagattaccggccaaaacctaaacatcatatttttatcgccctttcatacttgcaaatatctaattcatgtgcaaacgtttcaccttaaaacaagttttgattagttagtgtttttatctcaaaatcaatatcgaaatgactagagtttttaagacttacataatttgatccaagtcccatcttgattttcattagcttttttgtatacagtttataaattatataattgatatttgtgtcatagtatttgcaaaatgctattctctagtttacaaagtttaagcctttttacgtgtagcttaaacatgaacacgtaaacactaaaaccgaaaattcaactagattgaaagtgacaatatagatatacagatagagaagttaaacgaaccttttttattattcaaaactctgcacagattttcccaccaaactccatctttcttcttcctcaaaacacctttaaatacccattcgaatcaaagatcataatctcatcacaaacacaaagcaacaacaaacaccacaaaagcaaaagaagaaacaaacgcaagagttctcaagcaagctcaaacatggcactaatgaagaagagtctctctgctgctcttctctcatcaccacttctgatcatatgtcttatcgcattgctcgctgatccgttttcagtcggtgctcgccggttattggaggatcctaaaccggagataccaaaattgcctgagctacctaaattcgaagttcccaagttgccggagttccctaaaccagagttgcccaagttacccgaatttccaaagcctgagttgccaaagatcccggagattccaaagccagagttaccaaaggtaccggagattccaaagcctgaggaaactaaactgccagatattcccaagcttgaattgcccaagtttccggaaattccaaaacctgagctcccaaagatgccagagattccaaaacctgagttaccaaaggtaccggagattcagaagcccgagttaccaaaaatgccggagattccaaagcctgaattaccaaagtttccagagattccaaagcctgatttgccaaagtttccagagaattcaaagcctgaggtgcctaagctaatggagactgaaaagcctgaggctcctaaggtgccagagattccaaagcctgagttgccaaagttgccagaagttcccaagcttgaggctcctaaggtaccagagatccagaagccggagttgcccaaaatgccggagttacctaagatgccggagattcagaaacctgagttgccaaagttgccagaagttcccaagcttgaggctcctaaggtaccggagatccagaagccggagttgcccaaaatgccggagttacctaagatgccggagattcagaaacccgagttgcccaagatgccggagattcagaagcctgagttgccgaaggtgccagaggttccaaagcccgaattgccaacggttccagaggttccaaagtctgaggctcctaagtttccagagattccaaagcctgaactgccgaagattccagaagttccaaaacctgaactgcccaaggttccagaaattacaaaacctgcagttccagagattccaaagccagagctaccgacgatgcctcaacttcccaagttgccggaattcccaaaagttcccggaactccttaagcgaagagaaggcccagctactttgaagcccatcccacaatcttaaagtaccgttttaccgttataccatttgtctatttgcagagatgcacttatgtctgtctacatcattgtttccttagtaaaaaccatgtcgtatggttggtctcatagtcatagttcttgtttttttttgggtaaagactatacacttatacttgtataattgtatcctgttatattttgtattgtttgtttccatacagatttcgttgtatttgatatactttttaattgattatgttacttatttaagacatgtttctgttcaaaagctatacaatgaggtctaatccctcaattatatcagtttagctgttctgatactttcgacggctatcttcttcttgtttgttaatgctactacgctagcatcaaatgtttgtcatcttttggacggaattataacctttttgttgctctacaaaattactaatcaaattcatataagtaaacattatgtaatggatttgaatatcataacctaatgtaattgattgtgtttcatattatttacaaatttggttatcgtttctgttagtgtaattgtgttgtatggaattgattgtgttagaaggaatcactcgtattattcgtgcaagacttcgtctactctctcgagagacatcttctttatcagcagctgaatcaaacatgtatacttggtttcaaagattactcaccgcctcaaacatcaaatgcggttccttttttatttttctctaatgctctgtttgattgctttgttaattgttagtttgttactctgccctaatgctctgttatgctctgtaatactctgtctttccatctctaaaatttactttttagtttaagattaaccaaagtttttacaaaagctaaacgtataataacgtgctttctcatacgaggattatatatgttctataatacgtataaaccaaacacatgaacacgtcaacacttaaacctaaacttcagctagattgaaagtgacaatatagatatacagatagagaagttaaacgaactttttatattctaaactctaaatatgttattctcaccaaactccatctctcttcttccacaagacacatttaaatagacatttcaatcaaagatcaaagctcatcacaaaaacaaagaacaacaccacaaagcaaagaaagaaagaaagataaaaagcttgcaaggaaacaatgacattgaagaagagtttctctgcttctctactttcaccatttctgatcatatgtcttattgcattgctttctgttccggtatccgttggagctcgccggttattggaggaacctaaaccagagataccgacatttccggagctacctaaaccagagatgccaaagttacccgaatttccgaagctagagttgcctaagttacctgagattccaaaaccagagatgcctaagttaccggagattcagaagcctgaattgccgacgtttccagagttaccgaagatgccggaatttcccaagttcgattttccaaagttgccggaattgccaaaaccagaagaaaccaaagtgccggcgtttacaatgccaaagtttcctggatctccttaagcccattacaccagaagaaggcccatctactttggagcccattctaatttactgaaattgtcgtatcaccccttgtattgtttgtctattttacagagatgtgctttttgtatcccatctcatccttgatccttgtaccttatttgtctcgtcattgttattacactcatacttgtactttgattccattgttgcctttgttgccttgttggcaggggcggacccacagcaagagagggttgggcacgtgccctacgctctttaaaaaatatatatatattcttttatataattaattcatttgctggaatatctgttgggcctaacgtcaagtgccctactctaatgttcaactcaattcaattaaaacaaatataatattttagcccaaaataattaaacaaaaaaacccataaaaattcttatagttgatgttgctttttcttggactcacaaatagtttatcagtggctctacaaaggaaagaccaaaacattttgaatgctatgtcactagtgaaatctaccaagcaacaattatgcaagctcagagatgatggatgagattctttggttaatgaagttttttctttttgtaagaagcatgacattgagttggttattatggatggagaatttgttaatccaaaaaagccaagaaaaagaagcaacatgaccaacttccatcattatcaagtggagtgtttttacactgtattagatatgcaaattcaagagtttaatgatcgtttcgataaggtaaacactgaattacttagttgtgttgcttctttaagccgtattgattcgtttcatgagtttgatcagttgaaagttctgagattgtctgagttttatccacaagattttactcatgtcgatcagagatcactcgagcatcaacttggtctttacattgacaatattcgagaagatgaaatgtttgctaatttgaagagtctaggagatcttgcacgcgttatgatcgagacaaggaaatatctttcgcatcctctggtttatcgacttttgaagctagttttgactttacttatagtcactgctactgttgaaagatgcttttctgcaatgaagattgtgaagactacattgcgcaaccgtataggtgatcagtttctaaacgattgtctagtttgttttgttgaaagggaattatttgataaagtgacaaatgagatagtgatcaaaagatttcagagtatggaagaacgtaggataattttatagacttttttttaagaaactatttttatattaatattttttatttaattttatttttaattatattgtgcgcgggattaaaataattcttagatccgccactgcttgttggtatgtttgatacacatctcgttgaatcttaatatactttttagtgatatgagttcataatctcgtactcgtatcataaagcacttcatatgagtgacttaaatatcacagaggaaaacataacattggtgtcccaactcattgatctcaagaagcaatctattagtgtggacattgaaaatttatacgcaaataacaaatacaaactttagaaacaatgtacttatcaccaaaatctataatctactggtttggattaatacaattgagagataagtactaacaacttaaaaacatttttcagtctattataaactaatttgacaacaaagtttttaatctgaaaatacataatttaacttggatttataaaagtcaagtcaaattcactaacaataaatatctttaaaataatttcacttctagggtttagccaaggtcctcgtatatatttggatccgccgaacaaggcatcttcttcgctgctcatttggaaaacgcaagctaccacagatttagagtttatccaccttatctttcgccgagatccaacaatggtaagttcctctatctacatacatctctctaattctactactgctatcacatttccgaaatttgtgggtttgtaattcggctccaatgggactctctaggctgatgtggaaccagaggttgcagcagcaggagttccaaagaagagaacgttcaagaaattcgccttcaaaggagtcgatctcgatgctcttctcgacatgtctaccgatgatcttgtcaagctcttctcttcccgtattcgcagaaggttaggctttttgaactcagtaaaagtttcgtcctttgtagaatcatctcatgtgttttgactaatttgaattc

SEQ ID NO: 1415 - DNA, 80088 bp, Arabidopsis thaliana
aagcttccttcccaaatggtgggattcaatgtgtcgtataacgacctatcaggcataattccggaagaccttagaagctacccgccttcttcattttatcctggtaactccaagctaagtctcccaggacggattccagcggattcttctggtgatctgtctttacctgggaaaaaacatcattcgaagcttagcataagaatagcgattattgttgcttcagttggagctgctattatgattctttttgtcttgtttgcctatcatcgaacacagctcaaggactttcacgggaggaatagatttacagaccaagcaacgactagagacaccaagtttggacgctcttctcgtccctccttattcaacttcagctcaaatgttgagcagcagtcatcatctttgagcttctcaaacgatcacttgctcaccgcaaattcaaggtcgttatctgggatacccggatgtgaagctgaaatatccgagcagggtgcgcctgctacttctgctcctacaaacctccttgatgattatcctgcagcatctgggcgcaagtcttcttcaggaggctccccactatcctcctcaccccgttttagcgaccagcctgtgatgttagatgtttactcacctgatagattggccggagaactcttcttcttagacgtttcactaaaactcacagcagaagagttatcccgagctcctgcagaagttctaggtagaagcagccatggaacactgtacaaagcaacactggataatggacacatgttgacggtgaaatggttgagagttggcctcgtgaggcataagaaagatttcgcacgggaagccaaaaaaatcggctctttaaaacatcctaacattgttccgttgcgagcatactattggggtcccagagaacaagaaagacttctcctgtctgattacctgagaggagagagcttagccatgcatctttacggttagaagatcttttaattagtctttttagtcctataactacaagcctttctgtatcttgtttgaaaaaaagttaatcaccctgccaaattttctgtgcagagactactcctcggaggtattctccaatgtccttcagccaaagactaaaagttgcagttgaagtggctcagtgtcttctctaccttcatgatagagcaatgccacacgggaacttgaagccaactaacataatcctctcaagtcctgacaataccgtgcgaataactgattactgtgttcaccgtttgatgactccatctggtgtagcggaacagatactaaacatgagtgcactcggttactctgctcctgaactttcctcggcttccaaaccgataccaacactcaaatccgatgtctatgcgtttggtgtgattctcatggagcttttgactagacggagcgcaggtgacataatctcaggtcaaacaggagccgttgatctgaccgattgggtgaggttgtgtgatcaagaaggaaggagaatggattgcatagacagagacatagcaggtggggaagagttctcaaagggaatggaggatgcacttgctgttgcaatcaggtgcattctctctgtcaatgaaaggcctaacatcagacaagttcttgatcatcttacttcaatttctgcctgagatttgtttgtttttttatctcttctaaatttttctgtaaatctccatggatttcctttcacacatcatcccattttttcttcttcttttctggttttatgtttctctctagtagtttgatcagatgattcagaatgatcctcaggtgttcttacatttattttttgttgattatttttccccttccttgtaaaggtagaagaaaatctaatcccattgattctgacagaaacatttgtgtttgcttattgattcttttttttataaattgttttttttatctcttttcgactatatatgattcacattgatttttgtaattttcactaatgtctttttatttattccccttcccccattctattattacatattttgttaaataattttaccatggttataaatcaagttcgtaatgtcacattaaaatcatatataccacaagcttatctataatattacatacaaaaaaaaaagaacaaccatcgaaaagttggtttctaaaaagctataaactttacgttgctgatcatatgtacaactttcctcaaacatttcctttagccgcaagacaagattcatcatcacacagcagcttgtgttattgctcttgttcttgacccaaaaatccactcaccagcaaactccattcttgattgttaaggtctcaaacctttcttgacatctaaacaccttaattacgttggttcacgttgcctagccgcccaactcgaactcaaagctcgaagcctttggaaatactcccctaatgctaacaaacctctagccgcttgtcgcgtggttaagatccgatgcatctgttgcaatgtctcatgtctcagatgatcagcctacaacaacaaaacagtttaagaacaacaacaaactcaagaaactagttgttatccttcgttagtttttgtaaaaacatttctttcttacttgatttacaaagctgaccaaagcctccaatctctccatagcacaagtcatttgaggaatataacttccttcaccaagtttcccggctgctacactctctgctaatgtatgttgcagtttctccataccttgggataacgcatcttctgcttgttgacatgattgcctcagattacatacatccaaaagttgttgatccgtcaaaggatcaaaatgcggtaacagaacctaacacaaaaaaaaaaatccatatccaaaatcattgcaaaaaaaaccattacaatttatggattaatgacaggtttttctattaccttgagaagctctgagggtctaaatccgcctatccacaagaaaaaccgctctgctgaagttttccacattccggacatgacatagaaaacatcgatttttgcagcggctgacttcattcggaagagttgaaagtaatgtttcatggcattctcgactagagaacgaagctctatatcactaacttgtccatgtaaaaccgttcttagttcacatatttgcctgttctgttcttccacccaatgtccatattccatctcaaatgcaacaatccctaacaagaaaaagaaaactgatgaatctcaaaatcaaatggaaactacctaaacgctaaaggtgaaagaagactcaaacctgagctcatgttatctgagaaactaagagcattggtatctactccgttccccacatagaaaccctgcaacattatgatcatatattattacatcaacaagatacttaaggaagaataatattttgtgcaaacctgttgtctagcacgatcgagttcttgctctaaatgaattagctttaaccggctagtctctagctgctgaacataagcctgcaagaaaatactctatagctcagtttaaagaaaacaaaactgttttacgagttgcaggaacataaagtttcatactttcttgcgcaaacgacttttcctagctgcctctcgattctgtgctagccttctctgtatctgtgaagacataaagattaaaatgacaaaatcttcaaggaattaagataaccaaatgagctatattataacttaccttatcaggatgtctagatgtggaagcctcttggtcaaacttgtgaggagttccttctgtcccatgagaagtatcctctgactgaacaaagattaaagcaagcattagtttctgaattcactttatctgaaatatatagcaaactttgaagtaccaagctgtctggtttttcgttagtcgggattatgatagagccaggcgtatacatgtctccattgttcttgaaactttcttcccacataccgatttggttgagaggctcgtaaacttcaaaccttctcggtggaacaaaatgtgtcgaggttgtattcatatttcttcaactagcaacaaaacaaaaaaaaaaaaatacaaaacttcattcatcaaagtcaagaattgcaaaagatacaagatcacaagttaaagagatatgtaagtgatttgcagccaaaagcaaaggttgtgacattaagtcattatccatcacccaattcgtcaacgctagctactaccttccctacatctataagctccattgatatggcgaaacatcggagtcatcatatacacccgaaaagccctgttcttttactagtgtcttttgaaaggttgtcaaatagatacaagtcactgaattttgttctcaaaacctctaattgcatttccaaaaacagaccaaactctaatgtcattgtcagttattggttcctactgtatcttcttcttttagccactaatggtggaccatcttaaacacctcccaataaggaaaaaaaatccattactctcacccagtgatttgatataacattcttgttataaaagtcaagattcgattataagatatagaaccaaattatcacatagcaaatcatgaaatggtatatcagaagcaaccatcagaataaaagttacagcttcaataagagaatgaaacagagaaacacaaagtttgaacctttttttgcagtcaagcagagataatgatattcatatcaaccaagagatgaaaattcagaaagaagagagatccgaagtcgaaccttgttctggtcttttgtgtcaaaagggcttcaaaaaagacgaacttttcccgcggaaaccatgaaaagagaaaactaaagctagatgaacttttcactttcagcgacgaaatcgaacgctaagcctagaaatctgcagcttaaaccggtctgatagaataagggatggtaaaatctcgttctctgaacttgtcatctcgaagaaggagaagaagaatcattcaagagagaacacgacaactttaaaagagagacctttgattgagttttctaaatttttctatatcctaataaatgtcaataaaaatatatatactaacatttatttctgtttttttttttggtttgttgattcttcggtgatatttgtcctttaagtatatgtactagatacatcagctacacagtcaaaaaccaaattttgacatgtttaagatacctttaagtccataatttattcgattactaatttaattttgtttctggttattctgtatttctctcatttgtcatgtctccactacctcgctgatgttacacaccaagtatattggaaaattattcagtaataataattcatactcttttaagttttccaacgatatatttattatccatcacacgtcaaagtttgcggcgagtctcgtcggtgatgacgtgccaattgacggcacacgcgcggcttagtagcgcgtgggaagagggtaaattactaaatcatattattgtggtaagatttgtcgcgggaatgagagaagcggttaaactttctaacttctatgttgggatttataagacatcaatcaaaacaaagtacttgacataatcgcaagcctgacgtcaaaataaaaaaataagatgcgcgtagtcattagttttgatagttctatagcatgctgaccaaatattgggttaagattacccaatatatataagagaacaataatattgaggtttctctataagcaaaacaagagaccgataagcatgtaatctttaaagttttcaacttactaagcaacgcttatataataaaattatatcaacatttaggcaggcctgcatttaggtatagtttatatccaggttatgccaacgaaaaagattcacatatacgtcttgttgtactatttgataatatttatatactgaaaaagataaacgaacctttgcgaaggaatcacttagctgataaagaaatattgaattatttttgatttagaacagattggctcttcaacttgcattggagtcggagacatatttgtgttgggtgaccacaacttctatccacttgcctctttactaattattttaaacacaacgaatactaactaatttatgtgatttggtgcatttttccgtgtaaacagtatctaaccaactttcccttttcctttagtatgttatcatacattcatacgtatattattcttgttcacgtattacattgtttgcctggcagtaattagtttcctgacatattcacacataattttttcttttccatatgattaagggctgtgagtgaagtcatttagcaaacaaaagaaagaaggctatgaatgaagacgtcattgagggaagagtcctatgtcgacacaattttttcaaaatatgaataatgtattaacagtattagaatacaaaaaacattaacaatgaaaataaataaattcgaaaagatattaatgagacatgacgcacaaactctttgcttttacctatttgtggaattcttcccaagtgctatcttattaaaaaaaagtggtttgccactaagagtgggtgtcgtcactcttcttttttcatttgtatttttggctaacaatattcatgtcttgaattcaatctttgagttttcacgaaccctgtaatatttaactcgacttctacattctaaaagatattatcttttagttttgtttaatttataaaatattatagaaaggattctatatatgattgagtgcctgaacgtagagccaatcattcgtgaacgataaatagtacaccaaagataaaacattttatatgaaagtgatttatgttggcgtgttaacacccagttaaatgtagtgtggttcaatattgttcccattttgaagcaaaagctgagacgataagttatacatttttaatgtcattcgaatttacaaacatggactttaattatcaactgttttttcggcaccggaaatctttcgaaaaagcttgattttttccgaattttgactatataatatggaagaacctagtcaagacaatccgtagttggcggataatccttaatttcccataaaactttttagattatttgaaaagttaagaatgacaaaatgttttgggatttggtcccgagccactcgacatttggaaaaatgttttggacgaagggataaaaaggatacgaatgccaggtaaatcgaagcaaacttgaaagttttttaagtaatgttttagagatattgttgtttctatttatgtatgctcaaatgtgagtgtgtttgacgtgaaaaggaacaaaagaaggcagtgcaactgtagaagtagatcacacttatccactaaataggtgtaaaggtatgatgtttttattcgatgaatttcattgcaaggattttcttgaaacaaatagatagatttgtgaagtagccaattgagtagattgttcatatgtacatttgactcataatagtttttatagccaagttgattaattaatcgaagtaacttactttctaaatactcattatatatatatatatatatatatcttacattctttctaaatttcatatgaatataatatatcaaataaagatatatgtctttctagaaacaaaagaaaaagaacgtaaaataggaagaaagtaagaaaattgaggaagtctttgcgacattatccccaagacaaaatgggaactatcatcatgttaagattaacttccttttcttctctttccttttggttcctacctttgactacattttatcttcttcttttactttactcttttcttctactatattatataaaagctgaatatttatcaaaaataaaatacgtattctggtcaacatctttcgtctaatagtaattttggttgaagtaaaagatagataatctaaaagaagattattaaaatcgtcgtggaacgagacctatcatttcctgatcccccgaaacaaaaaatcatgagttgtaagagcatccccatcagttttgaaagcccacaaagagaagaaagatttaatttgaaaccaaaaagtttttttgtcaaaaactgaaaatgtcgagaaatgggctgtaagtaagtttatataaaattgggcttgtaacataagattgagaaataataatttatggcccaataaagtgttttgaacagatttgggtttcgataatgaggaataaaatgatttcacaaaaagtataatattatttggacaatgccgactaatcgaggtttttaaaaccattgtctgtaactaaaacaagtattggtgcacacacggtatcaataaaccaacctagccaattttctctttaaagaaaccatcaaagccaatagaaagtaatgtgatatgattaacataaaaagaaagtggaacattcctcattcaaaacccgcacactgaagccagtataaatagcttcgtgtatctttggcatagaattggagacagacaactgatataggaagatccaacaatggattcatcggcggacatagcaatattagtggcagatgaatgtaaccaaaaggtgaatacaacggcagagaaagcatcgaatacagcggaggttgggtggttgatgatgtttgggattgaggagaagaagattgaaagtctgatgaggaaatttgaagctaaatctcagtttgctgtggcggtttctagtggcttttttctgcttaactatgtttcatccttgtactataagtcacgtttgaacctcatgctggaaatctagtttaggcatgatgttactttcatttgcttctctaatcaccagagggcatgttgctttaagtttcgagttctacaagctttggttttatactcttttgggttagtttttaagtacagtttcttgtaagttaatggaaacggtgtcgtagtaagaaaaaacaaatcatcgtagtaattaagcctaatccgatgcattaattaatctctgaaatttgttggtttgcacaaaaaaaaaaattccattgttgttgttccacggaactctaaaatggagagtggcgatgagagtccggtggttctaattacgggatgttctcagggaggaattggtcacgcgctggcccgtgagttcactgagaagggatgtcgagtggtggcgacgagtcgatcacggagtacgatgacggatctggagcaagattcgaggttattcgtgaaggagcttgatgtgcaatcggaccagaatgtgagtaaggttttgtcggaggttattgataagttcggtaagatcgacgttcttgttaataacgccggagttcagtgcgttggacctctggcggagactccaatttccgccatggaaaacacattcaacaccaatgtttttggtaataaagatttgatttttagtttcaattattacatttattggagcttcaacagttctggtttttttgcttattagtgaatcattggaatttacaatccatttcaaatgttgattctgtggacattcaaggaactcaaatacgtgttgatcatgtgtgttgcgtttgggctgttaggagagttttgaagaagtgaatttttcaatgcaggttccatgaggatgactcaagctgttgtaccacacatggtgtctaagaaaaagggaaagattgtcaacgttggaagtatcactgttatggcacctggtccatgggctggtgtctatacagctaccaaagctgctattcatgctcttaccgatactctgaggtttgcttttaccgttttcagatttggttccactgttttaacttatcaaacgccgctatttgtgtcgtttgaataatcttcctatgtcgcatgctgatatatattctgtttgttctgtcaatggagatttgatggtagtaaactaaaaattgttgaaatggtctaatctttttttaaggtgtgatcaaacttgagtatcattatttctgaggactaaagtctgatgttgggttaggttgatgattcttgatgttcatgacaagtgtagttgttcaaattatccagcaccggatggttttggtttgtcaattgttttgtaatgtttcctgcttaacgtcaggttggagcttcgtccgtttgggattgatgtcatcaatgttgtcccgggaggaataagaacaaacatagcaaactcagctgtggcaactttcaacaaaatgcctgagctgaaactatacaagccttatgaagaagctatcagagaaagggcgtttatatcacagaggatgaatccaactcctgcagaaacatttgccagagacactgtagccgcagtgctgaagaagaatccacccgcttggttctcgtcaggcaggtattcaaccctcatggcagtcatgtatcatatgcccttatggctcaaagattttttccagaagcaggttttaatgaagaagtgataatcaggttggggtttaagacagaatgtaccttaaacacgaatgtaaaagctttgttcaaattgttaattgaatctcttatgtctccatgtttgagtcagttcggttcttaaggtatagaagtatacatacatacaggaaggagatagagagtgaacaggagaaattattacattatgttgtagaaacttgtggtacaaatatctgtaacgggaaaaggtgaggattctacaaccagaggaacagtagttctactttgatttgacccaacaatgtaacatcgaaaccgcattcgagcagataaaaagggtcagaactatctaaagctattaactaacatcatttctattttaagaatggtgtggagctccgtaatacattatccctggtggctggaaagttggaccttgttgagattgctgagctgagttcgactgaggaatttgaggctgttgattacctatcaaatgtggtggtggtggtggtggcggaagcccaggtggcattaacggaatgttgccaaaggcgtaagggttattcattaccggtggttttaggaactgtggtggtggtggattaggtattacatggtactgaccttgtgtggtaggtgtctgattctgggagttgttgtaagaagggaatgaagcattagtgtctgagaccggaactgtgctctctgatttggatagaccagaagtctttgttgcttcagctgcgaatgaagatagaacagactgcattatcatatgtgatgaggttgacgctgtgagcattgcagcaatagatgcaggcgtcatttttgatgcttgaccagatttggtgttgtcatttgtctcggttatcgtagtggcagcagttgtttgttttgatgtgtaatcctcatcattaagccgtttctgcatgttttgggcttcctctgtttgttctttagctacctaataataacaaaatggttcattagctgaaagctcaggttggtcacaaaacgaagatgcagcgggaattcaaacacatacctgaatctgagctttaagattgtccagttcggattcctgacacaagtaagcaaaagaatgaaaattagattaccgaaatagtgaacttgctaagtgcaagaaaagtattttgtacctgttcacgtagtgcatctttaagctggttcacaagggaacttctacttccttgaacagatttaagtttctcaatacattgtctcaaaaggtattcttcttcttccaattctttcgccaaagattttctcttcgggttgtcttttgctgtagagacacaagttgatttacactagattttgataatcgataatcagtgtaacaggtttttaccagtagagcaggcttcttcaacatctttctccatcttccggattcgtttaactgcagacttacatttattcatctcagcttcttcatttgagttttctgcaacaaccaaatgatatgctgatgctatcttctcagccacaccaccacttgatgctaatttctgcatccaaaagcaaaaaaccgggaaaatgcaatatgactgatattaataggggagaaaagaaaactttggtgtttagtgttttaccgttctggacgattttgactcccgttttgaagatttggatccgcgaggccgctttttgctgatatcaagtggcagaggaacatcttctccaagcattacatctttaagactctttgaacgtgatccaaacactcttctttcttcccatatcttgatctacaaatcacgtaaaccaaatatctcaattagcaattaacttctctattcatgtcttctgtattgcatcacacatctcaagaaccttaaagctcttcatccctaacatcaaacactagactacccccaatacaaaacatgagattgagcattaaccagacaagaacaaaagctccaacgaagaatgaaagaaagagagagagagagaaataccacacgtgcgacagcgcttttgccattatcatctccttgagaaacaatgtctttaagagccttaggaagaacattccagaactcttgcacaaactcattaccttgacgcttactgttctgaagaatatcattagccaaatacaaaagagggactttctgatccatctctgtactgtgaaactgtttctcccatgtcgtaacgatcaattctgctttgctccgattgaatatacaccaatgtgacagagcttgattccaaaagagtcaagaaaccaaacatcgaaaaaattaagcacaattacaagatctaagcataaaggtaaaaactttcataataaactcgagatgaagtggttaaaagaggatactttcgatagactgttgactgctattgagcttagcgagcttatcaatcaggatctgatcactgaacacactactcatcccaccaaaactcacaaaaccctagaaagcagagattttggagaatgtaaaagatgctcaaatcccacaagtggtttacgaattagagtgaaaagcagccggatttgcttaaagccggtgatctgggagacagaagaatgcggcggagctggacaactcgtgcggcggagggtgaacggagaaagaaccctagaaggcagaagcagctgagtagtagtaagtaggagatggtcgaaaacgacgacgtttgacgccgaaatcgatccctagagctaaaatcgcagagaagagaggaatcaggaaacttgtgtttttttcttttgtgctttcaaactttaagatgggctttcactttctttcttctccatattttgttccacttcaattattttatcattttgtttcacctaaaaaaaagatttaatatttacatggaaaaaaacaaaaactttaaatttaaaaaatctaagaatgtatagtagatatttttattaataaaactaaataaacattatactacatggtattaatacaccagaagaatctggtgaaaacttgaaaaacattgctttcaagtagtgtaagccaaagatggaaacttttttagatcaaataggatttctccaatggcttttcactcgctatcttcctcctcactgtcttctaatttgatatggttcatgttcctctctagaggagggaggccatcttcatcatcctcctctgattcatcaccagattcaccatctttcttaacatctaaacccaaaacaagaaataacaggaagcaagtgagatttcagcttatgttaggtatgtggtaatgacagagagattagaaaaagatgtgcctttacgttcttcgagcgcaggtggttgttttgggatctgagtttgctgagtaagccaagaattttgaactgagatgatctcagcgctattctcacattttgagtactcctttagaatatccctgcgatatagcgagaccttgttaaaagacacatagctcaattgtattcaccgatcaaaaagcaaaaatgatgtgacgatgttgaacttcttcggttttgttacttgttcaaagataaaaaggcatgaccccatttgaattttcctaacaaaagttctgcagtttccttctccccactgattggaaaacagatagagtaagacattagaaaaccggataatgtatgacgaatagaagagacggatgggttttaggagaagatgttatggactcaccatagtattaaagcggcagataaagcctccacacatgataactcacatggtcttccataatttactggattagctgctactaaccatggtactgcaaccataaaagaaattagaaacatttcctagagatctggatacatatttatcagttaagtcgtaagttcttacaaagacgaggtgcagtacaacgcagctttgcaaacgggacatcagttagacgtgcccaagaacaatcaacaacagctaatcctttccttttaatcagatcatagtcttcccttgaaacacattgtctaccaactggactgccaatatcatgagactcaaaatacgatactaaaaacatcatccaatgtcataacaaatgaccctaggatacagtaaaaagaggtataccttaaaacaacacccccgaatccagtgttaacccgtaattcctacaaaatcatcacagaagaatttttcagctgaaacacttagaaagaagaggacatatatatttttactagctcaagatacttacttttaacaagttaaatctagcaagcttacgacctgtgcacctctttgcatcacattgaccaaaatcctaaacaaaaaaaacacagttgtgagtactgaagcaacaatttgttcttcgaagtttcattggctttgaataaaacataaaggaaactatgcatacccacattgccaattgaacttttggaactggtgcttcatcctcaggttctacataaaaaatcacccaataagagcattactggtactggtagtaatactaaaacaattaaagcagatcacataaccaccacacaacataaaaatccaacttttcagtaccttgatcaagaggaagcgattcatcttccctgcaatttcaacgaaatcacaattactcaactacgacaaatcgaaaacagagctaaacctcaattcgcaaagataagatttaccttgcaagattatcagtccgaccacgacttgaattacctcctttagatcgattatgcttcccgtaacccatttttccggcgattttcccgacaaatgcaaaggtttttttgatcggcttagggttttatatgtaaattaggttttctaatggtagccgacggaacgatgttaaaccaaaccgaatcgaacaattgagtacacgtgtcatatatcacacctttcattcagggtaattacgtaattttaataaatgatttaagacaaaaccgtaattcccaaaaccaaaaccggacatatgattgagtacacgtgtaaagtacaccgcttggggtatttacgtcattttacaacctcgatttcttcccgttaagcttcttcttcttctctctcactctcactctaacagtcagtcataactctccgaccaacattcacactctctcgatataatatctctcttctacaaatatccttcgattaagaatccaatttctctagattgtttgcttgtttactgtacattagctgtgctaggtcgtgttaatctgagaattgtttcctgtttcagcaaaaccctagctcgaaaaaatggtgtcacgatctgcttttttactcttctgtgtgctatttctagctacagaggagactctagcttccttattctcatcaaggctgattcatcgcttctccgacgaaggaagagcgtcgattaagactccgagttcgtcggattcgttgccgaataaacagagcttagagtattatcggttactggctgaaagtgatttccgaagacagagaatgaatcttggtgctaaggttcagtctcttgttccatctgaaggaagcaaaactatatcttctggaaatgactttggatggtacattgtttctttcattttcactctaaaattagaaagaaaaaaaattcctctttttttcttcaagtttctaaattttgtacctttagattcgattccgaagaaaagtcgtgttttgactaactcaatctgctacatagtcttttcctttgggtttacttcttttttggataattatgctaagttcttgaattttgtagattagtagtgatttgttgccttatatgagttttgtgtttgatgttttactcaggctacactatacatggatcgacatagggactccaagtgtatcgtttcttgtggctttagatactggaagtaatctactttggattccttgtaactgtgtgcaatgtgctcctttaacatccacttattatagcagcctggtatgtgaaatataatgataagcatatgttacttaaatatagagttaagatagtgaaatgatgaccggttagcgcttatttccagttgattgattggcagatgcttcctcgtgtttgggggcacatgttctgcaggctactaaagatctgaacgagtataatccatcaagttcaagcaccagcaaagtctttctgtgcagccataagctgtgtgattctgcttcagattgtgagagcccaaaggagcaatgcccttatactgttaactaccttagtggaaacacctcgagctcaggattacttgttgaagacatcttgcatcttacatataatactaacaatagactgatgaatggttcctcctctgttaaggctcgagttgttatagggtgcgttttgcgtttactattgtatgcgagatgtttgtttgtgttttgagccgagtattgataagtgtgtctttacattgcagatgtggtaagaagcaaagtggggactacttggatggggttgcccctgatggtttgatgggtttaggacctgcagaaatctcggttccaagttttctctctaaagcgggactcatgagaaactcgttctcgttgtgctttgatgaggaagattcagggagaatttacttcggtgacatgggaccgtcaatacaacaatcaaccccattcctccagcttgacaacaacaaatagtaatgaacgatctctatacttatggtttttattttttaaccattttatgacagctttatcaattagtaacttatgttgatttttgtttacagttcaggctacattgtgggtgtggaggcttgttgtattggcaactcgtgtctgaagcagacgagcttcacaacttttattgacagtggacaatcatttacttatctaccggaagaaatatacagaaaagttgcacttgagattgacagacatataaacgctacgagtaagaacttcgaaggtgtttcatgggagtattgctatgaatctaggtacactaattctataaaacagatatatagataaagaagctccttacttggtttattatacagataattttctcttaatgttttttggattctcctttttgttttgatggagacagtgctgagccaaaggtgccagcgatcaaactcaagttttcacacaataacacattcgtgattcacaaacctttgtttgtattccaacaaagtcaggttagaccatataaacacattttatgattcctgctagaaagaattaaaacaagatttagattttgatgtattacatcgtcataaaccacttttcaggggcttgttcaattttgcttgcctatcagtcctagtggacaagaaggaataggaagcataggacgtatgtattagtcttatacatattctctcttacatcctcagaccaatatcctccattaagtacactttatatttttcttttgcagagaactacatgagagggtatcgaatggttttcgatagagagaacatgaagctaggctggtcaccctctaaatgtaagattttgattttaacagaacattagtactaagatctcttgtaggatccaaagctaaatcgaatgataccggggttgttttatgcaggtcaagaagataagatagagccgcctcaagcttcaccgggaagcacttcatcgccaaatccattaccaacagacgagcaacaaagcagaggaggccatgcagtttcaccagcaattgcaggtaaaactccatccaaaacaccatcatcatcatcatcatacagcttctcttccataatgagattattcaactcacttcttctactacattggcttgcctctttaatgtagagataaagattgtcttatcaaaaaacaaaaactattttgccttgcatatatataagaagttgatcttaaagtcttgcatttatatctcgaaataatgttagtaaaaaaagtcgaaatttttgttctaaattatttatttaacgtctgcaaacttcggttatcaaatgattaatagacttttatggatatacaattgaatcaattgaataaaaaaaaagattcacttttgttttttaaccggccaaacaaaaaaaaaaaaaaaagcaagatcacggggttgttatctaaatccgtaacttcccgatcgttctcacggcggttttttaatcgccgggagattttcaagagtcatggccacggcgtttcacgagctgcttctgtgcctccgacaatccttttatcacttcctcatcttccggtgtctcttttctcaatatctcgtaatctccaaccgccgattcccaattcccaagctgcaaccaaccatacacacacaaaaacatattatatttacaacccccagtttatactatatttacgattttgccacaattaaattaccttagcgttacaatcggctcttctgagtcgagccttggtgtagccaggacggacggctagtgccgctgatgtatcctcaacggctctatcgaactggcccattttggataggcaagccgctctgttacatagcaagactgagtttcttgagtcgtggtctaacccttcgccataagccgtacaagcttcttgaaatcgtccggctttaaagaaatcgtttcctcgtgatcgcgctgctgtaaccgcctgcgcacgccggagaaccatactcacttccctgttgttaccatccaacttgccagctcgttgaatagcctcaacagcctctacgaatctgtttaaataacccggtttaggtcagatatcaactacaattgttagcttgtagggactcaaagagaacaaacctgccggatgccatgtgaacttgagcccaaacgaccaagaaaccagcgtaaccgatcgatccgtaatactttgtgctcatttccccatcgaaaaccgggcatctagacaaagcatcgtcggcctcttgatgtctgtatgtcttcaaaaaggcctctgcttgcaatgcatatacttgaggagctgcatcagcgcctgtagttatggtgttttctgtttctttgatcaaagtgttccaatctcgtaatctcttagcctctgtacatttgttgagatgtgtttgaaccattttagcctttgaaatgtcttcttggtcagcttctggacccgcatgcttgaaatgatatattgaattctccacctctcctaacctattggtttaaaatctgtggatttcagaaaaatgatgatagtacttgagtcacaaggtaaggttttgatgagattacctgaggtacaagttagccaaccgatggtgtgctctatggtaatgaggatcgattctgattgcttctctacactcaaataccgcctccagaattctccccaatgccgttaaagccgcgcttttgttgctacgataagaagccttttttggatcgatggatattgcagcttcatacaaggctaacgcctctgcgaaattcccgttcttataatcttcattacccattatctttaacgtttcgggatccattcgtgtggaaatcgctctacacaaagatcctgactggtcttggttatttgaagccggtatttgtgcaaccgatgtttttctttcctcctctaacgtcttcttcactccataccctccaccagtgttcccgtatccattgttctggatagtagtttgattcccacccgatggtccaggctgcttcaagttcccaagattgccaaacaacatcacattgcttgaagaagctcgaaccatagagccattattcccttttgctttctgattatcgatgatcatgctctctagctcacctgataaaccaattgcttccctcggaaccttcctcgcttgttgttgttggactggtccttgattattattacttggttggttattcccattactgcctaactgattgttatttgggtattgatgcgatgagggttttgaaacaggtctttgtacctggttctggacctcgatcggctcaggtaaaactttattttcttgaagcttcctcgggttaaattcggtacatggagatttggtgaactgaatgttagcggtggtagcggttgcggtggaggcattgctgctactcattgtgcttttatggctaccattgtccgcgggacatttcttggaccacaagccacgtctgttaaacacaaaccccaaaaaccgacaacgcgactttttctccactggattatctgccatccttccacctctagatagaaccgaaaccccgccacagaacaatcaatggaaccccaagaaaggggtagtgcaggaagatagaaatataacgaaacagagcttaatggtttgtatttacagaagaggacaacattgttaagaggagataagagatataggaagcttcttttgctgcgtttcctcttcttgaatcaatagttccatacaaaatggcattatgatcaaactaggttaagaagaaatgcaaaaaaggaacaactaaaaataggtcaaaattaaataatgaaaagaacaagaacaattaatttttctcttctcaaatcgatatcaaattctcaatagactttggtgatgggtttgtcttctgttctgttctgttctgtcaattcaagatttcttttcccctctctctctttttctgttgttgtttgtctctcttttttcttatggctattgcatgttgacctggtattgagagaaacagaaaatgaacctcagatttgttaagtcaatatttagaaagaaaaatggatacttgtcggaacaaaaaagggtccgagtttttctcgacccgattctatttttggttgattttttggggttcaaatttgttattatattttttctaagtaatttaaggtgtttacgacgacgtatgtggattgctcataaaatctaaaataatgtgggttcaccaaatcaagaatctaaagagacaattttctagttatctttatatatatgtttgtatttgccatttagaagtttagaactcaaaactcagttcttacaatgctagctataatttgcatgaaaatagaaaatgatattttcgtgtcttcttttttttttggcagatttttgtgaaaaatatctttaaaccacacttgttaattataaaacacagaaatatgtttatgttgcactggccctcagtttcgtgacgtgttgtaaagctggtatacgtacgtataggttccgggaagaaactagttttaaatgaattacaaaatgttttttaagtagtgaattagtactaatcacctcgtaaccctaaattaataacataatacagcaataaacaattcttaaacgagtggttaactagcaaattacgttaactccttaaccaaccaacgggaaaaaacaaaaccataatattaaaaaacaaagggaacgatcgactgattagtcgagaagcagaacttgtgggcttcgtgcacacacgtaatcacgtataatgaatttattctatatgtaattatgtattaatacttttacctttgttttatgactaaattattatgcatgcttgaagtcgcttttaggtctaatagaaaaagaatctgccgacttactagagagtactgagtagagactagagaaggggtttatccatttatgtttcattagggacacttactgaagtagaccacacgtgcggtgtttggctcgaagcacgacaagattcagatgagtcatatcacctatacttctgtcaagtagtgaccgacacgttatgagtcccttttgatctctttaggcttcttctgttcggtccattggccggcgaagtagcgcttgacactccataagaccttcgaatatcattatataactaataacttgcacaatgtagttcactgttgtaataaatgatttatcaaactatcaatgcattcataatctgtgggtttattcgtttagagatggtgtcaaaatattatatgtgaatagaaactggaacaataatataatttttctgtttttgagatttataccgaatgaaggaaatcatatatagtatacttttcttaaccaaatctaatgtacaaatgttttaaatttgcaataatccaaccgcagagacgcggattcgacgactcgcatggttcggcgacattgacattaggacacgttacaacgtacgcgaatgagcgtaggcccatttaaacccattattaggcccagtaggtcccacttttttacctttgttctcctacataaaccaaattcgcagagtaagctggaaaaaacacacacccaagtcatcttcatcttcttcctctctcttcatcttttattttgtaatatctctaccttaatctctagttttctcaaatgggtaggctttggttttactttgattcatcttgacactttaactatccttctctttgtgtaacctatcctctgtttttgcagtgcgttttgtcgtggaaaaaccacagataatgtcagctagtcaaaacattgtcgtatcagagactacaatgtcaagtatcatccccaacaacaacaacaacaacaacaactcttcttcacagaaactccctccttgtttaatctcaatttccaagaaaaagcttctcaagaacatcgacatcatcaatggtggtggacaaagaatcaacgcttgggtagattcaatgcgtgcttcttctcctactcatctcaaatctcttccttcttctatctccacacagcaacaactcaactcatggatcgtaagtgttttcaatagtctctcacaaactcctgataagtcttcctcttacattttttctttctttcttgtgtgttttacgacagatgcaacatccttcagcactagaaaaattcgaacagataatggaagcttcgagagggaaacaaatcgtaatgtttcttgattatgacggtactctctctcccattgttgatgatccagacaaagctttcatgtcaagcaaggttcgtcttaaaaaatcacattaatctgttttgacttgatcatattttgagattaatgacactttgattgctgtttctcagatgagaagaacagtgaaaaaactggctaagtgtttccccactgctatagttactggtagatgcatagacaaggtatttcttatttatcttttctttgtcattttccccatatttttataaatttacagttaactaattcaatttttaatgggttttgttcaaaggtgtataactttgtgaagcttgctgagctgtattatgctggaagccatggcatggacattaaaggtccagcaaaaggcttctccagacacaagagggtgatttttctaatagcataataaattgataaaaacaaaactttaatacttttttctaacagtacaaaacattaatactttctttattgctttaagcttatttatttcctttttatttaggttaaacagtctcttctgtaccaaccagctaatgactatcttcccatgatcgatgaagtaagacatatattatgttgggtctattaattaaataattgaatgttatcttcttttgtcgtacatatgagttgagtattgattatatagtttaatttaaaggtttatagacaactcttggaaaaaacaaaatcgactccaggagccaaagtagaaaaccacaagttttgtgcttctgtgcactttcgctgcgtcgatgagaaggtaaaaacctgaaatcaacttaagagcatatatttgagtataaaaatatatataacgaaaacaaacattacaaatggaaatttgataaaccagaaatggagcgaactggttctacaggttcggtcggtattaaagaaattccctacgctgcaactgacccaaggtcggaaggtatgacttgacatattctcattgtctaaatatctacttaagaatcttttttttggaatctaatttttgttctacaactgtaattgtaaattatttaactttgtttttggatttattcaacaggttttcgaaatccgtccaatgattgaatgggataaaggaaaggctcttgagttcttgttagaatcacttggtgagtactcgagttgttgttattttttatttttatttttgtaaacacttgagttgttgttagagtcacttattagtatctttcactcactcactctttgaaagtatttttttttctcttgtcttttcttttctattagaaagtaccttttctcgactaaatcatttttcatcatcagtatggctcaattctccttttaaatttagataatcaattttgaagactgaaatttgaaactttaattgcacgataggatttgggaacactaacaatgttttcccggtttatattggtgacgatcgaactgacgaagatgcatttaaggtatatctattttttccatcataactagctagtgtttcatacagtagagtatataattaacatactaatcatatttcttaatttacatttttgccatgtatattttagatgctacgagacagaggcgaaggctttggcattcttgtctccaagtttcccaaggatactgatgcttcgtattctttgcaagatccatccgaggcaagtcttaatatataatgattaatagtagaaatgtgtaactatacattaatatacatagccatgcaattagcagttaatggttttctactcctgctaacttcactctccttaatacgaaatcaacaggtgatggatttcttacgacgattggtggaatggaaacaaatgcagccaagaatgtgaaatgataatataataaacgagtgacaatattcgaaatgccaatggatgtatataatgaatatgttcatgcctaacttttttaggaacgttgtaattggtaaaggatatggcagtgtctttaacgtacccccattaggttaatcttcttgttcgtcacattgtatttttgtaaaaaaaaaaaaaaaaaaaaaaaaaaaaaaaaaaaaaaaaagaggtgacaaatttgttgtttccagtagtctactaagttgtaaagtactctttgtaaaattaatatgcaaacgcttgttaagtaagaaagtagtactatttgttgtctcccagtttttaatatatcaatgggtttttttttggatctacgtacgtacattccgttttgtgttagaaatttgttaaaagattgatctatcaaagggatctgtatatatgaaaatcttactggaagtacaatagatgttatggcaatgtttggtagttactgatgaaatagctatattttccccttctctattattttccagtgcttcaatcgatatgtatttatatattatttataatttaaaaccttacgttagattttgagacggtgacaaagtaaaaagtacatacaacatactaatttatttgtaaattgtataatgcgacacatagttagtaaaataattaaatgtatatgtggataactggatataatgcgaggaatttgaaagtgtttgatacttagatgtatctagatttgtctcactttgtgtacttgtctactgacactttgacacatagcctcatggggtccaagtgaaactaaattatcaatttcaaatctgtctgggacgtacatttcactagtatagatgaatcaacctaaccaagttaaatcgcatcaaaccacgaatttattacttgtattcttgctcgtagtggcaaaggcaaactctggaaacttggacgtcttattttgttttattgttattttgggttaagtcgtgttcctcttcgtgcatgtcctttggccctgattacgaacgctctgtatatttatttgctggtacgagacaaatttattatatcgtattgtaggagcagattttgtagttgtttccaatccaagataattaatgcgataatgcttctttttctttttttttttattgtgtggatttctgatggatgagattttctctctacaaacgttaatatatccatttgtatgtatatttggactttatatcttttaggtcagcgacgagagaaatatttttttttgacaaatgagtctcctccacgaacctattgtcaacttgaactgtaatctgacaagctttaattagagcttgattggttctccttctaccacccgcaaacgcagcgtttgcgggtggtagcggttgttagcgattgaaagcaatcatagacaccgctagacatcgctttaaaccgctcgaaatcgcccgttttcaaaagctccttctcgcaagcgtttgcggttgcgggcggtaccggttaggttaaaaaaaaaaatctttttttaattaaattaaataattgtggcttccacccaaactctaatcactataattaaaataatctaatcttttatatattttatttttattagaaaactttaatcaatatattgtaaccctgttgtctcaattatggcatccgatgaaaatcaaaatcaagaatcaaacataagtatcatctatccttttcttcattcattagctagtgtaattctttaactatttcatagcatcgttgtttttattttattttgtattctttttagttttttaattgaatacatgtttcgattttttttctcgattagaaatcatttggtcggacgagatgatatattgtatttatatttggtcagaaaatcaagttttctaatattatcaatttatcataatatattttatttttatttcttttaatagtaatatattatatttattttggttattttttatttaattactatcgcacccgctggtttaccagtcataaaactaacacaaatgcacccattatcaaacgctcaaccagtcgttcaaaacgtttgataacgcttgaaaccgcaaccgcccgtttccgcaaactcccgcaaccgcaaccgcacccgctgcgtttaaaccagtcaggcccttagtcccgttccaacttagccggttgaactaatcaaataaactaaattcgatgtactgcagataatccatatgtaacaactaacaagagaacaattagatgtgaaacttgaaactctcatatttttcaatatatactaatactagctgtgaattagtgtattacagaatattaccatggtggcgtttggtctagtactggcgtacacatatggtctcttcaaatgagtgagaaatcgttctctcttggtttaagcgacagagaagttttggttccgatggaaagacatatgggtctaagtcgataatttctcaagttaacttcaaaataatcacggtatttgtattttgtttctactagaataatgtgtgacatcgcataactggagtatgtacataaacttgagtgatattaatctatgcataaccgtactatcgtccgcacactatttagccatagaattatataagagttagacaaattaaaccacaagtagataaatttacatgtcaatcccagtcgtctctgactttcctacgctactgtttcctattcttactcaaattagtgtttacgtacgtcttttggattctgacagtggagatggtatatacagactacagcgacataaatgaatacatacatatgtacatgttacatagatggacatatatatgagtggctataacatcatcagatgcatgtacgtagtgtctgtgaaagctgaaatatgtgtacaaaagaaaagtcatgactatacgtatagtgtcatagcaaatcaataataatagtggatggtcaaagctttttgtccatagcttttgggtgtataatgcgactaactatcacaataaggctgcatgtgttttcaatccctttcgatgtagacatatcaccaatactcagtttttacttttatatatatgtattctcattgtccatgacctagattaaataataacaaaattacactagaaacccataagtttccatattgaatttgtgaaagtagctatataggatatggtatgtgaaggacaagaagtaagaaccattgcaccaaattggtggtggcctagtggtacaaaagggttgcgtcctttataccgaagttcaattttttttactatggaggagtatttttttaaactggaattcttaaatactgactccggaaacagaggagattatgagacaaagatccagaagtctcacggtttaacaaaaaaaaaaccattgtgaatgaaacgatggactcaatttacccaaaacatgtcatgaagagaaatatacaagaatgaagggtagatttaaccgtctctatctttttcaccaaatatatgattttatttcccccaatattcattttgtattttacatggatcccccagttgtgttgaaaacaacaaggatacaaaaaactagaatccaccaacgtagaatgaattcaaagaaatgttgcgaaacttctaaaagttagctaatataaagtggcaattctgacatggcaatgagaagagttgagattggccaaattggattccacttactcctttggccaaaggtagaatccacagtttttaattgagatgcgttaaaatatactatatattaaaaataaaagaaaaaagcagcaaaaactaaaaaaggaaaagaaaagaaaaaaaacgaaaacctaacacatgggtgaggcaggaagcagagacaatgagacaattccaaagagttacaaagtgttgtcaaactaaactcacttcctcactttatttgaacgtgaaaagatggattccactctttgctttcccttcaatccctctcactggctgattcttagctctctatgctaacatttcttaattaattgttagcttaatcaaattatttgattatacaaccttcaaatctcaattattggtgactaaggagtctctttacaccacaagtctcgtactttttaagtataatatattcttaaccacgttaaatgagatatgtcttctagatttatatatctacgcaaagggtacggttcagttaaaacctaaaaagggaatctaatctaaccaagtattgcaatgtttaatcatatatatgcttaaatcaatggcaagagtatcatatattttattcggctaatattttagtagacttgtatatgtattatagtatcaatcatgtggatcttggagatggtattgaatgaatcacgtggaagagctcagattttatgtcgagttatacatatcaaggatttttatatatattctattcgctagtcccgtttataattggtttctccacaatcaaaagagcattattaaagaggaaggtttttctgttatctcttctttctccatttttgatacttataacaaaactatttttaatatatattttgcatgttgtcagaaacttgaaggtgaagagaagagggatggtcttgttttttgggctcccgtagttttgttacacgtgttcgcattggcgaccggtccccgctttgagggtcgagctttccattagtttgtcttgattcttggcattttatcatctgacttatatactcgctcacgtatatctgtatgtatgtcatacatagatcgtgagcgtttttttatctgagtttaattagtagtaagcgtagttaaattatattgaattacatatttataatttgtaagattagatatgtgtccttaacgtcaaaagagatacttattagatagggtcatacattatgactaaatgttaatcacgcatactcttttcaaaagatgggatctgcctaactcgtgtaccaatgaatgaatggaatatattatatatacgagtaaattaatgtctcacatgggaactcctgcgaaggcgaatgtcataacaatggggagccaaattactatatacgtgtctctcgaacgtatatgaacgtgaactctgtaaggaccaagcaaatatatttatcaaacacaatttgatcattgagaagtatataacataaatcatactatattaatagcaatatgccaatatgcatccatgtgcaaataattagacatatatcattttagaaacacacactcattttatatatacactaatacacacactaggtgactgcgtttcgcaccgaatttgttttgttattttaccaaaatactacattatatcttatatctaccgacatccttttctttttgtaattacaaatctaacatcactagccatatatcagaatatttctaaacaatttttctctgttaatgcaattgaataaaatgaagtcaccaattagtgtgtgtatatgtatgtgtgtgtttaagattgacatattttaggatggcagaagcccacaggtgattaggtttaaatcatctttattaggcttgttttcagtacattaataaaatagtgggttcgtaaaccaaatttactgctccagttattgtgtacaaaaatcaaaaagagcccaaaagtaaattaccaatgttcaaatttgacttgttcagacgtttgttaaatgatcctaaggttaacgctaacttgcgacatacgtcaagaactgctgcttctttccattgtcttcagttttttccaacttactttatatcatttatttatccagaagtcagtacaatcacccaatttttgctaacacaatcccccaatttcgacaatagacacaacacattaaagaaaaacatgagaacaaatgttttttttttcttccagtattcctgaaatcctttgaatccgagaagataattcagtttaattcagatgttatataaacagaatggtcaatatttacaaaaaaattacttttatggttgacttatttgcatgtcatagaaataagtataaacgaattcagctcctaattcttaatctaagaacttacgtaactcatcaatgttcattagatgttacttatcaagaattttgtaagattatcactacgagcggacaccagttgcaaccttatacttgagtctatgtcatcacaaagtaaaacagaacggtctcaatgccaaagtaacacaaagagacatgtgtgtagtagtaactgttttcttgaagaacgcaaggagtttgatagaagaacttaacaaccccaacaatagttgcacacatccataatcatttacgattttaagcatctatacattgcatccagatacttataaaaatttccagaaagagaagttggattcataacagtatgtgtaagagtacttactgggtgttgtgttgttgaggttttttcattgctctctctaaatccatcttgcaatcgtctcgcaattttttcattctcacaaagctgttttgctgcaaaagttggatttcacacattcaaaactcagaagcaaatggttaacagtacaattagcattatgctatgagatcatattaaaagcttctaaaagcacttacaaggtggctactctcttcactgaggatatcgcccatgctaagaaagagcgacctccactgggccatgagcttggattcttgttttgcagaaactgagtttcccgtggcatgaaaatctgtagatctttctttaacattcccttgaatcaagttgctagctgctttctgactcttcttcatggctggttcagaagaaacaaaaaaaaaaacagatcttatgacaataataacaagaaaatcttcaagagcttgtggcaaatatatgctttatacatatgaagataatcgggacttaccggataatcgtcctttgctatcctggtaattaagatctgaccaaatatacgaagctgaagcaattcattgatagcagtagctaagttagataatgttcatggaaatcaagagaaacgataagtcagaaaaagctgaaaaatcaaacacctgtgagacagaatgaacaacagcatgatctaagcaagtcatctcctgtattcagattcacatgctccttattcttaacattggagcatctactcatttcaaatgatctcaaattctgacaatcagacaactccttcccagtcttcagtagattccggctctcggtatcgctagttaacaaagataaagccaagccttctccaccagtaacatcggtttgatccgcattagcagctgcgtttaactctcgtgcaccgtctctatcaccaggttcaaaatagatctgtatagacttgctttccttcaatgctttgcaatctccactggagaattccattacagcatcatgatactcttctttgtcaacagcatcaccagaagtattcttatcaaacgaacaagacccttgaattgtatccaaaggtgtagcattttccttaaccaaatcatctacgactaaacacaacctctttgaaaacttctcttttgaaacttcatgagcaacggtcttaccagattcatcaagcaaatcacccaaaatcgatgaaatccctcttttctttggaagattcgtcaaatcactcaaaacgggtcgggtttgttccgacactgatttgctgctatcttcagtcatcttcaaaatcacccaacaaagaaagatcaatactttcaatttcaaacaacaaaactaagtcaaattcgatactaagaactcattgaaagtcggaaactttaaccccagattagaaattcaacaaaaacccttaatccaaaactcaatttcgaatcgattcgtacaaaaggatagaaaaaaactagaaaatttgagtgactgacctagagagattgataggattcgtcggtgggataattgtggaggatctgattggtggggaaattagggtttttgatttggttgaggcgggaaccgtgcggagtttccgatctcgattttctttttttggactcgcgtttttcgaaatcacaattattaaattaaagcattaaagtgagactggagagatatctcagtggtcccactacttactgagataaaaaatcattaataaagcccaatagttttgaaattaataagcccattataaacttactgggcttgatacatacgtatcagaagggatcatatgggcctgaccttattttgaagttttgaacccgagtttccaagtaaccgacaaatcccaaaattatgtttttgtttacatatttattccatgtattattttttattttttactgtaattaactatttgttagttttcattttgaaacgaataagttgtaattaaatccattccccaaaatataaaaagacatttaagatggtaagaaaaacgtacaagtttcttaggtaagtaagcttacgtaaactcgatcgtaataatatttgctgatatcaataatccctgaattccctcgcttacgatcaaattcaatgctttcagtttcatcttatgccatctctcgctcgtaaataaaatcttttttcttaaacagctaaaatccttttaatcttcttgtctattaatatacttatcatcacctataggtcttatattatgcagtgtgcacacatgtattatccacaattctacaaatatgtattatgtattatcagatttgtagtaaaattcttgacgacaaaactatacttttctattgctaaaaaccagatattgttggaaatatacttatgtggtaagaaaacgatgttgttgaaatacacaaatactaaaatacaattcatgcgtcttgttttctaagatggaaagttcccatgaattttctttccggctttgactatcttaaggcggccattttaaaaatataccaaccatgcttaaaagaaaaaaataggtacaatttacaaaaacattcctatattatgcgcaaagtgacaagaaaaagaaacagccctatcaaaagttttagttagatatatattaattaagtcggtgcaatcaactctcgttatccatcgagtatgatgcaaccgaagaacaagttttttttgttgttgttgtaaatgttaaataccgaagaaaaagttttagtaacgtccggcgtcgtgatgcccggagataactcttatccacctaaaaaacataaatatttccgccacaaatttccaaatactcttacaacttatgtttagctcagaccaaaccaaaccaggagattttgacacgtccttcatatcacatgcacaccatcctcctcccaccaaaaaatcatatacaatttgtgatcttcacatataaataagcaatcaattttaacaaaggtggtcgtgttacatcgagtatatccttctacgtacggacaataacctcaatcacgtataataatatatagatatatatcaatttagtccatgactcgaaatataatggactaacataaacaatggtggaagtcgaagaattggaaccacttagtccaatggacgatgaagaagaagagataagctatgatgacctcaaaagacgcatgtggaaagaccgaaacctcatggaaaaaaagctcaagcaacagaaacgacacagcaacgacgtcgtttcgtttacaacacaccgagccgaagcttcacggcgcaagaagatggctcgttctcaagattcagtgttgaagtacatgatgaagatcatggaggtgtgtaaagctaaaggttttgtatacggaattgtaccggaaaagggtaaaccaataaccggttcttccgatagcttaagacgttggtggaaagaaaacgttcagttcgaccaaaacgctccagacgctatcacagattacttagcactcgcggctgctgctgctgcagcagagctaatcgataagtcctcatcatcctcgagcttattacacatgttacaggaactgcaagacacgacactagggtcgttactatcagcgttaatgcaacattgcatgccgccacagcggcggtttccgttagagaaaggaattgctccgccatggtggccgacggggacggagctttggtggggagaacaaggagcggcacatgagcacggtgcaccgccatatcgaaagccgcacgatttgagaaaatcttggaaagttagtgttctcgcggctgtgattaaacacatgtcgccgaatttgggaagagtgagacgtctggcgagacaatctaaaagtttgcaagataaaatgatggctaaagagactgatacttggtctcgtgtcttaaaccaagaagaagctcttctcaatatcaaagacctcaagatctcggaagatcaggacgatcaagaatcgtcggggtctaagagaaaaagtgagtctatggaaccgtctaagagtgtttacacttgccaaaactcgagttgtcctaaaagtgatgtgagttttggattcggggacaagaactcgaggacgggtcatgagatccagtgtctttatgggtcgaaccaagaaccgagccagagcggtgaatatacatcttccttgcttgaaacggttccaagtattgttactaattcgactagtgaagatgattattacaatgtgagctcgcgtgcactggacaagcgagatgatgatgatcatagcattaatgggaattggatggaatatttctggttagaaaagatgcagcaggagtttcattgctctaggagattcgaagatgatgagggtactggaacggactttgaccaactcacagaatctgatcgatcggacaacgtgaatttgaaccaacttacaaaatctgatcgatcggacaacgtgaaccggagtgctttttcagtttgggacatgggttgcgaggacaaagacatatacatgttcgattaatagttaagctcgttaattagttgctatgctttacatgtacccaaagtcagaacatttctgtctgtacttctctagttactatacaacacaataaaataacttttagatctcgtaataataagataactaaaatataaaatattgaagaactatcgtaattatacgcagcatatcaaatgatgatcctacataagtaacagaacatacaacaaattcctctttcttgccaaggacatgagatttttttttttgaaggttgcaaatactttattttatatggtttatcttagatatgtctaaatagtctcaccatctttagagactcaacaatacaataaaatagaaataaataaaaactctaaataaacttttgtgttctgtttcatcaagaacataagatgactcaaatagcccggttatcgccgtctgcgaggtagcgtttgcggagagcggcgcagccacggagcggttcgtccctgaagaaacccatggcgttggcgtagtgacgagtagaggcggctccgttggagcgcgtgaggatcacggtagcggtgcttctgccaggatcagcctcttggcagcgggacagtggactgtgaacaagctccgccagacattgctggtcctgtcggtctcctctgacggcgactttgtatttcccatcaggtcccgtcaccgccaccccaaccaactccgattttagtgtcactctgtctttgcatactattctcactcttgcccctgtttttcatataaccctcaaaattatttcagtcttaaaattgctgcttttgttttcgcatgcattttttttttttgataaataattacatttctaaatatagacttttggatttccttaattaaataatttgtaaaatgaaaaataaaacaataacaaattattttgaactcaaacaaacaattgaagatttagaggtaaagttgatttaattgaaaatttacctaatgggtgattttttatttacttgtgaagataaaatttgcaagtactgtatactattatgctatttacatgtaaccaatcagatccaatgaattacaatggtacaatgtgaaatatatatatgagaatactaactaggtaaagtgtaaatacggaccgcggatatattgggtggcgattgtctcgaatccaaagcggcaagtgtcgcagtaaacacttccttcaatgtggaatggcgttccaaccgccatggctgcaagtgggagaaccaaaacgcataacacagcgatgagaggtacaaatgatttagccatttggagattgttattagtgaaagggttttgtgtattatgtgaaaactgaaactatgtattatataagtaggaaattgaagggtcaggtgtaagtgtatcgcatcttgtgcaaattaaaagcttccttagtgtcggctggatccacttgcggctgctcctccgccgtactcggcgagaaagtttgtgttgccttctacacaagtcaactcgtatggtacttgttatttctagtctacgtctccatcggactttacaattttatttcgaatgctttattcggcatttgactttatgttggtaattaaattgtaattctactactatatttaacaaacctttcacttttaaattatacaatgaataatattataattttgtatatcaaaattttgtggattaactagaatgtgaaatagagtgatgaaattgctggttagcttcggtccgaccagaacgtgcttatgtttcctcgttacgtaagagtgcattttaacactgacgattctctatttatcatcttgtaggctgaatcagagtatatagactatgatttaatttaaatcagaaatgttaaaaggtgattaatgacaatggcgtctggaactgttgatctaaattaatataaatacgagcgtaactttttctattctatatgtgaattatatttatacatataatgtctaaaagtattatcattttagtgggaaaaaaagaagtgttatcattatataaatgtggattagtttaagggatccttcatggatgacggaactacggaagtgaatttagtccaaagaaaatatggaagaggtcggtcacgttaacagcaatgactttaagaactaagcttattgggccgaatgtgaccgacataggcccaaaaaacccatgccaaccatacgcgtttaggataaaaacaaattaattacgacgagagaaaaaacgcgcagagagagagagagagccacgtccctgttgcaaaataagccgtaggcttcttcactgtgaagcaaacacaagtttttgacagaagtgaagaacacatacactcaagatctcgatgcaattctcacacgaataaggtacaaagttcatcaaccttttgtcttaaaacagatagtattgacttagttccgtctacttaagtatcacacacaaagtctcttggccaaagagagagtattaagatatacaaacgctcgcccttatcagcggaataattacatatcttattttttttttcttcataattatatatgttttggattttgatttcaaccgccgatttaaggtggctaattaagtagtgggagagtcaccggaagattgtcggagatttgtccagcaggtgacatctccatctcagcttctgctcccacatgatgattattctccatctgtacgataatcataggtcaaaatcactattcactttctctttttgtcttctatccaaggaatatctttttcacaccaccaaataacaaccattaaaaaacactacagaaggttatgtttctcataatttgtgtgttctttatgtttaagcttttaagtttggaagcagtatctataatcttttaccagtttataatttataatctaacctatatatagcatgtaaaagtagcactacttctagacacttggagttggaactgagccactcggatccaaacctaaccataacaaaaaaaacaaaaaaaaaaaaactaatcggtccataaacttttttttttggttaaaaggtgattaacttaaatatagacaacgtttacacaaccttcaaggaaaccaatattgaactaaactagactgaaccagaccataacctgaaagagaatcaagaaatcttattgaatctctaccaaacccagacttaaccagactataaaaggttcataaatctccaaatgaaccaaaacctaattaaacactttaacatgaaaaaaacgaagaagaagaaccaaaacctagttatgtccaacaaccggaatttttttttcttaatttagtaaaatgatatagcaatcatgtaatttatactcgataaaaaataaaaaaataacttcatctgatttcccttaactctaaccagccgttatcaaaattctgttcttattcagtaataatctcactaaccctaataaaccaaactaccaacaaccaaaatgccctaatcttgagaagaattgtctagaatacaactatacaagacaggaaagtgctaactagtgaatgattgaaatgcactgactatatatatatatatatatatctgcaagcataagagtgtgtatctatgtccatgtacatggacattggacacacaacacgcagtgcttattagttatgcatatatatttttaggaaatgtagctttcgttacctggctagccaaaacctggttctcttctttcagcattttctcctgatttaaagatcaaaatgttcagcaattaccgatcaagtttctaaacctaacaacttcagaatttggaatccaaaacatatgaagaaagttgcaaatatgtgtgcaagctcgttaagcagacttaaagtaacagagacaacacagaagaggatatatctgatgtacaataaaattggtagcaaatatctgaccttttctttaagattctcaacaagcttcaacatgagttcggtctgcaacaaacaaaagcagcacggttgttctcagcaaacaaaattcagaaaggagtagacattacgaaatcaacttaccttcttggctctagtcacggagagggcagtctcaaggtgttcctccagttgaacaagagcatcgatactcacatttttgacatttgatcccacaagcttgctgcatatattcatagtttgacaaaaaaaaaactaattcctttgtaatcaaaggtggagagcaaatatagtcttagttagtagtactaacctatccacaagttcaagtagctcatagtgtgaaccatagttcagagcttttgactgatgatcctgcccatgaaaaagggacagaagaagcggtaaaagacaagggctatgaaaattgcggtatgcataatgcatgtggagccaccacctcattttatatttaggatcactcggcaaactaatagtaaatttacgccttataaaactccatcagggaaaagattcaaaatgtttgtattaccaaggctttaagatcatcagcatgctgtttcccatatcgatcaaggatcttgaccaggctggagagatgacaaaaaaaataaaaatatgttaggatcaaaactactagctaacccttgaaaaggccactggaaactatgaaacattgagagaacaccttaccttttacatatatataacacgctagtattcgtaacatttcagaaaaacaataatcttaatattcatgtttaagcagtagcacatctgaatttccactttttcaaaaaagttttaacttgttcttagctttgtaagcaatatttaataatatctgatattttttttctctctcaagaaaagaaaagaaccaaaacatttaccaaaaattgctcaaagattagttatccaatgaattatgtgggctaacatgtatttattatatatttcggcagattgaaaatgacattttccctcaaagaaaagtcatacaaaggcatacagataaagtttagtgatagcgctggctttgattaacttaaagtcaaactagttaaggtacataagaaccctaaacataagcctctactgtccagattgtttctatgcatttatgtttgtgaatctatgttgaaataattgatgcaatataaaatgtaaacgcagccccaatcttaaatgcaaacaagcaatttttatttttccagaaatcatatatactcatgaatgtatatacacacatatattgatgagccacaatgtgatgacatggaagtaaaccgaagtaaaattccaagtacacagactgagtctagaaagtcatatttctcttaattttctgaaattaactgaaagacttccctaacaatagcaaatagtggaagactgcttccaattcatttgcaaattaacttatataattctaattgcaacctctatcagagattcagagcttccattttggttttgatccataccacaacttttagcatcaaaaaacacctatatcctttacaaagcgtgttatcaaaaccattataagaacaaaacctatttaccctctattttctatcatgtttacccttataacatttgatcaggactacgaacaatggtatcaaattattagttacctcttttctttttgtatcccagttttaaaaagaattttttaaaaacgcctctttcatgagttcattagtaatctcgtgtcaaaattggtaacatcagctctttgtttgtaagtaataccatatcaacatatacgagaaaacttttcggatttttcaatgaaccttgaggacaaggttttttccagcgatagagctagtattgatgacccataagatgataatgatgatgtggcggtaaccagataaccataagtatgaggaagccaaactccaaatacatggaccgagtcttagacaaaactcatatttctattgtatatgttttttttgcaaatatcaaaagactcctaagaataggaagccggtcttccattttgttatttcacattcaattacttactcgtttatagaaactgtgaggttccaatttcctatatttaaaccccaaattaatcaagcaataaaagtaaagagttttctgcccttgaagttacactaactaatattagtaggaaacttatcacacatatctataaatatatcttccatagaaggaagcgactaagacagataaaaactaaactacatattgacctagaagatccaacaattttgacaaaacttcacttaatttgttttgttaatagatatcagtcctattgtgaagttaagctctttgcatcaacctaagtatgcaaaaagagtaactgagtaactaagggttccacgttctaaaaggcttcttctttattaaatcataattaagaccaggagttctagtcaggtgtctcgacaattccaaggctggacctaactaggggtgaacaaatcctaacaaagtatgcatcaagtgagaatcggccagcgatcttgaccaacatggccaaactactacaaccatttggttattatattggagggttgtagtagacactacaccagattcaattttgacaacttatatataggattatattgattcattatagatccgtaccaaagaggttggtatttcttacatgaagacaagtgttgtgggattttcaatttcctagaggcaccaaagaaacaaggctgtgtgaatgacaatttccatgacaaaagacacaagatacaaaggttgtgtgacaaaagacacaagatacaaaggttgtgtgattgtcgattttcacaacaaaagattgaggttgtggattgtcaattttaacgaataggaacaaagtcataaatgaacacaacgatgataagattaagggcgataattgatatacaatcacataaatatgaggcaaatctatgtgtgtaactgcaagagtgggaaactataaacctttggacaatctttaaatagcatatcccataaaaaggagagaaattcgttaaaaatattatgtatatattaccaattcatcttttagtcatagtttcccaattaatgtggcttacatttaaaaccaaacttcttgatcctttttaccattaacctcatactaattttatttataaatctcccggacgtgcatatacaaatccaagagaacaatgaaatttaattagtctaaaattagaccagtttatgtacagcaaaaggtgttatatatatagcacacgacgattgtgattcaaagaatcgcaatcgataaccagattatgttactgaagtagcatatgtgcggtaagtactaattgtgaggctgagttttttgaagctaccaaaattcaaaactactgtgtatgaaaaatatgaatcaattaaaaacactaatttggataatcaccaagtaataggtccacagcaaagataggaattcatagaagattaacaatagtcttatatagtcaatagctgcacaatgtggtatatatacattgttcagcattaaccccatagcaactctatagatctcccgtaagtgcattgcatacaaatccgagagatccaatgaattttaatcactctgaaaagagacattaatcattagtcttgtgatatataattaactcttcaaaaacttaaggaatctctaaaggtaagaaacaatcaaagatggcttgaaacttcactcaacaacatcgagcacgcatcagatcgtatcaaacaaatcgtgaatgacatgcaatttttttccaaggaaataatgaaatccatgcagaatttttttttttaagaaatagagagagaaatgaacaaaagtaagaagctaaaaagcttcttcacgacattgttcttccttaaatttggttatctcatgtatctatcatggtcgcagaaaaaaacacaaacaaacacagaaccgagaaacaacaagagatccgccggaaaaaaaccaaacggtatattaattgtttttttatttttattttctcagaaaagtaaaagagcacaaaacagaagataaaagggggaacaaatgaaaacccaggtaaggaaaaggcgtacttatcgccggaggagaagctgtagagcttgccggaggcggagacgacgagaagagcgacggatgcgtcacagagaacagaaagctgacgagctttctcgatgagaccgttgcgacgtttggagaaggtgacttgtcggctacttttgttctcaattcgcttgatttctagtttttttcttcccatggcttctctccgagagggctttgtgccctaatttgatcctcaggtttgggttcaagtcgccggagatactaagcgttttctctttctatttttttttttccttttctcgctttatttctttctattttttgtgcctatctactttttcttcgtcgggccagatatttttttttttttgggggtaaacgagagtgatgcaaaaaaaccaaatatgtgaataaaaacgttgtgttttgaagacaagattgccacgtgtaccgcatgacgagcgtctttgctacttttgcattgccttagttttcactttcgttgctaaatgaaaactatctttcctcccctacgatacggattgaactattgcagaaagaacctccactctacatcatctttgaactatgtagacatatcgaaacctaaaactggtttgaactcttccgacttctcaaaacttaaaatttggcagttaattagtaggtgttaccaaagtcgtgcctacatagtaaaaacaaagaaccactcgcctacgtcatcaaattttataaaaaaaaatgtgtttttcagatagtattgaaataataatgttcgggagattaacacaaataataaaggaaagtagtaaatatattgtggaaatatataagatttctaaaatacaagaaatcttaaatgtccacacatatggcaatagctcaaagttactaattcttttttgcttgtatcagcttgttttttttttggtgaaatgcttgtatcagcttgttttccttttatatctcattaattattttttaccaatttcttctttatctaattttattattatatatttttacatgattagataccacattctgaatatcactatcattatattaattttattaattactaaaactatattttgttttgctaataattatatagattataccgtttgaatggtaacacaataaacgatactaatacaaattactatatgtaatagattacatatgattaatctaattactataatttttcttgttttgtaatattttgttaaaaaatgttatattagacacttgaaaggtgaggctatatcgagtaacaagacgaaaagaagtgggtgaaactgattacaaattttgtaacgatattggtgattggtattaacttttttaatggagccacacaaacatttcactaacactcggagtgggtgaaactgattactgattttgtaacgatattgatgattcatgattggtattaacttttctattggagccacacaaacatttcagtaacactcggagctgtgccaagaagttttgatgctataagcaaaaaatataatttaatattgaaatcatatataatcaacaaaattttaataacttatattaatgttaaaatttttgatgagaacaagctctagttcattgtataatgcacctttttattaatttggcaagacacgagttaagactttacataaacaaacacacataaggaagtcagtcatttgttctttgatctttattctaaatttaacccaaatctttggctaccatcgtatctagaccattacatatctaatgttttgaactaaggttattttactcaactcgcatacaatttcattggaccaaaccaaacctacaaagactttcaattggattgtatttaccacaaaagtgtacttataagcattaggttgttccctccaaaccaatttgagtttatttttaacattgccgcattgtagctacatgtctacactgttggtgtatagtattcacataatttgcattcctttgctcgtttcttactcgctatcaggggcggactcacgttagtcatgggtagggcatgtgccctatactgaattcaataaatattatataagttaacattttgtagttaaaatgtaagtagtacagtggctttttacttaatagtgccccacatcaatccaagttcaagccttactattatcattttattgttttttttttaactgtgctccatatgaaattatttcttggatccgccactgctcgctattgcatatgcaaattttatttcttgcaaatcagatcaatagttaaacaaaagtaaagaacattatatttatatatatatatatatatatattaccacaaaaattgagtactgaccaaatgattttcatggactttcaaacgatgggaaaatgtttgataaccctatggaacgttccctagaccatgatttgtcaatataaaaaaactttcttttggtatggtgtcaatataaaaactttactattaattgtgtggcagataataaaaatatcgaatttttattttaaaaaaaacttaatgcgaaaagtacttcgaatcgattgggtgaatgtacggcatgatttatatccaatcatcccaccacctccttgcccttttctggatatgtcaattatcatttcttcaaggcaaaaaaaaaaaaaaaaacacttttcttcaaggcatctctatgttttcaagttttaatttatatacagtatcaatgtttaattctgatatcatattttcaagattttaactttcagaaacgacaaagatattatcactctagtggattcccataagattagattgaatttacgattttgcaacacgaatacggattttgccatttccattctctttaaacaactagtcagataaagtggagcaaatatattccccataataaaaaaacaacatgtagtcgttaaaattcattatcatttactgcatctatctgtagcagtaaatactaataaaatactagtccataatcattcgtttactctatagtattaaactctctttttttatttcttgatttgcttcgatgatgacattaaacacgttcttggtatgcatttcaccttcgccatcgatctttcttctttcttcttcgtttccttagccatctcaacaatctttgatctgttcaaatatttaaggatttagtgtgaatttttgtaaccatacttgtcgattagagctgactcggtgtactaacctttcctcgttgaacgagttggatcgtcttagcgatggttcagccgtgactcgttcctgactcaccgactcaacgatgcttccgctgaaatactctttctcctccgcctgaggattcccgaaccttggattctccgacatgaaccttatcatctcacgctcgtcatctacgacagtcttcttgacaatgttcttgcacaaaactccttttcgaaggttctcttctttttgtctcggattcatcacactcggtgcgtagtacttggtggcgatgtgaccgcaagagatcatctgcagccacatcgacccacgacccgatccgggttccaccggatctccgtcctcgacccgcgtcgaaacttcgtgtcgacgtggcttcaccaccgggttggaacgagtcaaatcggacgagtcagaacgtacttgcaaatcttgctctgtcttggtcaagttcggtttttgttcggtggattccattgtctccgtcgatacgcctcgagaacagcgagattgaggcgtcgtggaagatgtgtaactcgttttctcttcgtaaagctcgtactctccatcttcttcctcttcctcttctccgacgtagagctctgcgtcgtcaaacgacgccgttcggttttgaggcttgagttttgacctgagaagtcgactttttggagcttcttgaatagaaccagacaatggtctgttcacatgtacttcttgaaatttgtctacaaaaatgtttagcaaacaagaacataaaattttaaactcaaattctgcaaaatcacaaatttcaatttgtatgagtttccgatttttaacagcttaccggtgatttcagatcctttcaagacatattcagcacagtcagaagggtaaatcacatcattctctgctaagtcattccacacaaatccatttctatagctcctgatgaatatatcaaaatacaatgtttaacatttgcgcttttgattacagattttgcttcattttaaaagcgttgttaccttttacacgaccaagcatattgtgatgtcatgcacttccctctcagaatcgtaagccggttcatcacatcttcattagaacaaacacactcttaagttgatgtatacgaaacaaaaatcgaaagtttagcataaattgagatcaaaacactaaacagagcaagacccatggactatatataaatagcgtatagtgatctccctctttctgttgttcggtcttttacctcttaaccggagaggctggttaaccggagaaatgacttcgatgaagtgaggatgttcaaggtggccatttcttgtgagatagtaaacaacttggactcttcggaaaatgggtttctttgtcttgacctcttcttcaagttcttcatcatgttgatgatgattcaaagaccttatgatcctctctggacttttgttgttctctctgcctcttctgcatcttacagcttccatcttttgtgtctataatgtccggacaagagatgagaattatttaacacagactgtggtctttatatatagaaagataagggaatgtatttatctctgtgtgtgtgtgtgtgaattggctctctctgtgagatagcagaattggcattagagatgagccaaaccagaactgacaacgacttggctttactttctttctacctgatggtacaatgggataagccggtccagtcttaatctatccagctctgattttatcttgattttaatttggatttaaatccggttcaaccttattctttgggtgctttatatgggctaaaaccgttcctagaacccggttcggtcatgatagatttagaccagattggtccctcatgctttagaagatttagttgaggaattgatgtgtcatgtcattaatgatattctttgattgtcgaatattaattaataaacatcatttaatttgtttcgtttgcctaaatatggataaaaaagatagaagctaaagttgtttcagagaagacgatgagtcaagatcattgtgcttcatatggaagtttgacttttaatgacctcttttcatgtattaaaaaaataatgtttttgatattccatttgtttgtatctaaccacattcttccaagtctttaagataaaagagctccagaatctaggtaaaaactaaagagaacacgtgagggttgtttactgcttttgtgtactgtctcaatacatccgttaaaatcagaccaatatgacacatcaatacaatagggtaaaaactttaatggacggttttctgaaacaatatttctctttcaaatgattctaactgttttaactcaataatatattgaaaatcaactgaaattaggttagtatgaacagttaaatttcattagtcgttgttttggggtacttaatgaaacagcgaatgtggatatgttcttttataacccatttgcatggacataaacgagtttctctgggcgtagagtggcccatctacttaacttcctcaccagccacccaacaaaacaatgctattttctaaatttgtgtgtcagcttttcatgacctctgaataatcttttaataattatgagttcatagaagaaaaaccattttaaaaaaagggggaaacgtacaaatgaacattaaatattgaaaggtgacaaaaaaatagaacattaaattttgaaaatgatttgataaattttgattaatttcgaaaatattttgtatgatcaacattgatctatagaaatgcaataataaatacaatgaatattgcatgataataccatcgttctttataatatacaaaaaacgtccatctacataaatgaaatacatatatgcatttggcttaaaatgatataatactgttatagcatctcctaaacttctccgtctctccaacgcaatgattagatgtattcgacttttattagattgcagtagttgttgtaatgtattgatcttttactatttttaaatatgagttgaataataatagtaataaagtgccttgtattttagttgaatagtaaatttataagtttgtattcgtagttgcagctatatattgtaggcgtagggggtagttgcagctacatgttgtaacttgtaaccaacggttaccaaatacggtttctgcatttttaaccttccatattagaaatactagctgaatgatacgaatctgatacaagacaacaaaaaagtaggtgaaaattatatctaatgggcttagatgtttatctaaaagaaaggcccatataagaatccatttccaattaggaaaataattaattgggcctaaaaaagcccaactcaggcctaaacaacaaaaaggcccatataatcatcccattttcttcacccaccaaatccaccattgtttccgttggaagctctttgaaaactcctcccttcgaattctccgtctctttctctctgtatcgagatcgaatcggcaatggctgcttcaagctccgttttcacagtatccccgtcgcgaaatcttgcagctattcctcttcatcagtccctatctccaccgttgcttagatccagctccgtcgcgtttcgtcccaaacgaagatccagctcactcgtcttatgctcaactgatgaatcaaagagcaccgcagagaaagagatcccaatcgaactaagtaatttccctcttattgcactctgattttcaaatcaagtttcaacttttataaattgttaatctttaattgtgtcagggtatgaggcgtttccgacagtgatggacatcaataagatacaagagattttgcctcacaggtgataattttattaaagcattgttctttttacagctgaagtttgcattgttgtgatccagtttctcaaatctgaatcttgttgtgtagattcccatttctgttagttgatagagtgatagagtacacagctggtgtatctgcggtagctattaaaaacgttaccattaatgacaatttctttcctgggcatttccctgagagacctataatgcctggagttctcatggttgaggtaatttgcatttgccctattctctcttcttactccaaaagttcaatctgtttgcatatatttatagttaaaagagaagctttttgagcctagacatttactttttgctctgtttcttgattgcttagttgattagttggttttgaattgtgattttggggaatagagtgagggtgaaatttgtgttcaagttttgagggaagtacaggtgaaggcttttggtttaagtttcagttaagggtcggttaatagagatctccgaagctcgaaatttaagaaagggacttgatttaagattaagataagttgttctaaaggattcttggatcatagctttatgctgtgataaaactagtaatttctatcccaaatgtatgtggaatgaattgttaggaggctccttatgtgttgttgcagttaataagagctacatatagtttattcatagagttgctgagttttacacatcataacaacactactaagtggtatggtatatgttttggttctacaggcaatggctcaagtgggaggtatagtgatgctacaaccagaagttggcggatctagaagcaacttcttctttgctggaatcgacaaagtcagattcaggaagccagtgattgcaggtgatacgctggtgatgaggatgacacttgtgaagttgcagaagcggtttgggatagcgaaaatggaagggaaagcatatgtagggaactctgtggtatgtgaaggagagttcttgatggctatgggaaaagaagagtgatcacgcctttgtttctttcttcttcatatgggccttgtggctgctaattagttgtcacatcctaagttgagtctcatttctatcttcaatttatgatgtttgtttgcacattatgattatattaaaaaagcaacttcagttttaataactagatgacccaaatatatattatagtttgaaatgagatgaaagacaatcccaattcagcgcgagataccattacatatttggctggggaagataacgaaaccacatagatgacatttgtaaatgagagaaagacaaagaaaagaacacttacattttagaaatgtaattatttattaaacatagaaagcaacatagctaagaaagggggtcttgaattggtctctttgatcacttgtactcgagaatcatgttgttctcaggagcaagtccaacacaagctctgagtacgttctcaagcattgcacgctgtttcgacaaagcattaacaactggcgtgccaggaggaacctgcattcattgaatgaaagtgatgttaaaggaagtcgctaggattgaaaaacggcacaatgttttgcttcggttttgcttaccagtggtgcctttgagaggtaacttaggagagtagccaccggatggaaagaatgaaactttccctgcaagaaaccaagaaaatcaagctcacaactaaatcaatttggataaacattgaactatctaacgattttgcaaataatagcaaacctcgttttcactcatgaactggatccgagtagtgagctcagcaagaagaacaaggtccaaaataattggagcagccaagagagagtcttcacaagtgttgtgcatcacaatcgtgttcttccctcccatgaatatctctgatgtgtattcatccattgctctcttgctgtctcctacacatggcacatactgcaacaccatccaatagtataatttatgttaatgtgatttgttagattggataattataattaatagtaaaattaatcaccttaatgaccacaacgtggtcagggtgttcaccaggctcgtacaaaattccgttgctaccaaccatatcgtccacgacattgctcttcgatatctcctttgaccggaatgtttgaggtgctgacaagttcatgccgtcgttgttcccaagatggttgtaactgacaatcgacgtcggctatacatatagataaatgcaattaatttcgttttgtaacgttaccatataaaataaatttaattaggatacttatttaggattaagtactttgattccggcgccaacaaggaaatcgacgaggacagacttcatcttggtctgaccactcttgaagtcatcaccaccgatcaagcagtttctctttatggctaattcaataagccctgtataatataagcaaaatgtgattactatagaaaattgaaggtcattaatactatctagatatagtttaatttagttaccagggacaaaagtgttttgtggacttccattgataaaaggaacgttctcaagaacacaagcaatggcgtaaagtgtagaaggagaaatctcagcctcatccttgtccaaagatgacatgagattctccgtcgtgtcgttaagaccaaccaccacattgctgtatctttctgtgtttgccgtccacagtaccaccactttatccactttgtttttctctttgaactccctaattatttttaaaattttcattatcaaattgtcttgtaaaaattacgatcatgatacatctaatgaattttggaaattttatagcagagagaaaatttacatttaatttgctaataaacataaaccgttatgttaccttagaatattttattacaatagtaaagacgttgtgttacctgatgtccttgatgacttgttcgagttgttgtttcttggtgcctttgatcacgtggttagcacgtgacccttggttagctgcgatgaaatctgggtcgaagattccggggagtggaaccatgtgttccatgaacggacgcatctgcttttgaaggtcgatgtctaggaccttggctcgtgccattgcgtctgctaagttcatgtcacttatgtcccatcctccaaacacaatttcttccggattcacctatcattttcataacccattaatcatttattattttctctatttactgatgtttttcaaagtttaatttgccgaccaaaatatccactaattaaaaaaagtataaaaaagagatcttgttttctacttttgtaagtcacattcaacaatagttaaataagtataatgtaccatggggagaagacttttgaaaggagcatagatttcttcaccattaaatgacccgacccgaatagaagatgcttgggttaatgacccgaaataattagcttgttgcactttctcctttgtagcccaagatattcccctgccaccattttttgtttcattatataagaacatattcaacttgctcattattcaatatccaattgcgggaatatgaatatattataatcccacacaccataggacacacaactttattcccttttgaaacagtttattataacaaacaattaagaagaaaaaatattttacttactcacgattggcgataacaccagcggtaagtgtagaaccattgttgcctccccaaccaacgagcattactctgccaaaatttaatcagacaaagcaaaaactgcgttaatcaaataatgaattgtaaatctattaaaaagtattttaactgaaaaaggaaaaaaatattttatctaacattaaaatgattttagagaataagatgactgacccaagtttgggaacatgagtgtcggtcttaaactcatacttcacagtctttggcttcacagtccattgaaaagcaccgtttttgttctcatgaacaagctcagtggtttggtagtcgtacactgagtggatctcattctcggtgtacttcacgttcggagattcaaccttgaagctttcgatgaacatttttgcctaaggaagactttgagaattaattgatgcttgagagagagaggaagagagagatatattatgtttgctcgagtgcttctgaatgcattgagatttgagagaccatggtcgtgttttatagacgggattggacactaaaatatttttatttggttaccaactttacagtatattacagtatgggattatgacaagtgtaaaacgattatattacttaatgtaaatattttttattagattacttgaaatggaaactgttaaaatttaaagttagttgactagaaattaatggtaataaaaactctatgatatgattattattcacaatttatgggattatggaaagtgtaaaaagattcatttctataaaatgtgttcaaaagagaaactcttatctggttaattttatctttcttatagttttgacttttgtgttgttcaactgtaagggattgcaacatcatgacagaacacccatataattggcctatttgatattgaaatttcgatatttccaatttcagttatttctgttacacgtctcgtccatttctatagaaaataaacaattcctaaagatgatattggtggaatacaatgttatgtttttcttgtagagaagaacttttcaaacttcatacatgtgacagtacgtcagtgtcagtgtaacatcaaaaagtgaacgtgattggttagtgtctatcatagctaagcgtggtcatgcaatggacggggaagatttcttcgtacggtggctgtgactaactcaacatgtagataagttaacctttaaagatcagtgatacgaatgaaaagacactccaatgcgctaacaatacgaaagcccaaatcgaaagggatttttatatgggctttctaattaaatcattaatagcccatataactttcgtagtagtatcttcaggatctaccgtgcacgtgactgaattacagatgcgagagtaatggaaacgtgttttgtctagggttgaaaattaggtgagtgttgctgacaactaacactcctcaaatataaatacaagtccacgtggacgttaatttttgattttttttttcttaccatatacagtatctctctttttggttcggaaattgggctctatctatcgcaatggattggcttttttttttccctctttcaaactattttttttataaagaatattaattcatcatagtgataataacacaaaagttggaatcagctttatttttcatgaaaacttaataaatcagaagaaaaaaacctaacaattggagaggaacaaaacctatataaacttatccaaataataaagcatacggggtgggtcagggcccaattatgtatccgtgtagtgaaattcagttggttgtttcgtatgtcaattttattcaatagtttcatttcattttttggttgttttgtcaactattcgatagtctttttctagctattttagtgcttataaattttgactttccttaagatgtagaaaaaagaaaaagtttaggatgaaaatttgaatggttatgaaatttttctatttataaaagaagggaaataacataaaatacgtttcatcttcaattaagaaaaaatatataattaactattattatcatttagtaggaaagtatgtccatgcttattccatacgccaacatcatgcggctgtcttccatcttttttttttttttttttttttttgtgtggttttaggttgtcttccattttatatgtttctcctcgctaaacccttttgtaaaaacatttctttttgagtctattttttttcattttaaccaaaaaaacatgtaacgcactaaattatactaacgtcgttgttctgtcatcatcttattatacatgatacctgaaaaaatatacacattcatatatatacatctatacgtgtgcaataaaaatctagagggctttgactttggttggacacatgaagttcgaggcacacatatagtgtcctctccacttggtccgaccaggacaaagacatttcatctattggctgtggcataaccacttcactttcaaaacccatcacatgtaacatcattgggctatccaaaagtctaaccaataatgtcaatctataaaccacattaagtagttcattttttttgtagtcgtgtttagcttgttaaacctcataaaatatgttttcacttacgttaacaaaacaaatatcttcacgaaaaaaaataaaataaaatatctttttgataccgaaaaaataaaataaaataattttccctttcgatcataaaatgcgtagataagagaaactgtgtttgaggctccatttcatgttcacctaccagtctaccacgtcatttctcaaagacgcaaattttctaattagggatgtgctctttttacatatagatcaatatcctaaaaaaatttaagatattcatattttcgtacatatatatcgagtttcccgaaaaatccataaaatgggtataatgatagtcctttttcacctttaataataatttctgaacaaaattatatcataataaacttgtgattttatacaaaatttatttgtatatataattttactaaccaacgtgaacgataaaaataatattctcataaaatgttgattaaaaattacttaaaataaataattatttaggattatgtattagtagtactcgaaccatttttttagttatctgcatgaagaccctaatttttcacatatatcgaaactaaaactttggatatacactgtaatttgaaaacgcttggaacggataatgtagttacctcacaagattttgtacatccctgacattttatattcattaaagtgtgtttttttcttcagaaaagaaaacactttttttttttgtgcttttagtttaaattaacaaaaaaatggacaccatgagattccactaactcatgtgtatataacattagggaagcagtcaattcatttcagcatccacacacactttgaatgctcaatcaaagcttcttcatagttaaacttccacacaacgtcaaaactcgagaagaagatgaaagagagagattcagagagttttgaatctctctcacatcaagttctcccaaacacttcaaattcaacacacatgatccagatggccatggccaactcaggttcatctgcagccgcacaagccggtcaagaccagcctgaccggtcaaagtggctgcttgactgtcctgaaccacctagcccgtggcatgagctcaaaagacaagtcaaaggctctttcctaaccaaagccaaaaagttcaagtcacttcaaaaacagcctttcccaaaacaaatcctctctgtcctccaagccattttcccaatcttcggttggtgcagaaactataaactcaccatgttcaagaacgatctcatggctggtttaaccctcgctagcctctgcattccgcaggtatattatatacacaaaacttaaaaatactattttgatccgtttaaagatcttctgaaattcattttttttttttgtgtgtagagcattggttatgcaactcttgcaaagcttgatcctcaatatggcctatgtaagtttattttacatattgaaatgatgattttttttttccttcaaataaaattatagtttttaataacatggagcgttacacttttacagatacgagtgtggtaccaccattgatatatgcattgatggggacatcaagagagatagcaatcggaccggtggctgtagtatctcttcttatatcttcaatgttgcagaaactcatcgatccagaaacagatcccttgggatacaagaaactggtcctaaccacaaccttcttcgccgggatcttccaagcttctttcggtttattcaggttagggtttctggtggattttctgtcgcacgcagccatagttgggttcatgggtggtgcagccattgtaattggactccaacagcttaaaggtttgcttggtatcactaacttcaccaccaacactgacattgtctctgttcttcgagctgtctggagatcttgtcaacaacaatggagccctcacactttcatcctcggatgttctttcctcagttttatccttattactcgcttcatcgtaagtgattcgtttggttcattcagctgactatcactaaatcctacttttaaatactatataaagttcatagtttagaaaataaaataaaaatcaattagcaataatgatatataatatgttaagaataatgattgttttatacgcgaatctaacgtgttcaacatgttaaagtatttattttttatagtagaacaaaaaactttgtaaatatctattttgttctagtttttcaaataatcaaatttggtaaattggtaaacataatcctaggagattttctgagattaaaagtgttagacaatgagctgaagttagcaatgaatcatgtacatattaggggaagaagtataagaagctgttttggctaccggcaatagctccgttgatcgccgtggtagtgtcaacactaatggtgtttctgactaaagccgacgagcatggtgtgaagacagtgaggcacatcaaaggaggtcttaatccaatgtccattcaggatctcgactttaatactcctcatctcggacaaatcgctaaaatcggattaatcattgccattgttgctctaaccgtaagtatcattaaccaattttgcatttgaacaatattttaaattttatagtttaattaattatgttttttctttcttaggaggcgattgcggtggggaggtcgttcgccggaataaaagggtacagactcgatggaaacaaagaaatggtggccattggatttatgaatgttctcggttccttcacatcttgttacgctgctactggtaattagctagctgattaactaatcatttatttacgaagaatatatgtcaccatcggactataaattaacttatggaccacttttttgggtggagtgtgaagtcctacgtataaaagtcatttttggttgatgaattcaatttgattactgtttttaattagtggttatgacatatgactcaaaatatgttttatgtacatttttaattatatataagataggtaaacgtaaatgtatttatgtaaactatatatgttatgaagtgacaacctaaaaagtatatttctttttgtaatttaggttcattctctcggacggccgtgaattttgcggcaggatgtgagacagcaatgtccaacattgttatggcggttacggtgtttgtagcactcgagtgtctaacgaggcttctctactatactccaatcgccatcctcgcttcaataattctctcagcacttccgggactaatcaacattaacgaggctattcacatttggaaagtcgataaattcgattttcttgctctcattggagctttctttggtgttttgttcgcttccgttgagatcggacttcttgtcgcggtacgtataatacattaggtgtaaagttacttgacacacaagtttaagtttatgaaaataaattagaagcgtacgttttggttatatttacagatgagtttaattgatttgtgtgcttctatgttgctaggtggttatttcgtttgccaagatcatactcatatcaattcgtccagggatagaaacgcttggaagaatgcccgggaccgatacttttacagatactaatcaatatcctatgacggttaagactcccggagtgttgatttttcgtgtcaagtctgcattgttgtgctttgccaatgccagttcaattgaggaaaggtacgaatatatataaactacattttaattacacagtttaagaattgatttatatttgataaaatgaaatatatgaatctaatcatgtatgcttgtctataggattatgggatgggtcgatgaggaagaagaagaagaaaacacaaagagcaatgccaagagaaagatcctctttgtagtccttgatatgtcaagtaagtggaatcatatgcaataatggagttgtttttaaagtatatagtttaaaatgaaaataattatttttatatagttgaaaataattatttttaaaatgaaaacccacattatttttaacaataatcagtaatatgaaaataattcattatatagaggtttttttattgggggggggggttgattttcgaaaatatagccacaataaggaaaaataaagatttgaatttatatatctgtataacttttcttgtgtttaacctttctcgtatttattgacaggtttgatcaacgtcgatacatcggggattactgctttgctggaactgcataacaaattaatcaaaactggtgttgaggtaattaagttacattcatctacgttatattttaatcgccctttctcatttattaaaacttaagaattatgggaacggagatatatatatatatatatatatatatatatatatatatatatatcattttgaatatttgttttgcagctagtgatcgttaacccgaaatggcaagtaatccacaagctgaatcaagcaaagttcgtcgacagaatcggtggcaaagtttacttgacgatcggcgaagctcttgatgcttgctttggattaaaagtttaagaaacagttttcaaaggaccagttgtgttacgggttattgcatgtgatgaatttatgtgagttgttgtgatttaaataatgtgatgcgtgcatgatcatgattaatatttaagtacgtatgtgtaatagagtgcttggtcgtgactgaataaagtcatgcaaactataatgtgaggatcgatgggtgtgtttgtaactcgatagatttggaaataatgtataatatatgtaagtttgagaattattggtgttttgtatgattgttgaaatgttatatagaatcagggatatattttttggggtatttttgtattgaaaattctagaaaccgatttggggaaaaaaatatatgtctaggttcaatgtatcttgttgaacaaaagtaattacgtatttggtgaatcaaattagtggaaggactttatagcgtactgattagtagtagtacactagtactgatgtcaaattggaaaagtcaagagagagaagttatattgggagggctaatgatgttttccaatttaaatagtttaatcccacttttaaacttttaattattgaagttaatgggcactactgttattattattcacaaacttttcttgattcttcacagcttcaatatatgcgtctaggttcactgaatctgattagacttgatgataaagttgatttgcttatgtctgtgtttattcattactcttatttaaaagttagtaaagagtgttagttttgaaacactaattaacaattctcaaagacaaaaacactaagtataacacttcaagttgcgtttgtggtccaatggatatttccttcctttttcggtcaatatgtatgcgtgatgctaactaactcttaagatattaaaatggatgccatggacctagctcttaagacgttatcatgatgtttaagttaatccttttcttttgtcttttaaaataattaattttatcaaaatcatattgcatttggtatcgttgattgtgtgtgtatgtgtccgtgttgtttttcttcttaaaatttggacaagtttgtaatgagtgagtggtgatcgatcattcggtaagagaaagcattggacgaagttggtcaacaccaattaacccacacaagcaaagttggtcaactttgcttcccacgtttgtgacattgcaaaaagccaaagaaacgatttcttcaaataaatttggctgatactgtttccattaaatagtacagtatataattactatatgattctgaaataacatagatttatactcataatgtttaaaaaaatatcgattataattatatttaacaaagttagaacttagaagcatttgtttttgatatatgaattgaataaatttcataataagttaataacaatgagtttctgacttttgtgactaaaacccaaaaagatagagaaatcagtgatttcaaattttcaaatcacatattagtagtccactataagtgtaagagctaattaagagttttatggactctaagcccaatatgattggtctattcaacaaaaacaaatgggcatcgggtcttaaacccaacacataaagtttcttttctaataactcttcatatgatttagtattagttaaaaagggtatatttaatcattgtaaaattatttcaacttttcaaataatgaatagtaagaaattaaatactgtctattgatattctttataaaatccgataatattcaaacatggtttagttttagttttattttttttccagaaaatgtaaattataagtaattttttaactctataatttattaccatttaatttaagattgagttataatttcagtgtaaaaacaattattattgatagaatcaaatttacataacatgccaacatgtggataaaatattcacaaaaaatagaattataatcttgaattaatttattaattgaaaatgtactaatataactaaacagtaattactacataaaacaagcagatataggtaagaaaaaccaacaatgataaaatttgagaaacacaagaaacacacaaaaagggaaatatatatgttcttagaatgaaaatttatatgtaaaagacaaaattcagttaggtaataacattggcaaaatgcaaaatacaggaaacaaacaagattctcctaaattcttgtaagactatttttaatcatgtcttatgaatcaatttcatcagatcacaaatatacgggatccacgtcgtatgctttatgaaatcacatacgtccacgtgtcatagtatccatctggaccgcgtatattcatctgcttcgtcaaccttgacgacttcagtttttctcttgccgttgaagcaagtgagaaccaaatccccctctgttcgatcccgccgcggtgagaagcgatgaagtcggagactttaacattagttctggtgtatctcgccggaatcatggagagagccgatgagtctctgcttccaggagtttacaaagaagttggagatgctctacacgtggatcccacagctcttggaacattaactctgttccgctctattgttcagtcttcttgttaccctttagccgcttacttgtcttctagacataaccgagctcacgtcatcgctctcggtgctttcctctgggccactgccactttcctcgtcgccgtctccactactttcttccaggtttaaattcttttccctttttgctctgttctagaataaactcaaatcagatctgttcgagaatctgttgatttgggtagaaaaaagtctggagctttaggagttgatctagaaaactttcagtttaggcgattagacattgattttgaatggctggacttagtaatccttttgttttgttttgttttgttttgatgttgagatttttttgttcttatgtgaaggcattagaacttaagactgtgtcattgtgttcttcaggggattgcttcaatttcattgcaatgattatgaactcattgcaagtttcatttgtcacaaaggtgaatcgaatggattttacattgttcctatatatgtttgctggttgaaactaggtggcagtatcaagaggcttgaacgggatagggctagccattgtgacacccgcgattcagtccctagtcgctgactcaactgatgactataaccgtgggatggcatttgggtggttaggattcacatcaaacattggttccatacttggctatgtatgttccatcctctttgcctcaaaatctttcaatggtgtcgctggatggagaatcgctttccttttggtagcagtcgttagcgtgatagtaggcattttggtccgtctcttcgcaacagatcctcactacagcgacagaaagatcacaaaacatgtcaaagacaaacctttctggtcagacataagagatctattgaaagaagctaagatggtgataaagattccgtctttccaaatctttgtcgctcagggagtttcgggttctttcccttggtcagctttggcttttgcaccattgtggctagaactcattggtttctcccacaaaacaaccgcggttctcgtgactcttttcaccatttcttgctctcttggaggtttgtttggaggatacatgggagatactctcgccaagaagttcccaaatggcggtaggattttcctctctcaggtaagctctggctcggcaattcctttagctgcgattttgcttatcggattacctgatgatccctccacggcctttagccacggtctggttcttgtcatcatgggattatgcatctcatggaacggtgcagctacaaacgggtaagtttaatacttatatatttcaatcatattcaaaatattttggcttttctttacttccggaagcatctacttgaaatggttttatacagtccaatatttgcagagatagttcctgagagagcacgaacgagcatctacgcgttagacagatcattcgagtcgattctagcttcttttgctcctcctatagtagggatgcttgctcagaacatctatggatataaaccaatcccggaaggatccacaagctcggtcaagattgatacagatagagcgaacgcagcatcgctcgctaaagcattatacacatcgattgggatcccgatggtgatctgttgcacaatctactcgttcctatattgcacatacccgagggaccgagacagagcaaaaatgcaagccttgatcgagtcagagatgcaacaactcaatgaagaggaagatgagatcgaagtgaagtgttttggagctgaagaacacgatgaggcttatttgcttaagcagcatcagaatgagagttaagaacagagtcaaatgatgatgatttgggttgttattgacaatagggttccatacttcaattataggaagatggggtcatagttataatttttgtaaaagaaaagtactgaagtgaaatataccggtagataacatttacaagaacagagtaaaaggaaaattactgatttttgtttttgtaaggaaaaatattaatgagtattgaatgattattcgctttcttaatttgcaaatcccataataaaattaatgtggagtattaatttggtaaaaacattagacttagttaataccgaaccggacttaaaccggattccgacagaacaagaggcaggcgcgtcagtatattggagttatttccaattttgggttctgataattgaactttactcttctttctctcccaaacttttatacacaagagaagatccaactctctctcttcttcatcgttgaagtcacttccaatgtcggactgaagaagagaaaccagaagaatcgtgacctaaatgcaactgtacagattcttcagttagttgcaaagatcgaagaaatagctgtttttgtagggttactttgccaatttcctaattctaggtatcttctttttcttcttagccttttttctctcagagtcaaaattcagcaagcaaaagaaagataaaaactttctctttttgttgtttgttgtaacgtatacaagactggatttttattctttttattttatgggtttctcgaaagattcgtgctttcattgtaaagtgtctagaatcctatttctctctactgggtttgggttcttatactcaattagctgatttgaagtgtttttggtactttagatcttactgttagacacatcaagaatctccactgtttgatatatgttgtccttcatgtccccagagatctaattgattcgagcaatgttgtcttttagttgcggaatttatttgttgtgttcgattgtgaaaatttacaagttcattttgtctatatttcagctgtctctttgtttccctctaggatttttcaaaaattaggaccactcagtttcttttgtaagatccaatttcgcctttcgttttcaggattttgacttggcaagtagtaacatattataaatttattcattttcaactaaagtgatatgtttttggtgtttggtgttatagactaattgagtgatagcaacatcaaggaagcagaagcaagttttggtttttgtttgtcaatggataaagcttcctcacaagagtgtccttatccaggatgtttcttctgtgtaatgaaagaaggaaacccgagtaaacgaagatcctgcattctcaaattctttagagatcttccttctcaagacgatgatggtcaagttcttcccattagtggtctctggaacacagcaatggctcatcctaatgatcctgagttcattgagcttggaatctttgagtgtatgtctgctttgatatggaaaggacttaaaaaccggcgttggctatctcatgaccagaacatatacattccttactacgcggctcacattatcgggtcttacactatgaacatggaagagtttgctgagagagctgtagaagctggtgtgattcctccacttgttgagcttttaagaggtaggcttacttgggttgaacagagagtggcggttcgtgctttagggcatttagctacttacccgagtacttttcccgctgttgcggatcacggagagatcctcgagcttgctatacagttggcaatgagttcgttggagatagtttattctcatttttaccagtatccggatcgaaggttgagttaccattgtgatctgcttacacgaggcatgggaggtgtagagatggagtcgagaaaagcagaggaatgggcgagccagttgcagtgttggtctcttcagctcataaactgtttcgcttttaaacccgagtttcttcccactttgtgtaaacctgagttcttggtgaatcttccagttatgtggggaggacttgtgaatgagaactcgcctgctggtatcggtttgcttagaacaatctgtcagcataaactaggtcgtggacctgtctctgcatgtgcaggaatgattgaggccttgtgtaatatcgctcgttcttctgatgattggcagtatatggcgattgaatgtcttctttggttgcttcaagatcctaatacgtctcacaaggtgattgataaggcggtgccaacgcttgtagatcttgcagagatcacaaacttgggtgatcacaagaaacttggagattccattgtgagtgttcttcaagaatgcagctcaatgggtaaccgttcaagggaattgatcgaagaaacggtaaattctcgacagagactgaaatgggagaagagtatgcctaaagaggaccttcatatcaaacaagcagcagctttagtggtcaaactcgaaggaaactctctcttttcatcaggagatatcgcgggtgcagcggaaaagtactcggaagctttgtctctatgcccaatgaggtcgaagaaggaaagagtagtgttgtatagcaatcgagctcagtgtcatctcttgctacaacagcctttggttgctataagtgacgctacacgtgcgctttgcttgcacaatcctgtaaaccggcatgctaagagtctttggagaagagctcaggcttatgatatgttaggtctagctaaagagagtttgttagatgcgattctgttcatcaacgaatgttctcagtcgaatgatccggatctctccatgagacagaacaaggttcctgattacgcagagaggttggtgaagaaacagatgcgtgcagcttggttgtttaaagaagcggcattgaagcatggaggtgtgcataggaaaggtgaagagagggaagtgtatggaaatgaaacagatgattcggaatgggaaacagcgagtgagagtgatataggagatgatggaagggatcatatgggacttgatgatgaggaggaggaggaggaagatgaaggtcacggtgagaagtggaagaaccgggataaatcgagtgagaaaaatgagaaaacttctgccaaaggtgagattcttgcatgattatgatcaacacattgttgtcttgatttcaaattagttaatggtttattggtgacacaatctatgaatttgttcaggtatgaggcatggatacagcataaagcttgcagaagatgaaatatgaaaccttgaaacacaacaaggtcgttacaagaagttgaagaacagagaagacgttgaatgggtttgagtcttttttacaagcaagaaacttgcttcatggatatcgtaagttttcttttacttttttttttttttttcgtttctttatttagttttgtgtgattgtaggatttgtggtaaaattttatccattttgaaggagtaaagaagaaaggaacaattgttttgttttttcagtgattttatttatttttattttgtggtgtatttattcagagacaaagaggagttccaatttgtaaaaaaatattttttccttatattaagaaatgatttgtgattgagagagatatttttttttgggggtcaatgattggccgagattgtagattaaaaaacattttaaatggatattcgcacgttagctaatacagtaataaaaaatttgtacaaagatagagaatttttgtgggtcttagcttattggattgcgatattgtaaagtaaaagttttgaaaaatggaagatctgcatttagtccaccgaggatcatatgcatagtcgatattgacacaagagtgaaatttgattggaggaaagaggatatgtaccaagccactatttaccttttttttacgtcaggctcttgagatgatcttcttagttttgatgtctttttgcaaattgcagtgacgttttctaaattggtacactaagtttaaaaatgctgtcctttggataactccaacggatgatatgaactaaaacaatgctgtcctttcatattatgtaagaaaacactcactcggttaactatgagcaacccactacaagtaagtattgtaaaaacgtttttttctttcaaattccaagtattttttaaattttgtaatagaaaataatgatttgggttttgtaagttagtattaggatttagatttttttaaatagtaacgaaagtgtttgataaaaaagtaaatagtaacgaaagtaacctaaattgacatttccattacccttgagatgatcaaaataaacacaatttctgcatgattatgagtttatgactatgcttattagcaatgatttgttctttctataatttaaaaccagttgaaactaaaattgtttttgtaaaatttaatagatgatattattagtatacaaaacttttgtcaacaatgaattgtgtgataagagtttttttggagattttcttatgtaataaagtctatcttgtatgactacaattgatcatgggattcgtggctaatattttttgtaattatatcttttgagtcaaattccatactcattttaatatatgcaatcgaatgtatctactaataatttgttcttatttaatttgattctgttgactctgttccaaaacaactttcggctattggatgtgtccacgcgaaatgtaatataataatgatcaagtcttcaaaatggcacaccttaatttctttttgcaaattataaaaattctttatatggtgatcctacgtatctatctaattatctcccaaaactatgggcaagagtcattattaaaatcgacccttggtcttttgagatgctcaagagttttaatttctaaaatattaagccttcactaacatgattagaaaaaaataaaaagttaaaaacatgattagaaatttagaatattttaataagtacaatgtggaaatctagtgtaaactttcctcgaacattccccatagatttatataaatagctagtgagaatttgttcatgcacatattcatcacaaaggaactcactgctcttaaatttgctctaattgttattaccttggtaaataatatattcttggttcgattcgaaattttcaagcaaatgggtatcgttgaaaacattcgttcccttaaatttgaagtgaaaatcgtggaagctagaaacgtagagctcaagtcatcgccaaccactctcttcgttaggttctatctccatgcagggaataacagtaagattgaactaaacactccagagatccgttcgagatcagactgtgaggtcatttcctggaaccaatcattcggtctggagtgccaagggaacgaaaccgcggtcgaggaattgaagcaacaaagtgttgttttcgaactacggagaaggaaaacgacgccgtttttgaagaagtggtcgaaatcagagttggtgggtagaggaaagattttttggaaatcggttatagagactgatgggatggaaatagagagatttgtagtgatggatgagacaaaagatcacgttctggaagattgtgataagcataaacctcttttgttgaagatagctttaaaagtgcaagcttcaaaaatcgtgaacactaagagagtggaagatctttgtgagtgtaaagattgtagaacatgtaactgcgtagattatgaagcttttgttgtagcttgtgcgttagctgggatttagtttgtaagaataaaatttaaagaagagatgattcaaagaaaccagaataagttgttgcagtaaaatgtaaaaactaaggaccaaagttcaaagaaaatgaaaaacaaataacaactgtcttataaaagactatgaaacgatgatgttgtttcaagcatggtcatgtccaagaagggcgagaagcatatccttgtagtcaccagaagtgtcattagcaatggctcgatcaagaggaacactgttcctgcgtaagtattcttctttgatccgctccaggtcgacctctgctcttgtagtgaccactctagtaagtgcccactcgtctgttcccatcctgttgatggctcgacgtagaaccttctcaaagtacttctctggatatgtcaagcatttgatcgcggttttgagtaattgaacataatcatcgttcgaatcttctttgagaaacttgttaatggaacttccaaacttgtccttgaagtgattgagtgttgcattgatctgtgctttgctccttgttgtcaagattctgatgagatcttcatcagtgtaagccttctcagtgatcttcttgtgaagtgtcttagcttcggatctagccagcttcacgttgacctcatcagcatttccatcgtacctgaaggtgctcacaagaggaaccaatagctgcatttttacaagtggtcaaaacaaaacaacatatcatcagaaacttactaattggtttaaagaatgatatacataaatctttcactacctttcggatatttccagatgtatggtatgcaacatcttcctcgagagaggtcttgtagcgaacatggtatgcttgcttggtcttgaaaaactcaagagaaggtctagtacaagcgatttcaactaggacccaaatgtttttggtgaacaatttggtagattcattggccaaatacgcatctctctccgttggatcaagagtccacaacatcacaactctctgttttcaagcaaagtaagatgttcaaaataagatgaagaaatatagattttgtatcttttagttttgacaaacctcaaagtcaccagaaagctctccgtctaattccttgagaagatccttattgtagttagcagcataaacggcacgaatgaaactgcgttgcgttgcgtttctatgagccaaaattgatatgatcatcccttcattagttccccatcctgcgccacacaaaaacaaatttcaaacccaagtttagtcagatagagagtatgtaacaaaacctaactaaaccaaaccaaaattttacgacagttagaaattaactgtaaatatacaagaaagctgatgttcgctagtagaaaaaaaaccaagcttgaaaaaatcttagaagattattagaattttttttttgggtttaaatctgaataaaaaaattgttacgaaagcaacaagttaatctgtttaaaagagttgtctaatcgtcgattacaaaccaaacggtcaggaaacgctccaacataaaatcaattgcatccaaaatcagcaaaagagtaaataatatgtcacacaattttgcaccgtaacaaaagaatcatgcaatggagtataaccacaaaacttcacgaagttaagacttcctaagaatcatttgaaaaacgaaataaaaaagagctaacttatcatccacttcttaaaattaaacctatatacgtgtcatcaaccaaaccagcaagctagatcagtagatcagacctgtcatgataatagattgaactattgataatcaacccaattaaataatatcaaaatgcaaatgattcaatcaaagcatgaatgtgaaggcctagtatttaacttttactaaatcaatctaacaatgaagggatggatcatgaaaacctttgaatgccttgtggagctgctcggagtcttcttcgggaagaggaatatttgctggaattttgagagacgccattctccgaccactgaatatttctctagctctctagatgagacgaagaaaatgtgggacgaggaacatgcacactgtcttaaataatgaaatgatatcccaattttttatattttattaattatttttgttaaaaattagatttagcaatctatgtaaatcagtaaaagaggaaaaaattattaatacaggctgtctacagtggatagaattgataaaacaagtataatgttttgcatttttttgtcataaagctgaatattaaatggaaattgcacattttcttaaataatgaactgaaatctcaaattttgttaattattaatcaattttgttttaaaatagacttaacaatttaagtaaattagtaaaatgagagattttattaatacaattacaggctgtatacagtgaacagaaatgaaaaaacaagaatcatgttttgggtttttgtcataaagctggattttaaatgcactttaaacagcttaaatatgggattacataggtaccgaaatttaacttttaatttatttattttttctgttatataatacacgcatattccttaattaatttcattatttggatatttcattatttggacatggattataacacatggcggacaaaacattagaaccaatattgttcattttaacaagatgtattaagtatgggtttagctttaattttaaaaccatataattaaggggaaaattataactcattagtttatactaaattaattataaatagatcaataataatttttgatatggttttataatttttagatttaaaaaaaaaaataactgaaaacatcgacgacaaatgaaactgaagacactaaattcttaacatgaccaagttgcaagtccaaccacaactgttttattaaacacaaagcgataaaatttagttttttttcttaaacaaaacttgcaaatgttatttcaagcatggtcatgtccgagaagagcgagaagtatatcctcatagtcaccatgagtgtctttagcaatggctcgatcaagaggaacactgtttctacgtatatattcctctttgatccgttccatgtcaaactctgctcgtgtagtgaccactctcgttagtccccactcatctgttcccaatttgttgatggcttgacgtagaactttctcaaaatacttctctggatatgtcaagcatttgatcacggctttgagcaattgaatgtattcgttttccgaatcctcctttaggtatttgctcatggaagttccgaaattgtttttgtagtgattgagagttgcgctgatttgtgctttgctcctggttgtcaagattcttatgagatcatcatcagcataagccttttccttgatcttctcgtgaagtatcttagcctcggacctagctaacgtcatgttcacttcatctccatcgtacctaaaagtgctcacaagaggtaccaagagctgcataaacaaaaacatatgtcacaaatttatatgcattcttgacatagttatacgaactgagtttgttagctaggaatcttaattacatcaataaacatatgagatttcatctagtatacaaaatagatgaactagatacatttgattttattggatatctcagatggaattaagctcatgaaactttcacataattaattatataatacctttcgaatgtctccagatgtgtggtatgcgacgtcttcctcgagggaggtcttgtagcgggcttggtatgcttgcttggcattaaagagttcaagagcagatctagtacaagcgatttcgacaagaacccaattgtttttggtgaacattttggtagattcttttgccaaataagcatctctctccgctggttcaaaagtccacaacatcacagctcgctgttttgtttacaaaaaaagaaaacatagttaaacagatcagtagactaaaaccaaaagaagacgaatatataaagatgttgtctcaaattaaaacctcaaagtcaccggaaagctctctgtctaattccttgagaagatccttattgtagttagcagcataaacggcacgaatgaaactacgttgcgttgcatttctgtgagccaagattgatatgatcatcctctcattggttccccatcctgcattagacaaattcacaattacattaaagaaaaatagagtcagaatcatgtttgaaatcattcatcagtattagattgaaaaagatatataattctagtaaaatttatctcgtttcatcaatttttgaaaggtctattaaatactaatagattatttttgatgataggagtaattttaaccaaattaaataaatccataccataaaccaaactagatctatatactatatagatcaacgaatatatacagacacatgatcgatcagataagagggtatagttgaaatagattacgctatgaccaaccaaactgatagaggattcaatcgaagaaggcgaatgctagactagttataaccaaaagattaatgaaggggtatagagaaggacataaacctttaaaggctttgtagagttgctcagcgtcttcttcgggaagaggaacagtggcgggaactttgagagaagccatttttcgaacaagtgaaatttctgtatgttcttgttttttgttgtctagatgatgaggtagatagagctcgtgttgtcttacttaaataatgagatggcaattaaagtttcaataaaaaagtttttgtataaagatgtattttgataaagagacttagtaatttttaatgaattaaatgaatggaaaaggtagtaaatcaactgaaaatattattgaatagtaaatttgttgactatataagtgaagtattaaaagcctatctattttagttaaaaggaaagaaatcaagatagctggcagaaaatgaatttaattaagttgaataaatttcaagggaagtatttatatatatagagtgggacagaaacttatgattttgattgtgaatgacacgtttgagtttggccttgacatatgaagagtatacacaactttttttttttttacttttataattatgtttagtggatatctatgatttatatttattaacataatattgttgttttaattttttttttggaaaaaaactttgattagatttttttaaaaatttgattactcaataattaattattttaagctatatattaaatagacctttaaaggtccatgtgacaagtttataattataggaattttccggagacaaaacaagattttcattgcttatgtcatttgttcttgtttaactccaagaatcacgtggttagtgctaagcttaacgtttaaggagcagttattttattggcaaccaaatactgattatcgactaattaaaagaatcgtaacgtcaaatatctaattggtgtagtttatatgttataaaatatgttatggataaacaacccacaagaaagttataagaattgtaatgaatttcaaattttcattagaccgtaaaaacagatctggcgcgaaaaaaattaaaaggaagattaaataaaagaacaacgactctgctggggatcgaacccagaatctctggtttcgtagaccagcgccttatccattgggccacagagtccttgtgatgatagtagaacacttaaacaatataactttaatagaaaggtactattcccacaatagccaacgccagttttcttctataaagatccgtttaatttgcatgaaccaacctaaaccttcttctctgtatcgtttcaattccaattacagtgtactttgaagtttgaattactatagaaaaccaaagtgaatcaaaatatagactgatgataatcacactttttgacagaacaaagaaaatagcttttgagatagaaaaagaaagaaagaatcggattcatgaaaaataacgttcataatctgaagtatcaagctttcatggattgtctaataacactaaacacagaaattcaccaggaacttattaggtacacatccaaagaaccccagaaaacaagaaaaaaagaaagcctttttagaacctatagaagaggatatctattgtctttgagacaataagagtattgcacgattcaacattagctgaaaccttgtttgtttatcctcaaacaatggctggagtcttctctgctagtttctgtagcttctcgggacgagaatcttcggttttatcttccccataagctgaaacatgaactccaagagccgcacgacctgatgggtcaagattctgtgaccaagctgcgtcccattccacagcttttgctgtgctacatgccacacttggacctcctggtacagttgctctagcagcactctgctcatttatcagttatatatccgttaaacaaatctgagcaaagatcaagacaattaaagaagaccaagtagttatgcagatgaaaatcattaccttagggaagaacttttcaaagatggttctgtagtagtaagcttcttttgtcaaaggtgtgttatcagggaagacaaagcttgcgttcatcagcattgtctcagagaccttaccaaaagagaaaggagagtaccgcaataaaatcaaactgttacgttaaaatattctttcttatcgattaaaagagacatcttcttacatgtttgtttgcatgatcttttagaccatcaatccagctgtatccaactccatcactgaactgttctttctgcctatatagaatgtgctacatttaccaaaaagatgacaagttgttagcaaagctagatagttttgtcaaattgcagggagcaaagtttttgctagaaaacctttggtaggtaaggatttttctcatcatcaaaggcattgcgtaacacccatttctcgatccttcccaaatcaggcctaatctgcatcattgtttagagtacaaattatcaccaaatttgaaacttgagattataaacttgtgataaaaagaaagtcatgaaagaatcaattcaaactagaatgtcctgaaagcagtgttatatatcatagaaaggactcacaatcactttggttgatgtgtgcgtaataaatagatgaaaatgaaagtgatgagaaagatgacacctaccatcttccactctggatcgatgctcattgcgacatttataaattctttatcgaggaaaggtacacgagcctcaacaccccatgcagaagttgatttgttagccctcaagcagtcatattgatgaagagctttgatctgtaaacacatccgcccacaaacaagattacagaaggcagtatatcaaaaaaaaagttcttgtctaaactctaaggcactacctttcgacatgtttcctcatgaaattccttcttgttgggagctttatggaagtacaaatatcctccaaaaatttcatcagagccttccccagaaagaaccatctttacaccaagcgatttgatttttcgcgacataagaaacattggagtgctggctctaatagtagtcacatcataggtctcaacatggtagatgacttcttctatggcatctattccgtcctgatattatcattagcggaagatataaacaaccaacaaatcttcatactcaatactcttgtagatgtaaaagagaaaatttacctgaactgtaaagtgtaactcgtggtggcgagttcctaaatagtcagcgacttctctgccagctttaagatccggggatccctgaaaagaaaacagatgaaaattataaatcttgatgagcatagaaagcttttggtgaaaacattttgagaaattgggtcaagaccttcaaaccgatacaaaatgtgtgcaactttgaaccccactgacaagcagcttctgatttttccagatggcgtaatgctactgaagcaacaagggatgaatctaatccaccagataggaggacaccaaaaggcacatcagtcattagtcgttttataacagcctgcagttcaaagaaatgcccacattcatatttccaaaataagatcagcatttgtcagagaatatcttaaggaagataagactccagaatttaccttctcaaaagtattgcgcaccactaggggatcatatggggttgaaggaacaacctcagagaaccacggggggttgtaccacctcctaagcccacctacaagaaagttttgtcccatcaaactacacagtaaaagtcccaacacaaacttactaaaagataactaaataccagtttgacaacattgatatctgtgagcgtttccacgacaatataagtcagccaagaaatgtcattatttgattttaaaaatagatgtgatctgatatgaagtgcgaaccttgtttacttgaatagatgtggcctggggggaagcacataaactgctcacaatcatcactaagtgctttcatctcggaagcaaaccaaacagaacctgtggaagataatttgtcaaaaagataaatcagtaatcaacgacaaagaaagaatgatcttaacccattgaggtgaatatcttagaaaaatgtgaacacaccatcgagaccccacccgatgtagagtggagtgataccaatggcatcccttgcagcaataaagctt

SEQ ID NO: 1416 - DNA, 57180 bp, Arabidopsis thaliana
gaattcaatttgattactgtttttaattagtggttatgacatatgactcaaaatatgttttatgtacatttttaattatatataagataggtaaacgtaaatgtatttatgtaaactatatatgttatgaagtgacaacctaaaaagtatatttctttttgtaatttaggttcattctctcggacggccgtgaattttgcggcaggatgtgagacagcaatgtccaacattgttatggcggttacggtgtttgtagcactcgagtgtctaacgaggcttctctactatactccaatcgccatcctcgcttcaataattctctcagcacttccgggactaatcaacattaacgaggctattcacatttggaaagtcgataaattcgattttcttgctctcattggagctttctttggtgttttgttcgcttccgttgagatcggacttcttgtcgcggtacgtataatacattaggtgtaaagttacttgacacacaagtttaagtttatgaaaataaattagaagcgtacgttttggttatatttacagatgagtttaattgatttgtgtgcttctatgttgctaggtggttatttcgtttgccaagatcatactcatatcaattcgtccagggatagaaacgcttggaagaatgcccgggaccgatacttttacagatactaatcaatatcctatgacggttaagactcccggagtgttgatttttcgtgtcaagtctgcattgttgtgctttgccaatgccagttcaattgaggaaaggtacgaatatatataaactacattttaattacacagtttaagaattgatttatatttgataaaatgaaatatatgaatctaatcatgtatgcttgtctataggattatgggatgggtcgatgaggaagaagaagaagaaaacacaaagagcaatgccaagagaaagatcctctttgtagtccttgatatgtcaagtaagtggaatcatatgcaataatggagttgtttttaaagtatatagtttaaaatgaaaataattatttttatatagttgaaaataattatttttaaaatgaaaacccacattatttttaacaataatcagtaatatgaaaataattcattatatagaggtttttttattgggggggggggttgattttcgaaaatatagccacaataaggaaaaataaagatttgaatttatatatctgtataacttttcttgtgtttaacctttctcgtatttattgacaggtttgatcaacgtcgatacatcggggattactgctttgctggaactgcataacaaattaatcaaaactggtgttgaggtaattaagttacattcatctacgttatattttaatcgccctttctcatttattaaaacttaagaattatgggaacggagatatatatatatatatatatatatatatatatatatatatatatcattttgaatatttgttttgcagctagtgatcgttaacccgaaatggcaagtaatccacaagctgaatcaagcaaagttcgtcgacagaatcggtggcaaagtttacttgacgatcggcgaagctcttgatgcttgctttggattaaaagtttaagaaacagttttcaaaggaccagttgtgttacgggttattgcatgtgatgaatttatgtgagttgttgtgatttaaataatgtgatgcgtgcatgatcatgattaatatttaagtacgtatgtgtaatagagtgcttggtcgtgactgaataaagtcatgcaaactataatgtgaggatcgatgggtgtgtttgtaactcgatagatttggaaataatgtataatatatgtaagtttgagaattattggtgttttgtatgattgttgaaatgttatatagaatcagggatatattttttggggtatttttgtattgaaaattctagaaaccgatttggggaaaaaaatatatgtctaggttcaatgtatcttgttgaacaaaagtaattacgtatttggtgaatcaaattagtggaaggactttatagcgtactgattagtagtagtacactagtactgatgtcaaattggaaaagtcaagagagagaagttatattgggagggctaatgatgttttccaatttaaatagtttaatcccacttttaaacttttaattattgaagttaatgggcactactgttattattattcacaaacttttcttgattcttcacagcttcaatatatgcgtctaggttcactgaatctgattagacttgatgataaagttgatttgcttatgtctgtgtttattcattactcttatttaaaagttagtaaagagtgttagttttgaaacactaattaacaattctcaaagacaaaaacactaagtataacacttcaagttgcgtttgtggtccaatggatatttccttcctttttcggtcaatatgtatgcgtgatgctaactaactcttaagatattaaaatggatgccatggacctagctcttaagacgttatcatgatgtttaagttaatccttttcttttgtcttttaaaataattaattttatcaaaatcatattgcatttggtatcgttgattgtgtgtgtatgtgtccgtgttgtttttcttcttaaaatttggacaagtttgtaatgagtgagtggtgatcgatcattcggtaagagaaagcattggacgaagttggtcaacaccaattaacccacacaagcaaagttggtcaactttgcttcccacgtttgtgacattgcaaaaagccaaagaaacgatttcttcaaataaatttggctgatactgtttccattaaatagtacagtatataattactatatgattctgaaataacatagatttatactcataatgtttaaaaaaatatcgattataattatatttaacaaagttagaacttagaagcatttgtttttgatatatgaattgaataaatttcataataagttaataacaatgagtttctgacttttgtgactaaaacccaaaaagatagagaaatcagtgatttcaaattttcaaatcacatattagtagtccactataagtgtaagagctaattaagagttttatggactctaagcccaatatgattggtctattcaacaaaaacaaatgggcatcgggtcttaaacccaacacataaagtttcttttctaataactcttcatatgatttagtattagttaaaaagggtatatttaatcattgtaaaattatttcaacttttcaaataatgaatagtaagaaattaaatactgtctattgatattctttataaaatccgataatattcaaacatggtttagttttagttttattttttttccagaaaatgtaaattataagtaattttttaactctataatttattaccatttaatttaagattgagttataatttcagtgtaaaaacaattattattgatagaatcaaatttacataacatgccaacatgtggataaaatattcacaaaaaatagaattataatcttgaattaatttattaattgaaaatgtactaatataactaaacagtaattactacataaaacaagcagatataggtaagaaaaaccaacaatgataaaatttgagaaacacaagaaacacacaaaaagggaaatatatatgttcttagaatgaaaatttatatgtaaaagacaaaattcagttaggtaataacattggcaaaatgcaaaatacaggaaacaaacaagattctcctaaattcttgtaagactatttttaatcatgtcttatgaatcaatttcatcagatcacaaatatacgggatccacgtcgtatgctttatgaaatcacatacgtccacgtgtcatagtatccatctggaccgcgtatattcatctgcttcgtcaaccttgacgacttcagtttttctcttgccgttgaagcaagtgagaaccaaatccccctctgttcgatcccgccgcggtgagaagcgatgaagtcggagactttaacattagttctggtgtatctcgccggaatcatggagagagccgatgagtctctgcttccaggagtttacaaagaagttggagatgctctacacgtggatcccacagctcttggaacattaactctgttccgctctattgttcagtcttcttgttaccctttagccgcttacttgtcttctagacataaccgagctcacgtcatcgctctcggtgctttcctctgggccactgccactttcctcgtcgccgtctccactactttcttccaggtttaaattcttttccctttttgctctgttctagaataaactcaaatcagatctgttcgagaatctgttgatttgggtagaaaaaagtctggagctttaggagttgatctagaaaactttcagtttaggcgattagacattgattttgaatggctggacttagtaatccttttgttttgttttgttttgttttgatgttgagatttttttgttcttatgtgaaggcattagaacttaagactgtgtcattgtgttcttcaggggattgcttcaatttcattgcaatgattatgaactcattgcaagtttcatttgtcacaaaggtgaatcgaatggattttacattgttcctatatatgtttgctggttgaaactaggtggcagtatcaagaggcttgaacgggatagggctagccattgtgacacccgcgattcagtccctagtcgctgactcaactgatgactataaccgtgggatggcatttgggtggttaggattcacatcaaacattggttccatacttggctatgtatgttccatcctctttgcctcaaaatctttcaatggtgtcgctggatggagaatcgctttccttttggtagcagtcgttagcgtgatagtaggcattttggtccgtctcttcgcaacagatcctcactacagcgacagaaagatcacaaaacatgtcaaagacaaacctttctggtcagacataagagatctattgaaagaagctaagatggtgataaagattccgtctttccaaatctttgtcgctcagggagtttcgggttctttcccttggtcagctttggcttttgcaccattgtggctagaactcattggtttctcccacaaaacaaccgcggttctcgtgactcttttcaccatttcttgctctcttggaggtttgtttggaggatacatgggagatactctcgccaagaagttcccaaatggcggtaggattttcctctctcaggtaagctctggctcggcaattcctttagctgcgattttgcttatcggattacctgatgatccctccacggcctttagccacggtctggttcttgtcatcatgggattatgcatctcatggaacggtgcagctacaaacgggtaagtttaatacttatatatttcaatcatattcaaaatattttggcttttctttacttccggaagcatctacttgaaatggttttatacagtccaatatttgcagagatagttcctgagagagcacgaacgagcatctacgcgttagacagatcattcgagtcgattctagcttcttttgctcctcctatagtagggatgcttgctcagaacatctatggatataaaccaatcccggaaggatccacaagctcggtcaagattgatacagatagagcgaacgcagcatcgctcgctaaagcattatacacatcgattgggatcccgatggtgatctgttgcacaatctactcgttcctatattgcacatacccgagggaccgagacagagcaaaaatgcaagccttgatcgagtcagagatgcaacaactcaatgaagaggaagatgagatcgaagtgaagtgttttggagctgaagaacacgatgaggcttatttgcttaagcagcatcagaatgagagttaagaacagagtcaaatgatgatgatttgggttgttattgacaatagggttccatacttcaattataggaagatggggtcatagttataatttttgtaaaagaaaagtactgaagtgaaatataccggtagataacatttacaagaacagagtaaaaggaaaattactgatttttgtttttgtaaggaaaaatattaatgagtattgaatgattattcgctttcttaatttgcaaatcccataataaaattaatgtggagtattaatttggtaaaaacattagacttagttaataccgaaccggacttaaaccggattccgacagaacaagaggcaggcgcgtcagtatattggagttatttccaattttgggttctgataattgaactttactcttctttctctcccaaacttttatacacaagagaagatccaactctctctcttcttcatcgttgaagtcacttccaatgtcggactgaagaagagaaaccagaagaatcgtgacctaaatgcaactgtacagattcttcagttagttgcaaagatcgaagaaatagctgtttttgtagggttactttgccaatttcctaattctaggtatcttctttttcttcttagccttttttctctcagagtcaaaattcagcaagcaaaagaaagataaaaactttctctttttgttgtttgttgtaacgtatacaagactggatttttattctttttattttatgggtttctcgaaagattcgtgctttcattgtaaagtgtctagaatcctatttctctctactgggtttgggttcttatactcaattagctgatttgaagtgtttttggtactttagatcttactgttagacacatcaagaatctccactgtttgatatatgttgtccttcatgtccccagagatctaattgattcgagcaatgttgtcttttagttgcggaatttatttgttgtgttcgattgtgaaaatttacaagttcattttgtctatatttcagctgtctctttgtttccctctaggatttttcaaaaattaggaccactcagtttcttttgtaagatccaatttcgcctttcgttttcaggattttgacttggcaagtagtaacatattataaatttattcattttcaactaaagtgatatgtttttggtgtttggtgttatagactaattgagtgatagcaacatcaaggaagcagaagcaagttttggtttttgtttgtcaatggataaagcttcctcacaagagtgtccttatccaggatgtttcttctgtgtaatgaaagaaggaaacccgagtaaacgaagatcctgcattctcaaattctttagagatcttccttctcaagacgatgatggtcaagttcttcccattagtggtctctggaacacagcaatggctcatcctaatgatcctgagttcattgagcttggaatctttgagtgtatgtctgctttgatatggaaaggacttaaaaaccggcgttggctatctcatgaccagaacatatacattccttactacgcggctcacattatcgggtcttacactatgaacatggaagagtttgctgagagagctgtagaagctggtgtgattcctccacttgttgagcttttaagaggtaggcttacttgggttgaacagagagtggcggttcgtgctttagggcatttagctacttacccgagtacttttcccgctgttgcggatcacggagagatcctcgagcttgctatacagttggcaatgagttcgttggagatagtttattctcatttttaccagtatccggatcgaaggttgagttaccattgtgatctgcttacacgaggcatgggaggtgtagagatggagtcgagaaaagcagaggaatgggcgagccagttgcagtgttggtctcttcagctcataaactgtttcgcttttaaacccgagtttcttcccactttgtgtaaacctgagttcttggtgaatcttccagttatgtggggaggacttgtgaatgagaactcgcctgctggtatcggtttgcttagaacaatctgtcagcataaactaggtcgtggacctgtctctgcatgtgcaggaatgattgaggccttgtgtaatatcgctcgttcttctgatgattggcagtatatggcgattgaatgtcttctttggttgcttcaagatcctaatacgtctcacaaggtgattgataaggcggtgccaacgcttgtagatcttgcagagatcacaaacttgggtgatcacaagaaacttggagattccattgtgagtgttcttcaagaatgcagctcaatgggtaaccgttcaagggaattgatcgaagaaacggtaaattctcgacagagactgaaatgggagaagagtatgcctaaagaggaccttcatatcaaacaagcagcagctttagtggtcaaactcgaaggaaactctctcttttcatcaggagatatcgcgggtgcagcggaaaagtactcggaagctttgtctctatgcccaatgaggtcgaagaaggaaagagtagtgttgtatagcaatcgagctcagtgtcatctcttgctacaacagcctttggttgctataagtgacgctacacgtgcgctttgcttgcacaatcctgtaaaccggcatgctaagagtctttggagaagagctcaggcttatgatatgttaggtctagctaaagagagtttgttagatgcgattctgttcatcaacgaatgttctcagtcgaatgatccggatctctccatgagacagaacaaggttcctgattacgcagagaggttggtgaagaaacagatgcgtgcagcttggttgtttaaagaagcggcattgaagcatggaggtgtgcataggaaaggtgaagagagggaagtgtatggaaatgaaacagatgattcggaatgggaaacagcgagtgagagtgatataggagatgatggaagggatcatatgggacttgatgatgaggaggaggaggaggaagatgaaggtcacggtgagaagtggaagaaccgggataaatcgagtgagaaaaatgagaaaacttctgccaaaggtgagattcttgcatgattatgatcaacacattgttgtcttgatttcaaattagttaatggtttattggtgacacaatctatgaatttgttcaggtatgaggcatggatacagcataaagcttgcagaagatgaaatatgaaaccttgaaacacaacaaggtcgttacaagaagttgaagaacagagaagacgttgaatgggtttgagtcttttttacaagcaagaaacttgcttcatggatatcgtaagttttcttttacttttttttttttttttcgtttctttatttagttttgtgtgattgtaggatttgtggtaaaattttatccattttgaaggagtaaagaagaaaggaacaattgttttgttttttcagtgattttatttatttttattttgtggtgtatttattcagagacaaagaggagttccaatttgtaaaaaaatattttttccttatattaagaaatgatttgtgattgagagagatatttttttttgggggtcaatgattggccgagattgtagattaaaaaacattttaaatggatattcgcacgttagctaatacagtaataaaaaatttgtacaaagatagagaatttttgtgggtcttagcttattggattgcgatattgtaaagtaaaagttttgaaaaatggaagatctgcatttagtccaccgaggatcatatgcatagtcgatattgacacaagagtgaaatttgattggaggaaagaggatatgtaccaagccactatttaccttttttttacgtcaggctcttgagatgatcttcttagttttgatgtctttttgcaaattgcagtgacgttttctaaattggtacactaagtttaaaaatgctgtcctttggataactccaacggatgatatgaactaaaacaatgctgtcctttcatattatgtaagaaaacactcactcggttaactatgagcaacccactacaagtaagtattgtaaaaacgtttttttctttcaaattccaagtattttttaaattttgtaatagaaaataatgatttgggttttgtaagttagtattaggatttagatttttttaaatagtaacgaaagtgtttgataaaaaagtaaatagtaacgaaagtaacctaaattgacatttccattacccttgagatgatcaaaataaacacaatttctgcatgattatgagtttatgactatgcttattagcaatgatttgttctttctataatttaaaaccagttgaaactaaaattgtttttgtaaaatttaatagatgatattattagtatacaaaacttttgtcaacaatgaattgtgtgataagagtttttttggagattttcttatgtaataaagtctatcttgtatgactacaattgatcatgggattcgtggctaatattttttgtaattatatcttttgagtcaaattccatactcattttaatatatgcaatcgaatgtatctactaataatttgttcttatttaatttgattctgttgactctgttccaaaacaactttcggctattggatgtgtccacgcgaaatgtaatataataatgatcaagtcttcaaaatggcacaccttaatttctttttgcaaattataaaaattctttatatggtgatcctacgtatctatctaattatctcccaaaactatgggcaagagtcattattaaaatcgacccttggtcttttgagatgctcaagagttttaatttctaaaatattaagccttcactaacatgattagaaaaaaataaaaagttaaaaacatgattagaaatttagaatattttaataagtacaatgtggaaatctagtgtaaactttcctcgaacattccccatagatttatataaatagctagtgagaatttgttcatgcacatattcatcacaaaggaactcactgctcttaaatttgctctaattgttattaccttggtaaataatatattcttggttcgattcgaaattttcaagcaaatgggtatcgttgaaaacattcgttcccttaaatttgaagtgaaaatcgtggaagctagaaacgtagagctcaagtcatcgccaaccactctcttcgttaggttctatctccatgcagggaataacagtaagattgaactaaacactccagagatccgttcgagatcagactgtgaggtcatttcctggaaccaatcattcggtctggagtgccaagggaacgaaaccgcggtcgaggaattgaagcaacaaagtgttgttttcgaactacggagaaggaaaacgacgccgtttttgaagaagtggtcgaaatcagagttggtgggtagaggaaagattttttggaaatcggttatagagactgatgggatggaaatagagagatttgtagtgatggatgagacaaaagatcacgttctggaagattgtgataagcataaacctcttttgttgaagatagctttaaaagtgcaagcttcaaaaatcgtgaacactaagagagtggaagatctttgtgagtgtaaagattgtagaacatgtaactgcgtagattatgaagcttttgttgtagcttgtgcgttagctgggatttagtttgtaagaataaaatttaaagaagagatgattcaaagaaaccagaataagttgttgcagtaaaatgtaaaaactaaggaccaaagttcaaagaaaatgaaaaacaaataacaactgtcttataaaagactatgaaacgatgatgttgtttcaagcatggtcatgtccaagaagggcgagaagcatatccttgtagtcaccagaagtgtcattagcaatggctcgatcaagaggaacactgttcctgcgtaagtattcttctttgatccgctccaggtcgacctctgctcttgtagtgaccactctagtaagtgcccactcgtctgttcccatcctgttgatggctcgacgtagaaccttctcaaagtacttctctggatatgtcaagcatttgatcgcggttttgagtaattgaacataatcatcgttcgaatcttctttgagaaacttgttaatggaacttccaaacttgtccttgaagtgattgagtgttgcattgatctgtgctttgctccttgttgtcaagattctgatgagatcttcatcagtgtaagccttctcagtgatcttcttgtgaagtgtcttagcttcggatctagccagcttcacgttgacctcatcagcatttccatcgtacctgaaggtgctcacaagaggaaccaatagctgcatttttacaagtggtcaaaacaaaacaacatatcatcagaaacttactaattggtttaaagaatgatatacataaatctttcactacctttcggatatttccagatgtatggtatgcaacatcttcctcgagagaggtcttgtagcgaacatggtatgcttgcttggtcttgaaaaactcaagagaaggtctagtacaagcgatttcaactaggacccaaatgtttttggtgaacaatttggtagattcattggccaaatacgcatctctctccgttggatcaagagtccacaacatcacaactctctgttttcaagcaaagtaagatgttcaaaataagatgaagaaatatagattttgtatcttttagttttgacaaacctcaaagtcaccagaaagctctccgtctaattccttgagaagatccttattgtagttagcagcataaacggcacgaatgaaactgcgttgcgttgcgtttctatgagccaaaattgatatgatcatcccttcattagttccccatcctgcgccacacaaaaacaaatttcaaacccaagtttagtcagatagagagtatgtaacaaaacctaactaaaccaaaccaaaattttacgacagttagaaattaactgtaaatatacaagaaagctgatgttcgctagtagaaaaaaaaccaagcttgaaaaaatcttagaagattattagaattttttttttgggtttaaatctgaataaaaaaattgttacgaaagcaacaagttaatctgtttaaaagagttgtctaatcgtcgattacaaaccaaacggtcaggaaacgctccaacataaaatcaattgcatccaaaatcagcaaaagagtaaataatatgtcacacaattttgcaccgtaacaaaagaatcatgcaatggagtataaccacaaaacttcacgaagttaagacttcctaagaatcatttgaaaaacgaaataaaaaagagctaacttatcatccacttcttaaaattaaacctatatacgtgtcatcaaccaaaccagcaagctagatcagtagatcagacctgtcatgataatagattgaactattgataatcaacccaattaaataatatcaaaatgcaaatgattcaatcaaagcatgaatgtgaaggcctagtatttaacttttactaaatcaatctaacaatgaagggatggatcatgaaaacctttgaatgccttgtggagctgctcggagtcttcttcgggaagaggaatatttgctggaattttgagagacgccattctccgaccactgaatatttctctagctctctagatgagacgaagaaaatgtgggacgaggaacatgcacactgtcttaaataatgaaatgatatcccaattttttatattttattaattatttttgttaaaaattagatttagcaatctatgtaaatcagtaaaagaggaaaaaattattaatacaggctgtctacagtggatagaattgataaaacaagtataatgttttgcatttttttgtcataaagctgaatattaaatggaaattgcacattttcttaaataatgaactgaaatctcaaattttgttaattattaatcaattttgttttaaaatagacttaacaatttaagtaaattagtaaaatgagagattttattaatacaattacaggctgtatacagtgaacagaaatgaaaaaacaagaatcatgttttgggtttttgtcataaagctggattttaaatgcactttaaacagcttaaatatgggattacataggtaccgaaatttaacttttaatttatttattttttctgttatataatacacgcatattccttaattaatttcattatttggatatttcattatttggacatggattataacacatggcggacaaaacattagaaccaatattgttcattttaacaagatgtattaagtatgggtttagctttaattttaaaaccatataattaaggggaaaattataactcattagtttatactaaattaattataaatagatcaataataatttttgatatggttttataatttttagatttaaaaaaaaaaataactgaaaacatcgacgacaaatgaaactgaagacactaaattcttaacatgaccaagttgcaagtccaaccacaactgttttattaaacacaaagcgataaaatttagttttttttcttaaacaaaacttgcaaatgttatttcaagcatggtcatgtccgagaagagcgagaagtatatcctcatagtcaccatgagtgtctttagcaatggctcgatcaagaggaacactgtttctacgtatatattcctctttgatccgttccatgtcaaactctgctcgtgtagtgaccactctcgttagtccccactcatctgttcccaatttgttgatggcttgacgtagaactttctcaaaatacttctctggatatgtcaagcatttgatcacggctttgagcaattgaatgtattcgttttccgaatcctcctttaggtatttgctcatggaagttccgaaattgtttttgtagtgattgagagttgcgctgatttgtgctttgctcctggttgtcaagattcttatgagatcatcatcagcataagccttttccttgatcttctcgtgaagtatcttagcctcggacctagctaacgtcatgttcacttcatctccatcgtacctaaaagtgctcacaagaggtaccaagagctgcataaacaaaaacatatgtcacaaatttatatgcattcttgacatagttatacgaactgagtttgttagctaggaatcttaattacatcaataaacatatgagatttcatctagtatacaaaatagatgaactagatacatttgattttattggatatctcagatggaattaagctcatgaaactttcacataattaattatataatacctttcgaatgtctccagatgtgtggtatgcgacgtcttcctcgagggaggtcttgtagcgggcttggtatgcttgcttggcattaaagagttcaagagcagatctagtacaagcgatttcgacaagaacccaattgtttttggtgaacattttggtagattcttttgccaaataagcatctctctccgctggttcaaaagtccacaacatcacagctcgctgttttgtttacaaaaaaagaaaacatagttaaacagatcagtagactaaaaccaaaagaagacgaatatataaagatgttgtctcaaattaaaacctcaaagtcaccggaaagctctctgtctaattccttgagaagatccttattgtagttagcagcataaacggcacgaatgaaactacgttgcgttgcatttctgtgagccaagattgatatgatcatcctctcattggttccccatcctgcattagacaaattcacaattacattaaagaaaaatagagtcagaatcatgtttgaaatcattcatcagtattagattgaaaaagatatataattctagtaaaatttatctcgtttcatcaatttttgaaaggtctattaaatactaatagattatttttgatgataggagtaattttaaccaaattaaataaatccataccataaaccaaactagatctatatactatatagatcaacgaatatatacagacacatgatcgatcagataagagggtatagttgaaatagattacgctatgaccaaccaaactgatagaggattcaatcgaagaaggcgaatgctagactagttataaccaaaagattaatgaaggggtatagagaaggacataaacctttaaaggctttgtagagttgctcagcgtcttcttcgggaagaggaacagtggcgggaactttgagagaagccatttttcgaacaagtgaaatttctgtatgttcttgttttttgttgtctagatgatgaggtagatagagctcgtgttgtcttacttaaataatgagatggcaattaaagtttcaataaaaaagtttttgtataaagatgtattttgataaagagacttagtaatttttaatgaattaaatgaatggaaaaggtagtaaatcaactgaaaatattattgaatagtaaatttgttgactatataagtgaagtattaaaagcctatctattttagttaaaaggaaagaaatcaagatagctggcagaaaatgaatttaattaagttgaataaatttcaagggaagtatttatatatatagagtgggacagaaacttatgattttgattgtgaatgacacgtttgagtttggccttgacatatgaagagtatacacaactttttttttttttacttttataattatgtttagtggatatctatgatttatatttattaacataatattgttgttttaattttttttttggaaaaaaactttgattagatttttttaaaaatttgattactcaataattaattattttaagctatatattaaatagacctttaaaggtccatgtgacaagtttataattataggaattttccggagacaaaacaagattttcattgcttatgtcatttgttcttgtttaactccaagaatcacgtggttagtgctaagcttaacgtttaaggagcagttattttattggcaaccaaatactgattatcgactaattaaaagaatcgtaacgtcaaatatctaattggtgtagtttatatgttataaaatatgttatggataaacaacccacaagaaagttataagaattgtaatgaatttcaaattttcattagaccgtaaaaacagatctggcgcgaaaaaaattaaaaggaagattaaataaaagaacaacgactctgctggggatcgaacccagaatctctggtttcgtagaccagcgccttatccattgggccacagagtccttgtgatgatagtagaacacttaaacaatataactttaatagaaaggtactattcccacaatagccaacgccagttttcttctataaagatccgtttaatttgcatgaaccaacctaaaccttcttctctgtatcgtttcaattccaattacagtgtactttgaagtttgaattactatagaaaaccaaagtgaatcaaaatatagactgatgataatcacactttttgacagaacaaagaaaatagcttttgagatagaaaaagaaagaaagaatcggattcatgaaaaataacgttcataatctgaagtatcaagctttcatggattgtctaataacactaaacacagaaattcaccaggaacttattaggtacacatccaaagaaccccagaaaacaagaaaaaaagaaagcctttttagaacctatagaagaggatatctattgtctttgagacaataagagtattgcacgattcaacattagctgaaaccttgtttgtttatcctcaaacaatggctggagtcttctctgctagtttctgtagcttctcgggacgagaatcttcggttttatcttccccataagctgaaacatgaactccaagagccgcacgacctgatgggtcaagattctgtgaccaagctgcgtcccattccacagcttttgctgtgctacatgccacacttggacctcctggtacagttgctctagcagcactctgctcatttatcagttatatatccgttaaacaaatctgagcaaagatcaagacaattaaagaagaccaagtagttatgcagatgaaaatcattaccttagggaagaacttttcaaagatggttctgtagtagtaagcttcttttgtcaaaggtgtgttatcagggaagacaaagcttgcgttcatcagcattgtctcagagaccttaccaaaagagaaaggagagtaccgcaataaaatcaaactgttacgttaaaatattctttcttatcgattaaaagagacatcttcttacatgtttgtttgcatgatcttttagaccatcaatccagctgtatccaactccatcactgaactgttctttctgcctatatagaatgtgctacatttaccaaaaagatgacaagttgttagcaaagctagatagttttgtcaaattgcagggagcaaagtttttgctagaaaacctttggtaggtaaggatttttctcatcatcaaaggcattgcgtaacacccatttctcgatccttcccaaatcaggcctaatctgcatcattgtttagagtacaaattatcaccaaatttgaaacttgagattataaacttgtgataaaaagaaagtcatgaaagaatcaattcaaactagaatgtcctgaaagcagtgttatatatcatagaaaggactcacaatcactttggttgatgtgtgcgtaataaatagatgaaaatgaaagtgatgagaaagatgacacctaccatcttccactctggatcgatgctcattgcgacatttataaattctttatcgaggaaaggtacacgagcctcaacaccccatgcagaagttgatttgttagccctcaagcagtcatattgatgaagagctttgatctgtaaacacatccgcccacaaacaagattacagaaggcagtatatcaaaaaaaaagttcttgtctaaactctaaggcactacctttcgacatgtttcctcatgaaattccttcttgttgggagctttatggaagtacaaatatcctccaaaaatttcatcagagccttccccagaaagaaccatctttacaccaagcgatttgatttttcgcgacataagaaacattggagtgctggctctaatagtagtcacatcataggtctcaacatggtagatgacttcttctatggcatctattccgtcctgatattatcattagcggaagatataaacaaccaacaaatcttcatactcaatactcttgtagatgtaaaagagaaaatttacctgaactgtaaagtgtaactcgtggtggcgagttcctaaatagtcagcgacttctctgccagctttaagatccggggatccctgaaaagaaaacagatgaaaattataaatcttgatgagcatagaaagcttttggtgaaaacattttgagaaattgggtcaagaccttcaaaccgatacaaaatgtgtgcaactttgaaccccactgacaagcagcttctgatttttccagatggcgtaatgctactgaagcaacaagggatgaatctaatccaccagataggaggacaccaaaaggcacatcagtcattagtcgttttataacagcctgcagttcaaagaaatgcccacattcatatttccaaaataagatcagcatttgtcagagaatatcttaaggaagataagactccagaatttaccttctcaaaagtattgcgcaccactaggggatcatatggggttgaaggaacaacctcagagaaccacggggggttgtaccacctcctaagcccacctacaagaaagttttgtcccatcaaactacacagtaaaagtcccaacacaaacttactaaaagataactaaataccagtttgacaacattgatatctgtgagcgtttccacgacaatataagtcagccaagaaatgtcattatttgattttaaaaatagatgtgatctgatatgaagtgcgaaccttgtttacttgaatagatgtggcctggggggaagcacataaactgctcacaatcatcactaagtgctttcatctcggaagcaaaccaaacagaacctgtggaagataatttgtcaaaaagataaatcagtaatcaacgacaaagaaagaatgatcttaacccattgaggtgaatatcttagaaaaatgtgaacacaccatcgagaccccacccgatgtagagtggagtgataccaatggcatcccttgcagcaataaagcttttgtctcgggtatcaagaagcacaaatgcaaacatgccatccaacatgtcgacaaattcctctccatgttcttcgtactacaatattatgaaaatataaatcaaactgatagaagtctgaacacagtaactgttcaactaccataaggtaataaagattgaggtgaccttattggacttaaacttacacacaagaaaaagaaacagaaaacacaacatctaaagaagccatgaagtcaaatcttctttcacttagtgagtacttacaagatgggcaatcacttcacaatcactcccagtacggaattggtgagacttcaaattttcacgcaaagccttgtggttgtaaatctctccattgacctgaaagcaaggaaagagtccaaacaaaaatactccttattcctaaatcacatgaatcctcataaagtttgaggtttgactcatgatttcttttcatcatgtcaatgatcattgaaaaaggaatcgatattcactaatcccagttgctccaagcaattgagattaggacacaagtagaaaaattaccgtgacagcaatggtcttatcttcgttatagagtggttgatctccagaagtggggtcaacgatagccaaacgctcatgagccaaataacaatcctcataacaatgtagaccactccagtcaggacctctatgcctcaatctacataacatttcaacagatagcatcatcagtttacccattcaatcaatatttgaccaaaacatctccacaagatagaaatcgagtaaaggctcttcatttaacaaaatcaaatcgttttaaccataaagttggaaacttttctcttccaaaacaatacccaataacctttagaacattgcgcagccaaaaacaaaaccaaggagatcgaaaacaaagaattggatgagagacattaaatgtgtttgatttgagtatacctgcgagagagttcgatgatacgggaacgtttagcttgagagttatcgacgcagcctaacacagcgagaatcccacacatggtggtggtggcggcaataagagaacacaacggcttcagagaaatggatgctgtgaaaactaaaaagatgaactttataagatgggtttccaatattcaatcaggaccgttgattctgacaattaattcatttttattccttaagagaaaaagattctgattttaactttaccctaatttgcctttgacttattaatttcggaaaaagattctgttccccagtgtcacgagattcgccggattctcgaggaaaaaaggaattcttaaaacgacgcgttttgatatatccaattctcaatgaaacgatgtcgttcgataatactccatcactaatgatgttccatcataagcaggtttttaatagagttaatcatatgattaaccactaatcagaaagtcacaactcttttcatcaaatgtgtcaacagtcttcaaaacaatgtgaatacataactgggcattaagctgacatttttttggcagagactatgattgattggtttaattccgtaaaacacaagttagggcttatgacattgacattaagctgacattttttggcagagactatgattgattggtttaattccgtaaaacacaagttagggcttatgacattgacattctcctcctgaaactagttctttgtcccgtggaacttcttcttcgtgtcctctctcttgtttcctcatcttctcgttttgtctggaacgatttcttcaccttttgccaacgcaatccccagttatgtgagctcttctgtttgctacttagcctttcatactcttgttgaagctcattgtaatcgctctgaagctctgacatcttcttcttcacattttctaactcttccttaagtgtcttgatgatttcattatctctagacattcgtttatcctcacgacctccagaattttcttcctccttctctggtagcttgtcttgcatcatcatcctcatctttacttgttccgagaaaagcacttgagtattgatcttgtttatgataaaatgttttagctttggtcagtcacttgtattactctttgacttcaagaaaagcttataggataaaaactgttctgttttatcgcatacctggacgatagttcttagaggcaaccgatcattttgtgcagcgtgtaggcatgcatcaagtgatagtttctcacagttcattgttttgcataatcttcttctatcgtgatctgacaatgaaggatgagtctgcaacagggaatttttatcattagttgtagttttgtgatgaaataacaagaaaagagtttattaccttgagaaacatatcaattgctctatagagaccatcatgacatttccaagcattttccggcaacatttctgctagaacctgaaactttgtgatgggaagatatggatcttttgcaatctcggctaaataattgtccaagagcttggatatgcttggctttcctagaacttgttgttgctcatgcatcaagaaaaactcaaaaatcctgtgaaccacatccacattgtatatagtgtatacctcaggtgagctgtagaacataaatcaaagttatcaaataaagacttctttagtcgaagtatctaaagttaaagagtaaatttttctcacctgactctttcttgctgttcttcatttttgaagttaggaattaggaggtcacatacattagcatcttccaaagccatgccgacccgtttctcaagatcagatattaaagctggtgatgcagagtaaacaattgatgttttcagcatccttaagagaaagtgacatgagactgctcccgattgtggaggaagtacactgactaaactttcaatagtttctttatgttcttgacatcctaaactgttgctttcctccattcttcctctgttcacactgaactgcaactcattcttgcctaaaccgtaaccttttataccttccaaatcatcattgattaccggcaaaaagttatctgcatacttcatgatgattttacctgtaatctgtggcttggcacgtcttgctttcatagttgttataaccctcatgaagtgatcaatgtcaagggtggctatgtcattgtataagcatctttcatttctatctacaacatcttctggtatgttgttatcattgcaggctttccaagcaagcaagtcacagcatctccttacgatttggaggttttcggcccacggagataagtttgtgcaggatctcagaacagtgagtgtatctctccatgaggcaagtactacaaaagtgatgaaagcttctgtcttggagattaaattcccggcttcaaactcttcagtcatgtacaagtattctgatgcacacctcagtggagctacattgagaggattcaagtccagtgggagattgtagcaaaatttcagaatggtctcgaatgtatctgctccacctgggaagttttccagcttgagatgatatccattctcagaagttgaaggttttagctcaatagagcttatgtaaccacatttggagatcaaaggaaactgttcaaggcaaaaacatgcgtaaaagtccaagttagtctatccatactgagcttttgcacatcttagttgtctagaattgcaaacactagactcacaagctaacacaattttctctattgctataaacagactaccttgtgtgctttgaaggtaatatcgttgacttgaatagacagatcagtagggatttgagatttgacatacctgcaatagatttaaaaaaaaaaactcattagcttaagctaaacttgtctgcagtaccatgtatatatcataaaaagtttgaataccaggaacggtctttcttctcgaagctgttagctaatgtaacaactctacttggaaatataatgcttttgttacatactggaccagcatctccaaaactctttagcctttctgcagctgatactgaattcattcccttatgatctgcaaaacaaagaaaacggggttatctaaaactactagaagtgtaaactatgtgtcagatagatcgatgaaggtgttgttgcttatatatatttagattggataagagtggggacaaaatatgatagtaaacgtgaaaagatagtgtgtggctcttatatggtatacatagagagaagcagttggtgttttctaggtagagaatgttttagtcattaaatatgatatgtctgtgtcattgccaccatatctactctggtctcagtagtctgcttactctcgagtctccaccatatatgtgaatcgttggattcttcaatcgtttaaagatatcactatcgtaatttgtgaagaaactttagacgttcgttttcttctttttagagtaaaggtcaatttgctaaattaagcaactaatttagtaaatcaatgtaaactaatttttaacagtttttgtatttttggttgatgttaattttcgtggttggcggttacaatggtgaagccataaaaacgcgtccaatctcaaacctcacctgagaaaccgcaaaagtcagatctattaccttacattttacggtggaagaacatttgatctcaaatcgggaaaaatggcgagtgtgtcaccattagcaaagtacaagctcgtgttccttggagatcaatccgttggcaagaccagcatcatcactcgtttcatgtacgacaaattcgataccacttatcaggttggatcattttcttctatcccatctcgatcaaaattaattttgatccattgtctgtgagatccacgatcctgttgctgtaatgaatggatcagattcagaattgctagaaactcatagcattgtgttcattggatcaaattctgatattagttatggtgtttttgttgcaggcaaccattggaattgattttttgtcaaaaacaatgtaccttgaggataggactgttcgtctccaactatggtaattcaattcaatatgctcctatcttttgatctaaaacttttcacctttatcaaatatatatctagatgagcataatctttattgtttggtataatgtttgaatggaacatcaaaatgtccatggaaattctcagcattgtgtatcaaccatgttcattcttttagttatatgtcattttgaatcatattactgtgcagggatactgcaggacaggagagatttcgaagtctaataccaagttatatcagagattcttctgttgctgtaattgtctatgatgttgcaagtaaggcttcttctgtgagaacttttcagctttaccatcaaagtttcctcttttgtgtacaatctacacaggatccttctttttgcaaggatgctgtgtaaagtctcatcttttttgttttgttattttaatgtatagataggcagtcattcttgaacacatccaagtggattgaggatgttcgtacagagagaggtagcgatgtcatcattgttctggttggtaacaaaacagatctcgtcgacaaaaggtaagaaacacttgacgagaatgagacatggaagctttttctatttagctatccaacttgatatttccatttgacaggcaagtgtcgattgaggaaggtgataacaaagctcgtgattatggagtaatattcattgagaccagtgcaaaagcaggatttaacatcaaggtgagagatgcaactatgctctcattactcgtttaagatcttgagatttcttggaataacgcttggctttcttgttctggtgttttggaaacttgcagccactttttcgcaagattgcagcagcgttaccaggaatggaaacactttcttcaacgaaacaagaggatatggttgatgtgaatctaaagacttcgagcaattcggctcaaggggagcaacaacgaggtggttgtgcttgttaatcagttttaaatatatacacagcagcagaataggaagatttttaaacgaaagattcataattttatggaacaaataaatcctggtatgaggaaaggtgattacacttggagactctagtttttctttggagaggttttgttttcaatatagagttgtgtaataaagacgtctgaaagcttatgaagaagaatggcatgttttgctctgttctcattgctcatttcttttacatcacacactgtcagtctccatcttgacattactagaaaatgtttggataacgaaataagacttggaaagaattgggaaaagaaagagattcagtttctcatattaatctattattagtttattactagtatcacattaaatgtaagagtaagatatcagatcaacaaatcattagagctctttactgttgccatccgtattgctggtttctctgattctgccctcttcccgagctaccagagccaccatactgaccaccttgtgtgtagttaggaggtccaaccccgtacgggccaccactaggccctctaggaccagccacataaggagctccacgtccttgtggaggatatgatccactgctgtaacctcctcggctttgattataacccccgctctggtttccgctaggagggtagcggtttggaccaggtggaccacgcggcttcccatagaagttgtggctgggtccagcaggtacttgtggtggtgcgttgttagtgggatggtttggacctgcaggccaatgtggagcagcatgagactgtccaccatgttgtaatgggggtaagcgagagtgctgcagcggtggatgctgcagtttctgtctttttgctgcttcctcgttttggcgctgctgttgccgctttttctttgtctggaactcatgtgatgattcatatgtgggcagactgttgaaatgaaaccttaatttagtcagaaaaaattccccacgatcgcctgtctaataagctagatgatgatgcaccagatgagtttcatgaactttgtcagagaaaatcagaatatacaaatacctctttgggtcacatggcaacggatcagtccaaaagtactcggcatcaagagcatcctttgccgatattctctacacaggggaaagaaaaaaaggagacattaaatatctaaatggtgttaacaatgtcctgacttgaagaggtatgtttcatccaaaaaacagtaaaagacagtttttaagaaagataattcgctgggaataagaataaaggtctctgatacctgtgctggatcaagcaccaacattttctccagtaattcaagagcatgccgatcaaagctgtacagaagagaaagtaaagccaaatgaaatcttctgatcaaagtaaagcggagatatataatggtttactttacttactgtctgaagaactctcttacacgcctcttcaagggccgtgcaggcttgaaattgttgaaccaaggcatcttggaaaccccaggccaaagtttttcatcaggtgatccacaaagctcaaatatcttgttcaattgttcttgctgaaacaatgtaggagatggcacatatttttttgagattatcaataacatgtatacataactgcgtctataccattttgtatacatgatataatgcaaagaacctaaccagcctcccacggtcccaaaataaaagtgccgataaatctaattctagttaatcccttaggttttctactccaatgatatcacaatgcaaccaggagaccatgtagattcttatattattagtggcacgaaagcacactgtcttaacatctgaaattttcaaaagaactgcgctttcagcaaagatgaaacgctgacctcatttttcccaggtaagattggttttgcatgcaaaagttcggcaaatatgcaaccaaccgaccacatgtcaattgctgggccatattttgtagccccaagtagtaattcagggggcctgccgcaatatatgtaaatcagcaaagtagtaataacaatgaattagcaaagaccataatattaagactatctatgtatatcatgtaaactttgaatgacgatttttaggcttacctataccacaatgtgatgacacgatttgtaagatttccagtatgatcatgagaatacgaccgtgcaagcccaaaatcagccagctttaaatttccctcattgtcgataaggagatttgagcctggatcaaaatctaggttaatatgcaagtaaaggtgataaccaaacatcaacattgtattaaggaaaatcaccttttatatcacggtgaagcacttgattcacatgacaatagtgaagcccggtaagcaattgcttcatgtaacacttttaaatggattgagtgttagaataaagttgaacaataagtatgaaaaaggctaatagaagtaacgagctatttagccgtgcaataccttaatttgaggaacagtaaatctcagtccaggacgatctgctagtccagtcaaatcatgatccatgtactcaaaaaccatgtagatgccacccttgtatttgttattatctataggtgaaaaagccacaacctttagttaagaagaaatcctcaataagcagaaactaagacagtagttgaaatcactttttttcacaaacctggctttccttggtcatccctgtcccgaccttttaagagacagaaccattcaaaacacaaaatgtttagacctctttatatagaaatagctaacttaattcagtgcaacatatgtgttccttaaacaaacctggtgaagtcacaatctctttcagctgaatgacattttcatgatgaagcttcttcagaatctttatctctctaatagctgttataggaaactgcatcataccagttgtaaacaatgggttacaattcctatcgtaaacaaaaacttgcatctgttctaaacatagtgagcatcataaaaaaaacgtatagtccatataaagtgaagaattcacataccccttctctttcattgtccatacgtatctttttgagagccacaatttcaccagttttgatttctttagccatgtaaacttgactgcaacagcaaaacaacaacaatcaaatctcctaaaagcaacacaacataggcattgtaaaagcctaatcatacaatcaaaaatcgcttcaaaggccaataatttatcaatcccaagtaaaaattaagccttttgaataaccaaagagtgaaattgaattaaagagaaagtgaataacccgtaagtgccttcaccaatttgttcgagcttctcaaagcaatcaacgctgcgagatccccagattggaggaggttcctcgagatttagctgcccgaatgatgccatcgccatcttcgttcccgggagtcccactgtcgaacaatatcttttactccgatgatcaaattacgtctttctcgatcgctttccttttctctcagacaactctctctccgtaggtttcccagcttatttatgtaattagcgtttcggtttaaatctatgaattgtccggtttgaaccggtctaaccctgaacaagcggttggtgtaaattagcgatcatccgttaaatttaaataaaataatgaaagaaatatcaaatatcatttttattgaccggttttcaaaaataccacaacaaaaataatcttttcaaaagtatttattaaaatacaaactccattttttaaaaattggaattatgggattatgtttcttatgtatctttctcatcataaaagacttgacaacaaaattgtttaacatgccaatgccaagcacactcacaagtcacaaaaaaaaaaaacaaattgcaattacaaaaatcatacattaattgttctataaagtaaacattcatacattttgattaatatttatttttcaagcttagatatattataaagaaagagaaaaactagtggacactcgaacgccctagatttactgctcgagataaaatttgattttcgtaaataaaattggaggcgaatttgagaaatcccaaaaatagcgggaaaattaagaaaatcacttaggttttccagtgggttcaccgtctgtgacaagaggtgcgataggaacagattactcctgaagtgttagcgtgcttatcacgccatttaaccgtgtacacgaccattctggttcaaaggaagaacgagaacattcgaatctcgaccaaaccctagatctcggtttctttacctacaggaagacacgattcactatctccctactcattgtcaaaccctaacatcggctattggtcctaactcctaactcacccgattcaatttaggtttcatgctaacatcggtgaaggacggttatttcggaagtttgattttggtgtgggtaggtctaattttgggttttgtgatttctaggaaaatgtttctctatggtcattcacttgaatcaaaccctatacataaatcttcccttcttttgtttcgtatggatgatatttcttttatctcttatgaatcatgctaggttttttttcttgtaaccgatattagagttcgacttgggcgatgggaaagatagataagtatcttaagtatgtgctatatatgtttcttgaacttgatccgttgatgttttggttttgtttaagtttgttggtccacaatgatatgaaagatatataggctttttcttcttagttttatgaacttactatatatatagggaatctgactgatggaagtttcaaaatgaactaatgataaaataatgttaagactatatataaacaatgttctcatccaatccactgtctgtagaagaaattgacttgcatatttggttcatattccacaatggggttgagatatgatcctacttactgatttttctgtctgatggtgtagttttcaagctaaccaaaacattcctcttccaagctactttcttctgtgggatgatgactacgtagtggagttgttctaccatctcctactattctggtgatttcagtgatattttattcttgtgtttcttaattcaagggagtggtcagccatttgtgacttctatgtccaacacgtataactatcccactttctggtccataaatgatgcaaagcaacacatatttaagtctacattggcaatgagaagcctctgttaccatgtttcagtttcaagctgtaggagtttgctatcgaaggtcagcaaccagagttcaattcaggtatctcatctcctcttggggtagctagcaaaactgcaggattctaagttgtaataattctgatgtcttgttgttgttgttgttgttgagtgctgcttgttaatgtgttgattcacatgtttgcttcatgtacaagagagttttccagattttttatcatcctaattgttagaaaactaaacagttgaaatagcaaattagcaatgatctagtccatgagaggatttacctaatataatctatctgagggtataagtcaaaggtattctgaaagatctatctgcccacaatattatattgtggaaatcgtcaaatttatagacttttatgcaaagttttattgatttttttttttggtaagaattatcttaagttgtggttggcatctgcaatcgttgtgttgttcacatccatcagtctacagtttactaacagattctaatcatgcatctcaaactgtatcatcatttgtttagtgttattattatttttggatgaaattcttaatttgtgtttttccgtgtctctgaaaaagatagggacaattgtgaagctcaaaagaataggttagtgtttacttaatgttaagtgctactaatctagaataaatacaaaaggtttaggacaaagagcagatctaaaggtgacttataaggtttgctcctggatagctttattttctttattggaactcaatttaaagacctgacttaattaccaaccccaaccatgtgttttagagttcgcacagctttttatgatgcttttgtcaagattattctattgtgtatcctgttctttacgtatatgttcatgcagagatcttcgtacttttttgagtcaggccatgtggcttactttttcatgcaaaaagcttccccggttttgtctttaaactcttacactttcgtgaaaagataattcactttagcctgtttgctttagctactaccttcttaaaagcaacaatgttatttttacagggtctttcagattttctctttgtcttctgcttgatgcttgctggtgagtgaaacgatgaactcaaagaacataaacggcgagtggtgtggccacctctcttaggttctgaggtttgttggtgcttttagttcccatatctttgtctaatctttaactagttttacttcattctatacaatttttatttaagcaaatgtggtttctccatgcacatataaacttacaatgataagagtatttcaaaattgtatggttttatcactggttttgagctatattgattggtgatgttaaagggactgtcttgggaatgtcatattttcaagcacataaatcatgaaaaagttgacagaaatctacctttccacctttatcacatgactggtaaaagttaacaaactttattcagctgtgccttttttgtcccccatttgtcaaagtgaaagctggactttttatacttgtttaagatttatttactgaaataatctcgtttctttggtttatagtaaacaatcttgtttgtttggtttatactttgcactaacttcgtctagttttcctcgtaaaactcaaatttcaaaaggtagtttatatgttcaagaagatatatgttcaagttgtctagatgttagtgcagatttgtgaaactaataaagatttacatacattattttcaaccataataattgcctatctgtcttagtatgtactgaaggtggacctttgatgaaaatccctataaaaagcttttagtgagaaggcaccactaacttggtgaactcaatcaaaaccgacttgatcataaagccactactaatccttttttcagttctaaacactcttttttttctgtaccactttgcaatagatgcatgacagatgatgcttatataccatgatgaggagtggtaggtttatttcccatatatataattttctttcttctaatttgatgattaagatatatgtttatataatatacccaaataaacataatcgctggcttgttctatgatgcctagttaactttttttttaaactactttcttatttgatgatagctactagttcttcccctctgagctcatgggtttttctgtatgatgatttcagtttgggcttttttagatttggtctaacaaaatttaggttaaacaatcctaaatgtacaacatgctatcctatagtaaccttctcttctaatacatgcagtgggctcaaaattaattgtttgaatctatttcttggcaggaagtatcattcaaaaaaatattatatgaataccttaaaagggtcttggagatgcaaattcttgaacaagaatagaaagagatgtgatcctattggctttcctggtaaaacaatcttctgaacttcatagtgtatcttctgaagtggttctattcttgaaaatttagagaaatttgtcaacaatgacatcgtgaaatcataatttctttcatttcgtgatttcgtctatgttctgaacttggtagatacttgtgatggtttaaatcctgaattattgcttcctctagatttagttgacacactggttacatgcacggatgcacctaactaagtacgagctagattacctcttgtcattgagcaactttttttgtaggaaagacccattaggtataggtacacattcctctatagttttccttctttttgcatatagtgaaactttattcgtattataattcctcttcatctgtttttccttttatatatggatacattttacttaatgatagatactattaatgcatccaatatgtgtagagctcgtggatgacatatatatttttccgttgttagcatccatgtctttcactgtcttgagctgtaaaacgatgtccacgacaaaagaagttcagccacctaaaatgacatttagtggttgattgttaacaaaaataccgcttaagaccacacagtttagggcatataatatttgactgactttatataaactaatggtagacattcttgttctttctttttttcttatttgtcatgttctcgaggtttcttgtgacgatgctttttttctagcagatgttccagcaatgttgggcgtaacggttgagaaaagtatgtgctaatttactattctaaatgaagagtaagcaagaagatgttgaaccggtgatttcttgttaatttctcttttcagatttgaataatatacatgagtttcaaaagattaatgccttttagatcattatcatataaaactaatccttgactatgcgtaaccatcattaatttgattactacagataaaatagaaaccaatttctgtattccaataagattgctaccatatgaacagttgaaaaagaggatggtcatgaagattataggtttatatacgtgtgcatgcgtgtgtgatgttacacgtgtgtctcatatttgttcttcttggttttacagtcaccactctcgtcactcattggaatttcattcaggaacctaacctatgctgatgatattcgaatcacgagcatcttggttaatttcgtctgacttctgtaagtatcaagagtttaatcattactgcagataaatcctcatacacaaacttataatttgtgttttatcgattttgtggaacttaaaagttggttgcaaaatgcttggtatcataaattgattaaaggtatatttgcagatgatctcgagttttgcttttcacatttacattcaatatataggtataatacaagggttaaatattttcattcgttacatagaaagtccgagcttttagacgcgttggtttgaaacttaggagaagaagcaattcagttgtttagctgacaatgaaaaccaagttgttgttgttttttaattagaggaaaagaacggtttaagtgacatcacatatttcataattaatacttttgtaaaaaacctatagtgctttccttaattctttaatattttcttcacctgcttcctccactctgagaggaaccctaattcaacaagcaattataatctttctttccctaattttaattgagtttttgtaagaattatttcgtctttttttttttaatttgtaggcttctgttacctaggtctgatgatacttctagagtcgtaggctcaaatatgatgcaacgaaaaccatagtgtacatccagatgctaccatggagtttcaatgtataatgaaataaaattaagataatggcttttattaatcctcttctgatagatggctttataatcttctatatatataaggaacgttataatttttgggttctctaggcaatgttagtttgtcaagcttcatgtatatctgtatgtttatatttgcagtgaaggtagaaaatgagttgagtgaaaatatgttaatgcaaatccatacaaaacctgctcagagagtcagagtatcacatttcactttcacctacaggctacagttactgaatacactaaaatatcttctagaaactgacagatttgatgccctcatttggtaaaacatcttcttgtttgatttttctctatttcttaattagattttgtttcttgatattatgtcgttcagtttgaattttgtgcacggaacctgtgatcttcattatatagaagacacagaagaaaaagacaagagctcaagatatgccattgggtgcaatacttaggctgagggagaaagtcttataggttttaaagatggtggagatttagatcattttctgcacccacctctcccctaaccagctcctccctagtggtcaaaatctgtcatatcaagcctgtcaccatcatcaatagtaagtacttcttctgattatacccaaacttgcccctgacttacattgacattctttctgatctgtccattgctattgctcgctgaaatttcattgaatgcgcttaggaaataattaaggatgattttaaacataagcttacaagttttcttatgtattgccacaaaatgatacaaaacataatcttacaagttttcttctaacgatatagtgtatgcttttcctgtcggtttcttcatttggtatcttttcttcctagaaaaatgcattttagggattggcaatctctgtaagtaataccttaaaatttgctatatatggacttaatcatgatgtgtcaaacaagaaatttacacggtcataacaaacccactctgcatctttttcttttacactattggaccactttacatcttttacttgctttaataatctctcaggacttttttgaaagattctcattttcagcggcaagctcttagggttcattgccttccgttttgtttagttggttgatcatagctttaatcggtatgtagaaaaatacaataaaaatatagctaatatgaaatattaaatgcataaactaataggccatggaaatggatgatgcgaggaaaacctaattttgcgtgccagaggagatgtctcttctttggccaccctcttgttgccatgtgttgttggcgctgacttctatatttcacaaattctttctcattttatttgtcattccaatgattaaaaaatacaacctaaaagtttagccctcctgtcaaatatcctttattgcccttctcctccatcatcacctactcggagaagatcttttatggatttcataagaaagatgatctaaccttcttgcttttagttgatctgtgtttttttatgagctgaaccattcaataacctagactagagttttggattgtgaagagaccaagcaataactatgtgttgttgttattcttcttgacaaatgcaggggtttggtactagggcatagtgatggcaactaatgaactgcttcccaattaaagacaaaaaacaaatcgattgttatgtgtttgtccgttggagacggctgttcccgagatgatactgatgttgctttaagacaagaggaagaatttacattgaatgatttttatcacactggtaaaggaatgcgtatgtgagagtataaaagaaaatgattagaaaaatggaattgaaaggtgaaagtgacatggttgttttggtaggcgaataggaaagaagcacgtggtgaatggacatgaagagaaaaggatgctaggtttaatataaattggaataagaagcagttagtggttgtgaaggaaggaaggaggcaagcaaccaaatctcagagacaattataacagtatagagaaggaagaaagaaaagaaaaagaaaccgttgttgatttagatacagagaagagaagatcatctaacatgggaagatctcctatctctgatgactctggtctcaagaaaggtccttggactcctgatgaagatgagaaacttgtcaactatgttcaaaaacatggtcatagtagctggagagcccttcccaaactcgctggtaatgcttttgtgttctttctttcttgaaagcttgtcttaagtctaagcttctcatgtgattctctctgtgcaggtcttaacaggtgtgggaagagttgcaggctaagatggacgaactacttgagaccagacatcaagagagggagattctctccggacgaggaacagactatcttgaatcttcattcagttcttggaaacaagtaattaatcttgtgatgattgttttgatgttttagtcaacggttttgtttgtgtaccagattatcttatactgattgcttatgaatgatgatgttataaggtggtcaacgattgcgaatcagttaccagggagaacagataacgagatcaagaatttctggaacactcatttgaagaagaagctgattcagatgggttttgatccaatgactcaccgtccaagaaccgatatcttctccggcttatctcagctcatgtctttgtcttctaacctgagaggctttgttgatctgcaacaacagtttcctattgatcaagaacacactatactcaaactccaaaccgagatggccaaactccaattgttccaataccttcttcaaccgtcttccatgagtaacaatgttaaccctaatgactttgacactctcagtctccttaactctattgcctctttcaaagagaccagtaataataccaccagcaacaatctcgacctcggtttcctcggctcttatcttcaggacttccacagcttaccttccctgaaaaccctaaattccaacatggaaccatcatctgttttcccccagaatcttgatgacaatcacttcaaattctccactcaaagagaaaacctacccgtgtctccaatctggctctcggatccatccagcacaactcctgctcatgtgaatgatgatctgatttttaaccaatacggtattgaagatgtcaatagcaatatcacatcttcaagcggtcaagaatcaggagcttcagcttcagctgcatggcctgatcatctattggatgattctatattttccgacattccttagccttcttttgtctttactttcaggtatgtactttggaggaactcaaatcaaatttactcttggaattgtgcttgttggagatttttatttgcctatctatatatatataaatactgtagagacatcatatatttgtaactcatgttgtagaatgtacagtacagagatttcatactcatatgcatatgttgttgtcaatgttctttagcatatgtctctgtgcacagagtttatatatatataagatttttgtgaaatggatatcatttgtagttgtagttgtagttgtatggtatttaataattagggtttttgctgattatttgaatcttttgttttacacttccttccatggtgataagtgataacattcggatcatgtatgaatatagatgtcataacaaataatagacaaactgttattatgtgaatgaaaacacacaaaaaaaatcaaagagcagtttgtgtatctttaagcagaaaatcaaacaaattaaagctagagactagagtttaaatatgttaacatatgaaagaccacgtattttgctctaaaacaacacatattagagcttgaatgttgagttgtttcattatatcattggttaagtctaaatgttgatttgattgccaagaagatcgatcaaataatggaagaagtgaagaagcatgtgatcggctggctaacgataatataaaaaggccaagtagagatttaataataattaaaagacaaggccctttaagtatgtgatgtcagataaagtgatctctcattaggttttatagaaaaatcactcattgaatctattttattattattaattttgttataatgttgaattgacacataatcgaggcttgtaaagatcttgtgcaattagggaatttacttcatccgtatccaaatgataatgatgtatagattttttttgtcaatggataatgtatattattatccattcttcaatcttaaatatttttggatattttcgatcatgaacataaaaatctttaaaatacattgctattgtatctaacacaatttagagatgattaaaaatatgttaattttttgttcttcttgttttctattcaaatatgaaaacaacgatttttcaataataaatattaattttcatgtcagagaatacagaaatctttattttgtgatataattaaaaaaaaaaatcataaattgagttggcaaaactaggacaacttgggacagaaaacatgtatttaaaagcccatattaggcccatataaacgacaactttgtaataggcctgacagtataagacgacaaaaaggtttcttgcggtcaacgaaaaaagtcaacaaaacatcatagttcttttcattcacagaatttattaaagtcaaaagatacatcatgaaacaaaaacaagatttatacaactgattttacttcttcaccgaagaacaaaacaaaaaagtgaagttggcaactttacagtaaactcaaggtttgatgtttttggtcatcttccaccagataattcaatggcatcttggttatgcatagaatcttcaccccaatcaaatctcctctgcaaccgttcaaactcatgacgtctcgtgacttccacgttttgccactcttcccatctctccgcaagcccttctccttctaacatcctcacaacttcagacatcactggtcggtcttctggtgaaccttgtgtacaaagcaaagccacttgtatcatcatctctacttcttcttttatatactctccatccaaattcttatctacgattgctcctaatctcttctctctttccagtttcttcacctgtccaaaacaaaaaaaagatccaaaagattacggtcaataaagcttgagagaagctacttcgaggtaggattatttgattatacatacgtggtcaagtaacaagacatcatcttcttcctccaaacgtgaaaagtctattgcgcgttgtcctgtaacaagctcaagaagcataattccatacccgaaaacatcggttctctctgatgatttccctgttgataaatattctggtgcaatgtgacccattgttcctcgaacttgagtagtcacattagtccttctaacatctactagcttggctaaaccaaaatcaccaaccactgcttcaaaatcttcatctagtaacacattagctgctttcacatcacgatgtatgatcttcggattgcaatgttcatgaagatactcaaaaccacgcgctgctcctaaggcaatccgtttcctcgtctcccaatctagaaccgggtcgcctgctttgatctctctcagacgatgtgcaagacttagattctgcatgaagggataaaccaaaaggcgttctgtttgtgtggtgcagaacccgataagacggagtagattcctatgaacagctacacttatcatctctacttccctttggaaagcagcatctccaccaggactttcgaaatccgtcaatctcttcacagcaactttggtgttatccggaagcactcctttgtaaactttcccaaagcctccttgaccaagtacattcttttcgctgaagttatctgtcgctaactggagctctctccatgcaaaccttttcaactgtccaaatgcaattctcctgtccacttcacctgaaaaatagtaaagttccacaaatctgcatatcaatacatcataacataccgaaatacgaaatacgaaagaaaggtttccctgtagggtatattacagacctgcaacatccacaaacacatcacgtctatatcctttatgcctatccttgcagaacagaaacaacaagattccaaagagaacaactgtaactccagcaacaactccagcaataatgccagttttaggcttgcttgaatcacctatcaccgcagattagatgttttcagtctttcatacttttgaaatggttgaaaataaagaaaatgcggtcagagcaatcgcaaagtgaagtagtttacctgaatgggcaaccgcggatacacaagggtgaggttgacgaccgccacaattcaagttgtttgacgtgaaactatagtcgattagaaacagatcaaattactgctaaagaaatgagcatgctagattaaacttgaagtagtcaaacatacttatattttgggatctcaaacagactttgaggaatctgaccactgagactattggaatcaagcagcctgtaaacatagtttcaaacaatggaattaagacaaggatgcttccagaaagatggtaagcataaacacaaagaacagtaactcacaggtttaacaggtttggaagaccagtgagtgactccggaatagtcccattaagtttgttcctactcaaggtcctgtttagccaacacacaagtgaataaagacatgagtaatccttttctacgtcttaaaaatgttttaaaacatgtgcaagatttaacagcattgtgaggcggaactacttacaagaactgaagtttcttgagattaccgatagtggatggtatacgaccagttagctgattgtcctccaaatccaaactagtcaagctagtcagatttccaaagtcttctggtatttcacccgtaattccatttccctttaaagtactatatataaaaagaaggtagcgaaatgctcacaacctaatatctatgttctaggatttcagacaaaaagagagactcaatctaaagcacttacagagtcttgagattttctaggattcctactcttgaagacaaggttcccgagaagttcatatctgacaatgtactgcaatcacaaatgacatgaatataaatcttctcacatggaaacaacattgactaattcagagttgtcattaaacttacagagaagtgacaaagtttttgtcatcacaaataacttgggaccaagtgcaaggattaacttggttctgattccagtcacttagctgattcggtaatgcacgtaaggagatcctcaacgcaaacagtgcatcccctgaaaatggaaaagcaaagaatcatagagttaaatcttcaacctgaacaagctcagaaattaccagaaacgaaacaagaaatgagagcaacaaaatagcagttgaaaagtaagaaaaggcatcaccttgagcatctggagacacaaatgagcataaacaggcaaaaaacaagagagtaaaagccatagccatcttctgcaagctgaacattctcatctcatctcattaattgagctggttccatctacaaagacacatttaataacattacaacaaaatctttttcttacttacttttagtggatctgacacattacagagaaagattaatggagagaatctcttcaactatgaatcaaagactttctaaattcaaccaaacttagctaaaaataggtctggtaaagagaaattagggataagaataaattccactattgaaaggttgagactttgcatagaaaaagagtcaaacggatgcaagaacacgaacatgctcaatttcccagaaagattagtgaccaattttgtcagacttgataacaattccaaatctcaaaaacagagcaaataaaagaaggaaagaacctcgtacccaaggagaaaatcccaaaagaaggaaacaattatcgctgatcgaaagattcagtgcggagagtagaaccaaagacaacaaaacagaaaaaagagaaagtgaaaagcttcgattttcttgtctagtggtagactttgcgttttttggcaatttcgcaattatcactctcgctcgctaatggcctttgtctgaaagaaaagtccaatgttggtccacgaactgctttttctccgtgcaacttgtaatttccctaaataactaatgaactttgataatgatgtttggaacgatgtgctatttaattacgtggatgtaaaagaagactaactaaattgtctttttcttttttccctcctaaatctacttatcaactctcgttgttttttacctgacaaccattgtgtaaattgaggaatgattttcgacatcattgacaatgaggctataatacagctgactgaaatggccaactatacaccactcactaagacgaaatggccagcctaaaaaaaggaagcgaatctccctgtacaaaggaaaagttaaaaattggtaccaaaaggcaaaaggaaaaggttaaaatgagtcaataaaagagagtcacagtcacagtgtttcacggcccatgggccggctagactcaaagaaggaagggaagctgtgaagattctcagatcaatatgaagattaggtcggttaacacttaacaggcacgtgtttatcgtgttcaattagttccgttaattaagccttttttacgtccatctaatcgcggatgtcaaaatcttacatgtgttggtccgttattagattgaaactgtgatgtactcatatatttttttaaatgtccaaaaaaattaatgtaatttagctaagtgtgattacagaattctgctttatttatttaaaatatatctaaatacaagtatacaaaagtatacaacagccgaccgaggagactagtaaatctgaacatgtgtcataacataagaagttattaacagcgtaacgtatatgaaccttatcccactatcactatataataataacgtcatactcatatcccaactttatcacgctattctcaaacaagcaaagaaccttaaccaaaaagaaaacgtctacggagacatatggagaggaaacatcacttcgtgttagttcacaacgcttatcatggagcctggatctggtacaagctcaagcccctccttgaatcagccggccaccgcgttactgctgtcgaactcgccgcctccgggatcgacccacgaccaatccaggccgttgaaaccgtcgacgaatactccaaaccgttgatcgaaaccctcaaatctcttccagagaacgaagaggtaattctggttggattcagcttcggaggcatcaacatcgctctcgccgccgacatatttccggcgaagattaaggttcttgtgttcctcaacgccttcttgcccgacacaacccacgtgccttctcacgttctggacaaggttaacaataaaataacaaaaataattttgatactagtagttttttataatttgaccaacttatcttaataccatgaaaataattcttggtttggttgatgataataataaagtatatggagatgcctggaggtttgggagattgtgagttttcatctcatgaaacaagaaatgggacgatgagtttattgaagatgggaccaaaattcatgaaggcacgtctttaccaaaattgtcccatagaggtattgttcccacaaatctctaaaatttgttacgccaaaacaacaaaatctatattcaaactatgtgctaaagttttcgaatatgaatcatcgtatgagatgattattaattagttttggtgtgtggttacatgatggttacactgtgaaggattacgagctggcaaaaatgttgcataggcaagggtcatttttcacagaggatctatcaaagaaagaaaagtttagcgaggaaggatatggttcggtgcaacgagtttacgtaatgagtagtgaagacaaagccatcccctgcgatttcattcgttggatgattgataatttcaacgtctcgaaagtctacgagatcgatggcggagatcacatggtgatgctctccaaaccccaaaaactctttgactctctctctgctattgccaccgattatatgtaataatcttaagtccgttttacttttttctcatcgttactaataaaacaaacccctttttccgggcaactttcatcaaaaaaacaaaacttatgacataaaatttcatcctttcgatatgtttcattcttttgtaaagcaaatttagtaaccagaatcaaacatagaaaatcacttcaaaatttaagtatatatattttcgtttgcttgtgtttgtgtcatttatcaacagtaaagagaaaaaaattccttatagcaaaaaaaaaagtaaaagagagaaaaatgcaaatagtattggttagactcatagttatgttatgtaaattgattactaaattattttgaagctataagacaaagaagaagaaaaaataaagtaatgataataattgtacgaagttaagctttactcagataaatgggtctacagaagattcacgagaaggagactcaaacagtgacgtgtaggaggacagtggaagcaggtgagacaaaattgattaatcaatttttgacagtgtattgttccattcaaatcaaatctaaatccattctttcttccaaaattaaattaaaaattgtgaagaagtaactggttacttataattacagtttaagcttaaatggttctgttctgtcagtcagaaaatagtaataaaaagctgaaaaagctgatgaaaataaattgtgaacatgcaaacgttaaggaatcaatatcaagactagtgaattaaagcaaaaaaaagtgttgaaagaaatgaatgacgcaagtaagtagttacaggggactatttctctcaaacaaaaatcatagaactttttgattatttacaaattgagccgtacatatacaaagaatccaaagaacaaatcttctcccacaaaaattaatgtttcagaaacttataaataaaaaataacagagtaggagatcaaaccatgaattaaggattataaaagtggccattgcaatgacatttccatcccataggtttgtaattagagtactgatcaagaacggtggttagagaagaaggaggtcgtacgaatccaccggaaaacgggttaactcgtgtgaagcgggagcgagtcgggagagttggtacttgaatagccatgcaaggatggcagttgttgcatctgttgtggcagcttggtggtgttgaacctaatcttgctttatcttcaatcaaagcgacctgaaataatgcaaagaactaaagatcaatcaaatgacaaaaacatgaattgatttgaggggaattgagttgagaaagatgagttttgattacttgaggagaaataggaggttggataggttgaagaaaggatgagacttgtggagtgatgagaagaatgagaatgagaggaagaagaagaagggttgatttgtatatagcaaacatttttgagttggattcaagaattactactataaaggaggagcttcatgtgggtctagtgaaatttcaatattttgtttgaaaaagaaaaacagagagagagagagagatgatgaagttggagaaggtttggatcagaagtgaaatgagtgagttaaggagagagagataagggaagagaaggggcaaaatggtaatttaaaggaaaggaggagtgaaaggaacaagacagagtgggggagacagaataggaggatacatatcagagaagaggagtagccttctttctaagtgtcacttcaatctttcttctctttctctcttttcctaacttttattcttttttccattattttctttggatatctctctttgcattgttcattagtttttgcatgttttgtattttgcatatcattggaagtatatatataataaaccggattaaaaattgagtcaatgttggttattagctagaacaaagaagagcctagtgttgaccaaagtttgcatagcaacatgtcgtccatatattcaaccagtatttgccttgcaacatgcgcttaataccaagatctttggacttatatgcttcttttggcatacttaattaaatgctttatggttccaaactcattactaatactagctttctcaacaatctaaacgttgaatggaatgttcaacggttaaaaaaaaaaaggaagagttgaattacatttcactggtaagtatctatttactgacacatcaaattggggtttccttttatcatcagaaaatagtaaacgaatagggaaatttggggtttccttttttcatcagaatagggaaattactgagcaagtaatagtgtgtgtagtaaaaaccacaagtttgactgagatttgtcttttgaacaaaatgagaaaagaggtaaaaaatttaccaagagcaataaatgaagaggaagaagaaggatgacacattttttttataattttgactgcattcaattaaggtaacttcaacaatcttatgttattaaatgtgaacatctgtccccttaatattataataatagtccatgtctctttctgctgctgttttccaacaatttttcgcagtatcgttttctactccataaactgtacatttactattcgtatatcaagtaccttatgtgacatttttatcatttttagaaaaaattagttcttcttaaagtaatgattcttttctttttctttttggtttgaatcaaaagtacagtacaagtaaccactcgaatgattactctttttttacatattagctgagttttcaatcgacatgataattaaattggagtaggattttggaatggtccatggaccagtgatgatcattaactactgttcacaccaaattttaaaggagaatttcggttacaatttattgccatcgactttggtatcacctcttaaaattataaagtgtaaaactttcttgcatcgaataaatactatttatttgaaataaatgcgtaaatttaaacaagtgagaaattaaaagaagccacaaaatgttttttttcctcagggagaacagagaatatacctaaacccgtgaaaacatcctttattattttgaaaaatcaaattggaaggagtttggaaaataacaatacacgaaataaaagccgtgaaactaacgttccgtggaatcgcgtgatacgatcagtgactatctttttccacgttacctgatttgtcgcatttcaaaatttgtcttacaacattattcgaaaactaaagaaataaacatgaagtcacaaacaaaaaaaataaaatcatcagaaagagaagactttcacagtaagacaactgaaattattattccatgatccaattataagagtcaatggcttttgtctcctttgatacatcataggtcacaaagtcttcaaactattttttccttttatacggtcgaagaatgtttggtcacaagcttacatctattcatgtctcggtcaaggatacaataaaaaaatcccggtttaatccggtatataaccatgacttaaatctcggtttaccgttgagcagatcggtatgcttcttcgtcggagataaccgccggtatgttccatgttcccagcgaatgaccagaaattttcccacctgatcaacttttttcattaagtcaaccaaaaaaaatacagagaatttgattgatgatgttatcttggtaccttctttagtagcttcttcacatcttctttggtaatttgaagacaaatgtggatccagggatttcataatctcttcatacttctcttcagcttccgatatccgcttcgcctgtaaaaaaaccaatgagctctaagacattttcagagaaacgttgatttgactgtcgtattaatgtttctttaccagttcagtgggtgcattcgatgagccgaatattcccacaaacatacgtaatacattgaaattgttctcaagaacatcatcctacaagaaaaccatatcgagttgaaagatcgtgatgacgttagggagttctttgagggtgtatctaacctcgtaatcgaacctgcacaagtaaagttgaaaccattcagattctgaaactttttgtgtttgtttgtgttagatggagaggttttaaaagaagattacagatcatccgctacttcaaccagaaactctgagattgacaagaagtccatatgcaactcattcaccttttccaaataaagaagagaagacatatatcaatacaattacaatctatatgtatcacatactagaagtggattgaatatgacttcacattgtgaataaaacaaggcacgtgagtgtactacctcttctcctctcaacttgtatagtagaagattcaacaccctgtaatcaaaggacttcaaatgaattgctctcatcacatcttcgagacagatctataaagatacagaggaaaccatatgagcaaatgtaaagcaaattcaaacagataacaataaactgaaccagttaccttgtttttgtttgaaagtgcatgacaaagctttctttctaacgcccaatactcttcacccgaattaaactcttgttgtactctaacccatgcaacaaattaataatgatcagtgtatatgtttgtccctttccctaataaaacagtaaggaaaacaaaagttatagcaaggaaatacctgtttgtcaaaagggcctcacgttcaagcagatctccaagcggcttcaacggattagtttcaaacagaactcgtgattcagcattccatccatgacttgaatactgcatctcaaaccattagcttgtacactgaattggtgattcctatactcctaaatatttttacacatgccatcttacaatgacttgggatccacaagctgattcactgactatcttctcattaagagcatccatctacagaaacaaaagacctacatttcttagattcaggtaacattgtcattgttgcagggcacggttactcaaaacaaagaaaatcttacagacacgagggagaaaacaacagaaagacacatattattacctgatatatgtaactctctgtgaatgaaagcacaggtaaatatctgaatattgattgcggttcgttaatatccaaccgatgaaacatgaaataagacctggactgcaacaagatatggacagttatctacacaatccgatcatgttatctattatgattagctaactcaaccattgaagacagagagtatcaatgcatttgtaagaggaaaaacttacgaaatcctcaagtgtagagtttgctctcttcattgcatctagcccgaccattgccacaacttcttggtgcttctgtgacatgtaaggatcaacattgtccatgacactcctcttcacacaactattttggcactctgctgcataaaaattgtaacgatcaagaatactcagaagtcagaattaatcgaagttgtgacatcattatctaatattaaagccacgaagctaaaacgaaagatagtgtatggagagagtagaacctgaaattgtgttaagtggtgtagtagcttcatcgtctagctcaagtgatctcgatatctcttccaggaagggtcctgagatctaaatgtaacgaaacacattgaaagaagagcgatataatcttagttttatagaaaattagttaaagaatctagctttacttactttcggtaagaactcagagagtagacccagtttcgaatctaaatcgagttcgccgcatggttgtaccttgaaagaagaatgaattttagatttttttttttacggagcgtcaaaactgaaaaattcgaaaaacctaaactttatggttaccaggaaaaggactagattggagaggaagcgagaagaagaagctgaatcggaagatgaagaagaaagtaaaccgtgacaagtaatggatgatacaacagtctgaaacttctccagtctctttagctcttccatcaaaaataatgaaactcttttaacagattttgtcacaaaaacgattccgacttatttaaatgaaagttattagtttcacaaaaacgattcgttgttttgtaaaattcaactttcaactaaaaaatctaaaaacaaatggaatttggtcattactacaacattccatcaaaaggtttgcacagacaactatcatattgcataattggtttttggataataccacatttctttagttttttagttttgttttttttcgtcgcaccacatttccttagtttgtggtagaaaatatagactattttagtattaaaatgtttttatgtagttcgataattggaccagacttttgacattgaaatgtttctcatttgacatgttactatagaatcatagttttagtaaattgagaatttaaacatgtttgttttgaaccaagaagtagttggtcacgttagtataaagagaagaactaactactgtacaattctttcttcgacggggattaatattcattctaatttccgatccaagggattatggatcaaagtctagaatcttcgatttatcaagaaggaaaaaaaacatgttttctttaatataacttttagggagaaaacaaaactctacgattgtgaacttaaggagaaaacaaattggaacagtttgtgttttgttttgtgttttgttggattcgttactctccaccgtcgccgccatgtacaattctcaaactctgacttcttggaggcaattcttccaatttgttccaacatcacaaaacaaaacacaaactgttccaatttgttttctcacaaaatgagaagttgacctcgccttaatcgaagatatatgctgagatataaacgtttacttcaagcaagtgcaaccagtcatgagacccaactctataaaaccagtcagcttcgggatcgttttccttgaaaatcctgatgaactaggcagtgatatacctatctacaggtcggcttctttagaaagctgactcttggggcgatctgggaaattgagcctgagttcggctggtcggtttatgtataagaaattaaagttgaaaattgaaccaagataaacctacgttatggattataggaaccaaccattgtcttcacttcatctttttcaacatactgtatgtttttgatttgagtccgacccgaattagtcaagtttcagttttaatgggcttcatcaacaagtttacatatggacttaggcccattttcaaaccaaaaagtacaatacaacaaaagcttctccttgttaactgaaacaaaaacaatgaatccttttttttttggtcaaacactgaatccaacaagtgaaaacaaacaaaaaaggagggaaaaaaaatcaattttatttttgtgtggctgttttaagaattcccaaacaaatggggaagtcaataaaattgcttaagacactccatgagaacatcagtatgttcaggctttccagcagaaactcgaacataacctttaagctcttgactgttgtaatgacgaaccatcacacccattttcgccaaatcctctttcagcttctttgcatccattccagatgtaacctcacagagaatgaaattcgaatagctcggatatggattcaagaaaggaacttcttttaatagcccgaacagtctctctctttcccgtaccaaggcgtctctcacatcttccaagtatttcccgtttgagagtgctgctaaagcagctacttcccctgcaacagagacattgtacggttgctttgctctccacaggtattcgattatactcaacggaaacgctccatatccaactcgaagcccggctaaacctgaaatatcatcagaattcttagatgcagactttatatctgtaatgtttagattatatagagtgataaaccaaaatttaccagctcgtttgctaaatgtgcggagaacgataaggttttcatacttcttcacccatttcatgcgtgattcaactcctgagaattcgatgtaagcttcatctagaacaacaagtattggcatttctagaatcttcaacagatcgtcctcgctgatgatactgtatcaaagagaaactcggattaataatcatgacggactactaaaaagaatttttcctttcgagttgtttagagtggtggtgttttacctcccatctggattgttgggagaagttaggaatatgcatttgggtttttctagttctacaacttcagcgatgcggtctacattcaagctgaaatcggggtttcttggaactgtgaaacaaacaaagaccaacatgtttaagactatacattcagagagagagagagaagcaaaatcgaagagaatgaaacacatgaaaatcgtaaatctttcacctttaatgacacctgctccattcacagccgcatcaaacacatacattgagaaagttggaggacaatctataatcttctccccaggatctaacacgcatctgcaagaaacagagttttagtcagaaaatacgattctggtagaagctcaattgactgaaaaatcaaatcttgaagccatacctcatgatcaaatcaataagttcgtcagcaccacagcctacaagtatgtattcagactccaaaccagagtcttgagccagtgcatcacgaagtctacgactttgtggatcaggataaacgtaagggaatttcatattgcctaatgcttcaaaaacctacacagagcttctgaaacctgaagttagagaggacaactaactaactaacaaaattatcctttttccagtcatcaacatatctatgaatgagtgaaagaaagatatagacttgcctctggaggaggaccatatgggttctcattagcatctaacttgacaatatcctcaggctttcttcctaattgagcagacaatacctaattacaaacaaacatacacattttagaagataaatccaatccaacccaatccaatcatctataattgtcaaaaaataaattcaatgcaatctaaatatcacctcaaagggtaaaattggctgataagcagccaattgtctcaaatgtggacggataaaagagtctcccatagttatattcttggattcgtctacagctgcacttgaagactgagcacaataaaccctattccggattgagcaaaagggtttcttcaaagctcgagactttcgaagatttgactctgaagaatgaatagagaacgatggagagccctgaacattgatcacacccatcagttttcgtgtctgcgcatatcaaaggtggaatcagttcaatctagaggaaacatctgatgcacatactcaatttcacatcttattgacaagtaatacctgaaagttgacaggaagaggggcaaatggagataaccctaagtagacgagaagggtcgtgagcagggagactaaagtgactgagatcagtcaaaagcttcggtttttctatgactcacttgcgattcgtggacaaaggtgagccttttttttattctgagtgactgagaattggcgtaccaatttaggggttatccgaaattgaatccaaaacccggttctgaagaatcgggtcgatagtgagagtaggtaagaaagtcttccaagtgtagtgttaaataaaaaagtctactcttgacgaggtgaagacgtgagagtaggtcagatcgatttcccggcgatctaaaaggaaccaggagccgatctgcacatcggtgacgaggtgaagacgtgaagcctatgggaatgtgatacaggattcacgtggtgagctggtgatctggcgagctggcaatgtgaagtcagggatgttaagcaaagtacgtgttgtgagctggcgagctggcaatacaaatggacgttaacggcgatcgttattaacgtggttaacgtttactttctttacctttttgtataagagcaacatgttatgctcatgctttcattatcgaataatctgtaatcttcagaattctctagaaccttgtaagtgctagatttctctcacatcgagagctagctgaatcatttggtgttttatgaacatcgattgattgtttggttttgaatgataattagagatttggattgttcttatgaatagcaggttttcctgtaacagaatgttggtggaatcgtcctggaaacgacgatggacgtaaaaatcggtcacaaaggtggctgatctgatagccgcagacatgcatctttgggctacagccaggacgtgcttgtcgcagaaaaacagtaataactcttgttaaacgtaatcaattgaggcaaggatgaatccgttagaaagataagccttgtagcttcaaaatgatgtgcagatcggctcctggttccttttagatcgccgggaaatcgatctgaaagcagacagatcgggtgtagacggatctgtgtctcgataaacaacgcatgctcgagagaaaaacctataactctcggaagacagcaccaaatggagcaaaatcgatcttgttggaaagataagcctcagagcttcatgatgatattaagatgggctcttgatgttttctgaatcgttgggagtttgctttctaatccagttgctcccacagttcgaatctgcgatttgacaggtgtcatatgtttcattgaaagtgataacgcttagtaaacagctcggaattggatgaggtcggtctctattgaaagaagcctcggggctcagttgatacttagatcgcctcgtgatgccctttagatcgccgggaatttgattccgaggtcaacagatcggatatagatcgatctgtattttgtcactgtcttctgcagataaacggcagtatctccgagaaaacagaccctaacgaagtgagctcgggcttgttaaaaagaggagcctcagggctttaaattgatctgtagatcgtctcctgagtctctctagatcactgggaaattgagcccgagttcggctggtcggatagagacgaatctgcgcttgaaagaaacgccaatatcgcttggaagattgcttcgattggatctaggttagattcgttggaaagataaagctcagggcttcaaatcgacacgtagattgactcctatctctctttaactcgccgggaaactctcttccaagtcaaccgttttgacaactgaatctctgacctagaggcttatcagtagaaaatcagcgatattcatcgaaagaattcacctatagagatgagataggtctctataaaactcgaagctttccgttgtcgcgtagattgtatcttgtttctttccaggtcgcttggagtttgattcgtaagttggctgttccgacagctgcggatttgtcagggaaattgtgtcaagtgcaaagaagccgacctgtagataggtatatcactgcctagttcatcaggattttcaaggaaaacgatcccgaagctgactggttttatagagttgggtctcatgactggttgcacttgcttgaggtaaacgtttatatctcagcatatatcttcgattaaggcgaggtcaacttctccgaaaagacgactctctgggcgatccgtagatgtattaacccttacgagattccctgtgatttgtcgggaaatcggccccgtggtgagctggattattcagacggattcgtagttctaaagatcgcatcttctggatagaagcagggataacattcgatagacagctctgatggaagtgaggtcagcttctagggacacctgactcgctggaaaatccatagatgtgctactagtttcgagaatcg

SEQ ID NO: 1417 - DNA, 113053 bp, Arabidopsis thaliana
gaattcatatgtaaaaatcagtgttgttcaaaaagtgtctcaagttatttgcatgaaattgcagaaaacaaaatattatgttttcatgttttgcattgtagaatgtttcgtatcacttgtcttaactttgatcttgtagagagattttatcttaactttgacctccactctttttgtactgagtttattaccttacgaagattatatagtgtcatcaactcatcatagtctacagaattactgcaaataaaaagacttatttttaagaagaaagatttattgtgttaaacacaaaaaaaaatggataaattgaattacacaataaaatttgattcgaattttgcatgatctattttaggatatttcctgatactgtattgcagacaaaacttgggacgacttgatttatagtgaacaagtaaaactcgtacaacaacagagaatgtttatgagtcttggataatccgagtaactttgcccatagcaacagttcttcccgatgatctaaggaacactcttccaagagctctactctcagaaaatgtctccacacatactggattttggagactaacctgcagttacaaccaaaaattgtcagatcgaatccgctgttgtaataatttataatttacctcataaggcaaagaatttttcaaacctcaagcattgcgctctgtttagcagttagacaacgaggagacttctttgttggctgccctgttttgggatcaagcattgccacaagtttcacaactgttgctgcttcctttgcatgatgcacatgaaactccaactacaatgattgaatttcaatgaaaagaatcagaaaacatggaacggattatggagaatcgagcaagagggaacaagggcccttttttttgtttttggttttacctgagaaccgagcaagatcggtgttgcgccttccaagacgagcaccatcaattccaaatgagttgctactgatacagggaaatcaggatggcacaatacatctcctgccattacttgatttgcatcgatcccttgcaacgctaacgctacgttatctccagctcttgcaatggtgcaagcctgagagtcacgctctagtgatcgtatggttccttgatctcctgatggcataaccattacctagcagaaagttccagtaatttaagtaatcagttgaagcagtttcatttgtttcattaaacaagagaacagcaagaaaataatttgatcgaaagctactgataacaaagggaatttaatactgtgaaaccttccaacacccaaacagatattgtaaacaatatagtaattgtgggcatttgatgttaaaagttcaatcatgggtttaggtcgagcgactcagatatgggatgggaatggaaaggtaaaatcaccagaaaagcgtatcctaaggttaattcaggtagacagatataaaatcatcaatcacgcaaccaaacgagaagaaaacttcccatagtgaaatttgtaccttagatcctggccggacagctccagcttcaagtttgccacatgcagatacctgcccttgcgaagttgatcttacagcgtcacatataggcatgagtagaggctttgagacgtctctatcaggagacttgacagagtcgacggcatccaataaacatggaccttgatacctgaattagcaaaaaattaaaccatttcatggcctatttcgagcatgctaagtaaattaccagctatctgtaccagaaatgccagttcagaaaggaaaacaggagcataccatgaggataggcggttatcagagggagctgccaccaagttttggttttccatggcacttaatggaatccatgtcagagaagaatccttaaaacgacaggattgcaaaaaagatccaacgtgctgcttaatcaaatcaaatctttcctttgagtagccaacaatatccattttgttgattgcaactatgacttgctccacgccaaaacctctcagaacccgtgcatgctcccttgtctgccctttcaaattatcaaaaccagcttcaaaagcaccaacagatgcatctatgacaagaatcgcagcatctgcttgtgttgctcctgctatcatgtttggaacaaaatctttgtgtccaggagagtcgagcaaaacaacatgatgtcttttggaattgaaataagcaacagccacagtcattgttattcctcgttccctctcttcagcactctcatccaatgcccaggcatatgcaaaggaccctttgccctgatcagatcagaaagacaatgtcaagcaagcatagcagaatattgaaaattcaagtacctaagatccaaacaaaacaacaagttacctgcaactttgcttctttctcatacttgtgcatttgcttctgcgatattcttcccaaaagatgcaataatctacccgaaagtgtagacttaccggaatcaacatgccccacctataatcagattgcaaccatcagtaatctgcctggacaaaaatcaataaatagtcgccagtcgttgaagaaactcacgatggcaagattaagctggcttagtgcatctgattctttatcaagaagcatccactcctctggcttatgcttagattgtgattttggtcctctaattttaatatcgctagagttttctgtttccccaatcaaagacatcttgttcatagtaccagtaagactctccgacgtctccatatatttagaggacgaacttgtctcattagacatatctgcttttgcttttggcaaacttttgcctgattttatgccgccagcaccgcccttatcatcaagtttatcatgtctacctcgggagcttgtttctgaactatctcctcctttctttaaaggtttctgttctacgctatcttgcttctccttctgtctcatgctagcatcacctgagcctatagagttaagaacccaattcaaaaacgaaaaccttttatcaaaaatttgaaacagaacagagtaaaaacgcccaaagagaataacttggatgaaattcacaaacaaattttagccatattaataagaaaaataacccaaaaatacaaaggaacgaaacaaaaaaagagaaatcctattgcaataagtaattgaactataaatcctagttagactaggacttgaggtaatgtttccttttctctatgtcactacgtgaatagactacccaaggcgtcattggatccatatcaatataagttaatccgtactttatcattacagcatcaaactcaaagtgaaaaccaagtgtgtataccttttggaccagtttttgaggatgttagtccattggagactaaatcatctggcgatggagcatcaaacttgaaaggtgctacataagttgaaaaggaactgtcagaataacgcctttgcaacaccacaattgcaaagagactcacaacacgaacagcttgccatgataagtgaaaaaacagaaaactctatcaaactacagcaagttgacaacctatactaacgcaggaatttttagaactaaaggccttgtaaagatcatgaatattcccacgggaaattccaggcagaggtccctgttccatcacaagattcgtgtgttcaggcagacaaagaacagctcttttcggtttattagatgggactgatccgaaaagggactttgccaatttggataccacaggttctttgcatctgctctcaactgcataaaacacatctattctacaattaaacacctagaataccaaaatcatcacaagtgtaaaaaccacagtcactgctttttcttaacataaatcaatagcttgatcaagtgacctcagaaaaacaaaacagataggatgcaataattcgtgtatcctatgcagaggcaaagagagattgcctaaaataaagtctcactaatacagattggaggagaaaagatatagtacctgtattcttattgatactttgatttccggcgacaggatgacgaagaacaccgcagatatcacacacaaacatagtctcaacattgtcatatgtacagatagcacatcgccaaagcccttgcgttttagcaatttcttcctttggttcagcagcagcttcttcttctgtagtttaagaaaacaggaaatcaaatcataaaccaagttaaagagagaccattaaccaccagaagaaaagtaatgggaagatgtttataccatgttcatctatatcaacatcatagtcataatcaaaagcatcgtcatcatcatcaaaaccatcatcataatcatcgaaattggataatcctttacgaggcatcgtttgtttctgcgcacaagggcaaacaaaaaaacagagattgtatgtaagttaagtttcaattctgtataaaaaaacacaacacatatatagttaagataataaaaccgacataactcagaagcaaaagctcctacacttgtcggacttaaacccacaaaaccgacagtgatcagaagcaatgagtaacaaagagagaattcagacatctttctgaagcattttacgaacggtgatattgaaaatccaattccaaattcattaactttgagcttaacaaagaatattgatccaaacacttacagaaactagttacagagcagaattgatttacgaaagacgttccttcgaatccaacttctccgcctgtaaatttagctttgagtttgaggtaattcgtcgcctgttgatgccgacgatatgaaggcttcggatctggatttggatccggattcgggtttcggttggatagagtaagaatatggaaaacacacaacaaaaccgtaaataataactaatgaaattgttgggcttttaacgggcctatatctgatatttccaggatccgaaaaatcttctctttttttttccgccaggatccgaaaaatcaaagagacaaaatctgatggaaaatagttttggtataaacaattaacatatgttttggatcgttaataatggtaatgtttgaagttgtagttttgtactcaaaacaaacttcacttctttttttctttttcttttttttttaacaaatttgacttcacttacatatatataacgaaaatataactctttctcaccaacggagtaaatggaaaatagtttaaagccaaaagaaacacaattcttacatcgatcaccatgcaccacacttacaaagctacaaacaaccaaaaaattaacaacatttttaagtaatgtgccaccttttgcaacactactatcttgtcccatacaagcctcacaaaagtatgaaaaataaagaagcatgcacatgctacaaacttggagaaccagttaaaaccaaacaaacagttaaaaatttaaaacacacatatcaacaaataaacacaatctaactaagtgatgataatccaatagtcatcgcttcctttctcgaattcaaacagctgcacacatcttctcttctacctttacgtgattcatattcacactgctccaattttgaaattataggttttatgtctggaatataatttcccggttgaacaaaagaaacacaaactagacctcttggtcgagggtaattaattccgtgtggatttcaattgaaatcgcggacgtggaaggaattagggttcttgacaacgatgtcgtacatgtaaacggagttgaacttggagaagtctcttggtaaggagatgaggtcgatggaggagcgtttgtggtactggatgagatcggagtctccactgaagtatctttcccacccgaggctccttaggatttgttcgagcgacgagtaagatgagacggcttcaccggtcggcaagtaaaccaagacatttctccggccgtgcgactgtgtggaaactccaccggactggttcgggttctccactagacgtatcactccgttattgaacacccaaactcctgacatggcctcacaaaatgagtcttgttatgtatatagaaagagagagatcgatatttgtaaggggtctcgagcgattgctttggtgtttacttatgaattatgagagagtttgtgtgcgggctctgtatttatagccatgaggaggtgactatctcctttaacattaaataaaaaaacgttttttggatatgagtcatgagatagattttttcacagccgccttttcatgcgtgaagtggaacagttgcctcaatacttcaaaaaaaaattaaaaaattgcacaagacctccaattttaagtagagcacttagttattttcgtaatacaaatttaaatggggagttaaatatcttttcaattagattgcaatgtttcttttagacaaagtgtggattcacaagacagagaaatatcatttgtttggattaaatatgttacatatatagaacaataattatataagatatgataggtgataacgttttgacggggcacatcctccgtgctaaaaacattatagaaatcattgctaaagtatcactagtttatttggtttatattctcgagagtgacctaaaatttttaaaacaatgaatgggggattgggagaacatagaaagccgacacactggaataaatatatataaaaaatctgtctccgtcgtatggagaatctagatattgtgggtcatgcttaccattcctcaattcttctcgatctatttatcttaaaacaaaaaaaaattgatttacgataggttctctttttgttaatggttgatcttgcatctataataaaactttacaaaaagggctttcttttattttcctttcatatatagttttaagccttttcttactataacacctaagaaaatgtattttaacctctctttttttttaactttgttataacaaaaatgtatttaaactttaaagttgtctattatttttcagaatgaatggtgaaaattctatagatgctcagtagcttacgagtaattgatagtttagggtaatagtattaccgtaatactattaccgtaatactatatatgcatatgtacgaaagaaaccttatttttaggctaattctaacaagtttagatccatatttctcagcatttttagcaaaaaattcagcatacaaaacacatggaaaggagccttagtggtgggggctaattcatttccgaatagcatatgggagaatcacgtatttaattgtctacgagactattctccatcaactgataactattacttttcgattaataataataattagttatccgaggctagtcgacgtagttatttttcaccaaaaatattattctagccagccaattttcgattttattagtacataccgagagagcttaatacgtcactgaccgaatcatgcattcttaaatcttattattgaagacatcgttttcatatattaaagaaaaattcgtattctgattacataagtagtaaaacggaatatgtactctagttaacgtctcgttcaaggaacggagtgttttatttcaagatgaatggaattagtacagcaagccgaccacgagttcgaacaaactttgtgtacgtatcgatcatttgcattttacatactgattctagaatcgtattagtttgactcataatcaagacacctaaaaactcaatatatacatatataaaattttatttcagataaaattggttcactttataaatattcgggcagtgtaaatatatttgattcaggtactaatattaacgtaaaaagataaaaaaagatgcatggatgggcaaatgagtgtagagatgccaagagttgtttaatacggaattagaactaattaaaggtatgtagattgggggaatatatacaaaagaagacgcatatttttgttccatgcttattataaagttttaaaatgtgttgaatgaaaaaaaaaaagaacatcactaaactatataaaaattgatctggtggtaggggatgcattgttcggaataataaatgattatctgataattaacaaagtctgacgttgtcttttcatgccttcttcggacacaaatgtaatcagtagattagtacataaatcgaatcatttagttttattagcaaatagggaaaagtaattttttcatagacgctataaatgggctacgatgattgtatagttaggcccataatttgatattgtaagcattgggccttagaccctcgatatcaaccggaggcttcgaatctcatgtagtcatgtggattagcgtaaacacggttaatgaaaatttttggtgaactttgaagaacacaaaaatgtccatctctgtcatggccaattctcacctgaatcagccatatgcatctgcttctcctactcctcaggaaaaaggtttctttttcatttaaaaattggttttggtttttgttgctttcgaacgcaatgctgaagattgtgtttggtcatctggttcgtgacttgtatcaggaagaacttgtagatacgcgggtcaagcagtggtaactaaaaacaatctctgctcgagcttatttgaatttgggcatttgggtttgatggaattgtcactttggttcacagagagctcttcctatacgagtaataacagtggggaaaaagagatcagaaggtgttcgactcttggtcgatgaatacaaaatcaagcttaaaccttactgttcctttgaagattcattggttcgctccaatcctcgaaatgctcagtacgtttccttgaatttgacagacccaactcaggaaattttattgttggtagctttctctggaaaccaatagtttttttattcacagggatgttagagctcaggtcgaggatgaagaagtggctatgatgaagcttattgggtctgatgattgggtattaatagtaacctccttagatttagtcaatgtgattgattattctagatgggtccatctgatttgtgagattttaggttgtggtgcttgacgagagaggccgcgacattgattcagagcagatggctgagttacttggggatgcaggaaacagtgtaagcttgttagtcttcaagtaaagtaatcaaattgattgtatgtaatgacttgttgggtttgaatctagtctcatcttggagaaactgtctttatgattgataagcttaagatggtcactcagccttagtgtggctatatctgttttcagggagcttcgcggatctcgttttgtataggtggagcttacggacatggaacgcaagtgaggaagcgagctaatgtgaccattagactttcctccatggtcctgaatcatcagatagctcttgtggtgctcatggaacagctttacaggtgaaaccattgtttcttctgttcctgcattccagttacatttttatatgttgtaataggttttctgttttcaggtcatggactattctcaagggacaaaattaccatcactgatgaggcatgaatctctactttttgggatttcttttgctctatcgtgtacaaagaaactgcattgctaaaaagcttctctgctggtagttgtatgagaaattgtttattgtacgacgtatgtttgcaatccaaatttgtttgcttctgatctagtttagattccggtcatcgagtgggacttctgtttttgtttgttgcatcaattgtttttgtcaaataaggattaaatgaatgcgaaagcaatgatccttctccatatctagtggaatgtgtatgatccccttcgtggtaaggctaagaaagatcgaaaaactaaagaacaaagatcttgattccattagttaggtaattttttgtgatttatgatcattcgccctccttattattgatgtgtatacataaaaagcatcctctaaatcaaatttcttggctaacacagatgacactagagctgagacaagataggaaccatttcagaccatggcttcggcaatgcgacaagcggctcagccttagccattgccacaccaaacacgggcctcatgtctatatctcctgcttctaccttctcccactcaaaacactgaaccaatgctccaacagcaagcgacactaccctcattccaagtccagctgcaggacacgcccgcctcccaactccaaatggcagaaacctaaaaccatctctatcgccaacaaacccttcaaatctctccggcttgaaaacattggcttcttcccaaagctcaccgtccctatgaacagcccaagcattcaccaataacattatgttttctggaatctcgtagttgcctaagttgaatctcttggatgagcagtgaggaagcaagagtggagctgcagggtatagcctaagcgtctcatagatgacacatcgaagataaggtaagctcgagagatccgagtcttgtataagccctttgtgtttaacattagatttgatttcttctctgagcttctcaagcttatctggatggtttagtaaaagtgacactgcccattccattgccacaggtgatgtatccgttccgccattgaacattagcactatgattcctttgataacatcatctgcgtaaaattcaggttctgattcttgaagcttcaagaatttctctactacggaaccagaggaatcaatgttcttcattcgaatatcatcaatgagtcgctgaagatactcatctctcattctctgcatatcaatcactctcttctccaaacctttgtacccaatccacctcaacactggaaaatagtcgcagacattcatcgacatgctcgagaaaaacctcaatttaaaatcatccaagaacctcttctctgattcgggatcgctctttttgaccccacgcttcccagatactaatctaagcatgatatgagccgtgagaagagtgaattgatacttgagatccactatccgagagtcacgggataatctgaagataatcaaacagaggttggagacttcctcgtttcggatggaagagttcttctgcaggctagcggaggagaagacctcgagagtggagagacgacggagagttcgccagaggtcaccgtaaggagcaaatccaaagtttttatagccgtagctgaagtgatcggaggtgatggtcttgggacgattcgcgagggttacgtcgtgattggtgaagcattcttcgatggaatctggagaagagagagtcaaaacgttacggcatccaaatttgaggaacagaaccgggccgtagtttgaagagagatgacgtagagcttgtggtaaaggatacttcttgatgaggtgaagatggccgatgatagggagaggcgtagggcttggaggtaatttagaatttagactccacaggaacttcttggtgatgaagaagattaaagtagctgtgaggaaggagaagaagatgaaccagaggtcttccattttccttttttggtcaatctcgtgattcaatcggaagagagaaaaacaatcatcatttactattccatttttttccgtaaaataaaaataaaaaaacatgcgttgactaaaattgttttggtctcaagctctcaacaggaaatcaactaaaaacttcgatgtctattgtgtggctatctctattttcagggagcttcacggatatcgttttgtataaaggtgtagcttatggacatggaagacaactgaggaagcgagctaatgtggccattagactttcctccatggtcctgaatcatcatatagctcttgtggtactgatggaatagctttacaggtgaaaccattgttccttctggtcatggactattctcaagggacaaaattaccatcattgatgatgtatgaaactgtattgctaaaaagcttctttgctggtagttgtatgagaaactgttactgtaagtcgaaagtttgcaaccaaaatttgcttccttctgatccagtctagatttgggtcgtcgagtcgcccatcatggtctaaggctaattcagaatcttctctgtttcttgcaggtctggttctaagaaaggaagaaaaatgaagcacaaagatttggataccattatataatttaggtaaccatttgtgcttttatgatcattcattcgccttattatcaatatttatatgtaaaaaccatcctctaaatcaactctcttggccaacacagaggagactagagctgagacaagataggaaccatttctgggcatggcttaagcaatgcaataagcggctcagccctatccattgccacactgaacgcaggcctcatgtctatgtcttctttttctaccttctcccactcaaaacattgaaccaatgctccaacagcaagcgacactaccctcattgcaagtccagctgcagggcacgcccgcctcccaactccaaatggcaaaaacctaaaaccatctctatcgccaacaaactcttcaaatctctccggcttgaaaacatctgcttcttcccaaagctcaccgtccctatgaacagcccaagcattcaccaacaacactgtattttcagggatctcgtagttgcctaagttgaatctcttggatgaacagtgaggaggcaagataggagctgcagggtgtagcctaagcgtctcatagatgacacatcgaagataaggtaagcttgagagatccgagtcttgtataatccctttgtgtttaacattagatttgatttcttctctgaccttgtcaagcttatctggatggttcagtaaaagcgccattgcccattccattgtcaccggtgaagtatccgatccggcgttgaacattaacactacaattcctttgataacatcatcagagtaaaattcaggttctgattcttgaagcttcaagaatttctccactactgaaccagtggaatcaaacttcttcattcgaatatcatcaatgagtcgctgaagatactcatctctcatcctctgtatctcaatcactctgttctcaagacctttgtacccaatccatctcaacactgggaaatagtcacagacattcatcgacgataggctcgagaaaaaccttgatttgaattcatctaagaacttcgtctctgattctgaatcactctcattgaccccgcgatttccagatactaatctaagcatgacgtgagcggtgagaagagtgaattgatacctgagatccactttacaagaattaccaccggagaatctgaagagactcgaacagagattggagacttcttcagttcgtatggaagagttcttctgtaagctgacggaggagaagacttcgagagtggagagacgacggagagtccgccagagatcgccataaggagcaaatccaaagtttttgtagccgtagctgaagtgatcggaggtaatggtcttgggacgattcgcaagggctatgtcgtgattggtgaagcattcttcgatggaatctggagaagagaggatcaaaacttcacggcatccgaatttgaggaacagaaccgggccgtagtttgaagagagatgatgtagagcttgtggtaaaggatacttattgatgagatgaagatgaccgatgatcggaagtggagtaggacttggaggtagtttagggttttgactccataggaacttggtgatgaagaaggtcaaagtagctgtgagcaagaagatgacccagagattttccattttcctttttgagtcaatctcgtaaactatcagaagaagaaaaaacatcatttaaatcacttttgttccatttttttccgttaaaaaaaacaaaactttccgttgaccaaaccgtttaactccgttagttaccgttaaaaattttgtctattctaaaatagagtcgtttttctcttatcaatcttgtgttaatgatttataaattcttgtggatttagtttttatataaataagacaatttaatttatttatttatgtcaatcaagacaatttaagttaatccctagttatcatggaaatccatatcaaaataattatgattatgaggattttcaaataactatggtttagctaaaattgtcttatttatattataaaaaaagaaaactaaatcccaagaatttataaaatctatgttttttcaaaatcattaacacaagattgatatgtgttagttaccaaatattaaagttactgaatattaaactattgatatcaaaatttcttttttaaaaacttaatctttcatatttttctaattaaaagtcattactaatttctctaaacaaaattggaccctatttaagaaacattggtatcctatttcacatttatttatttatttttgtcttcttcttttttaatcttgggtattctttgtctttgtgttataactctgcatcattcaattttttcggtgaaagatgttttttttagggttccgcttcttcgccctagttctggtgctggtcttgcttttagcaagagaaactctatcttccagtgtcaattatccatcctctatggtcatgtggcaaaatttaccggtagagaccgttgttgcatcatatctgcaaatagctgtcacaataaattctacagcaggtaattattagtcgaacttgtctctcttcttctttttaaatctagtatatgctttcttttattttgtatatatatatattgaaaacttggatttctttctaaaaggttctcaaaagtttcgtgcaagactacataaaaatactgattctcctaaagaaacacacacatcgaaaagatacaattttcctttggaattcaggtataaatctcacgttttttctttaatttgattttatttatatatgtgatatgtctaccggttgatttgttgcatttaaaagacacatgttctcctgttgaatcaacttatggttcattgatgataatataaaatgcaacaggaagaacaattttgtagctcttgaaaatggaaacaaagctacatttgattgccaagtggaacttccatttatagggtatgcatgattcttacctttacatttttgcagtgaacaaatgtatatatatgcatgatcttgctttaatttgactctcatgaatatatgttatattgaagagccatggatagagcttgacacaggcaatatctactgcattttcttcccatactcaaaaaacattgaacctcctcatcatgctttagtactcaaagaagctcctcatgtttcgtcaccttcatttgcacttcttctcggaaggctttctgtgtcaggaacaagaaaagtattgtcttgttttatttttgtatttatgaaaagtataaaagtgaatgatcactcggagttaattcttacaagtaatttatggtgcagatgatgaacataacttcggaggttagcaacgtcatcatatccatacttgaaaactccggtaatctacttgtatattcaaatatatctatttacgcttttgtgaattcgtgtttattagaaaattatgcctaggtgatagctatttaaaatgatggatactatttcagatgttcaaattcactggcgcaaaaaagattacttatcgatgagcttgttggatgattttggtattgcagagactacggtgagtgaattccttacttgaaaagttgaaaccttgcttgtgaagtagttaaggtaacgcatatatatatatataccgttgtttatgaccaggttaaggaacatagcgtaaacgatcaaataattgtcacactctcagcagatcatcgcgtaagaatgattatccgttatgaaatggatgaatcgcatataccaatgatcaaaaacttggtgatccgcgctttcttcattggatcccaataatcatcaatataataatgtctgttataattattaaagccgctgatagggctaatataaaggaaaaagacacgaccaattcagatgagtatcactccattgacttgaaaacgagtatctgtgccattaaaaaattgacatttgaattagaaaaaataatagacgaatcaagtgtaagggactaaggatggtcgcatcattgttacttgttagcagcatagtaataaaaaattttataaaaaagatagttttgttaattaatttccattttgactatccatggaacttttactaattatatatagcagatcatgaatatcttcaccaggaaaaaaaattaaaaattaaaaaaagactcggatctagtacattttttttttggtaagctttgaaaagagtaaatcgaaagactttttagactagtaaatcagtaataacaaacagctttatcattattcgaattcaacatcaacagataattaaggcgagaagttgtcatcacaacctccattgcaatcgactttacccttctccttattgctcaacaaaaacacgaagtcgaggttataaagaacagggattatcaaagcagagctcaagaacacaagcacaggcccaaagatccatagcatcaaaggcaagcccatgtagaacagcctattacctaccgtattgagcaagaaagctttctcgagtagttcagagacatactcgggagtcacaaagcttcctatttcgccgaaatcatcagaaaaaggttcttgaggagcgttaataaggatgttgacttggttgatgaagcgaatggagagagaatgagagaagaaggcgaagaggaagattgtgaggatggttacgtatttgagtgcaacagtgaagtcaccatgagctccatatacggcgtcgtttaaaggtttcttgatgctataagtactgcttaaaacggcagcgagacctgcgcagaggaggatgcaagtggttgccattaacgtccctcccattatcgtgtttcgtagtgtttgtaccgctaagatgttcttcttctcgttgtcctgaacaaagacacagtatattgttactatttgagaagtaattctatgtatatactgtgtacatatatatgaagaaagttaatgatgtatacatagagatattatgacattgtatggatttatagtctcttattggccaaatatgcatgcaaatttatttattttgtattcatacggacttaataaaattttgggccgacacctatactaagtttttgcataagcaattttcatagaaaaattgcagttagtaaacattatggtatatatgttcaatgaagctaattactttcgctaatatgatgattaattagtaattactacttactagttactacaatcacttaacacaagatttttgaaagattatttcgggatatatatcgtttttgagtaatataactaccttcatgatggctgctacccaagatcgacgggcgcgggaatttgtaccaacaatggtgcagaaaggatcggttcgaaccttataccacaaatagatgtggtaaccaaacatcataagtaaagcacttggcacaagaaccgcatctaagtaccatttctcccactccatttgatctctccttttctatgtatataatcttctctttctttcttgttctcgttatctccaaagctctctaagaatgtttttgttatttttatggcccttgtccccatatatttatactgaaactccttttgctatttacaatctttgttccgcaatttgccccttagaatttcatataaattctttttggttggttttcactaatttcatataaattaaatcttaatgcttttcgtttctcctttaaatctctctttatgacttattagtgttcacttctgtaccccactttgtgagataatttagaatttacatttcgaccccatatttatttagttactaaacatttggccgtaatttaaattaaggttaatgaccacttgtccccttttagacacatttttttgaattttgtcccacattgcctgtatattcgtacatgtgatatctaattgtccgtatatgtagataaaggagacaagacttagattagatggttttggaacatgtcacagagatgataacagaatataacgtttgttttttggtaaaaggtgaaattaagaaatataacgtttgttgtagacgatgatgctatgtacacatgttacactatgacctaacttatctccacgtcattacgttactagtcttcttcagtctagtgcatttcttattttcttttattttttggcatacaaaaagacatcccaagtcgaaaatgttcatcgctgaatatcaaacatcaattttcgtatttattgctcactgatgattttacatcgactatggttttaatcatgatcatctaaaggaaacgggtttactcgagcataaaatttggtcatttctccttaggatcctagatctcgatcgatcgtggaataggtgcactaatatttttttaataaaactaatgacaaaaatgattaaatgaaagaaattaaagtaacttttaaagtttcttgaacatgagtcagacccaattggctaaaggttggttcatttcttgtagttaaagaaaaatcgtgcttgttgagattaaacaccctttgtcctttctacatatacgactacttttataccttttgctcacactatttttatgaagataacataatatacattaaatatctacggactctacaaatagagatgcgttaacatgcaaattctctataaaatatgtgcatgctttataccaaacacataatagttataaatatgttgagctgagagatatggacaaaaccacttgagtttcaggtttagccttaaaaggttttaaaaaccaaggagccgtaacgaagtgtctaaaaaccctatctgatttttgaataagacagatcaaaaacgtagttggaagcgtaattaattagaaaccgattgtaaatttgaatctctaagagttcaattcaacatctatgtatacatgcagtttattcgagtttggtctagtgattttatttgggctgcggaaaacttttgccaaaatacgcatcacaatttataaaacatgtgcatgcttattcgaataaagaaagtaacctacatgacccccaaaaattcagggaatgttccaataaatcttgatgattcttcttgataaaattgtagtatattttagtactagaaaactaggcacccatttttaaaacctggccagaatagatgctcatggatagctaggcctactcatggagaaacaaattataagattgtggaatagtagtattgaactatcttgtaattttccatgtgataaaatacctaactgtatttctaaatgggtgtagtttttgtgattcatgcatgaatcgacttatctatcggatgcttatagtatatatattccgcacgctatatctgacgttttacttttaaagttatacaactctatttaataatccaccaagtacatacattccttaaaccagaatatatatatgtacatacaattcatcatttcatttgttttgtttttaattaagactctcagaatttaactcttgagtattacaacacggtcatgcttgttgttgaaattttcttttatatataattttggtaaaagaaattaatatacaatatttttgttgacgatactaacaaacaaaattagaccccagtcaagtttatagtctaattaataatgaaattgaataagtttcttatcgtgccaatacttaaatttaacacatacgtaattaaatacagtatctgcactataagaaaaaacaacaattaaaaacagtattcacggcctaaaccaatcgtttaaagatttgtcttctttggggacaaagaaaaagagagagagagggtggtggcttcgtgcgacccaataactaactaacaacaacactacggcaaagaaatgaagcactcacatgtcttaatcttttacacgattgctttaattatgatttattaacttattaaacagctcatcttatatgagtataataacaaataaggaagctctcgtcagcaaatagaaattgtgaggtccacattcgaccatatattttagtgtataaacttcgaaacctaacctactcgcacaaacctctagtgctctaacctacccatatttttcctttttagttaattgtgcatactttttgggttcaccgttcattttaatagaaaaataattacatttttgtcttaagattgatttgtttctatatgattattcacctgcttgcttacagattactattaaaaattctattttacatttgtatatgtaagatgtgattatttttattttgtcggcgtaaagaagtgatttaagatttgtgtgttaaaaatgaagacgaatgaaagagtcctgttttatctgctattttgatctggtttctcgtttataatatttttaaatcagaataaatagttacaaaaacaaaaacaaattgtgtctttattataaagttatgttttaaacttaaaataaaaatttcttttgataagtggacaaaattttaaaacttgttttttttctaccaaatgaattaaggttttcagtggcggtgtctttataaaaaaaaactttatcttattttctttttagtctacagtctttacctttttttattatatgagttttgtattattttaagtttgaatggtgacaataaaactttattcaaaatttacgcataaccatatcaaactatcaaactatgttttataaaccattaaacatatagaatataggataagttaggtataaaaacaaattttggatcaaaataaatcctctgataatcttattatgttcaagaattacaacgactgcggttagacctataaagtccattaatcttttttcatgtcgagtgacccatcactagaaaggcttgaaatgggcctatgtgtaatcaacccttatgtaatttcttttttttataggaatcaagggaaaataaaatttctttttttataacataacacgacgttcttacagaaatttgtcccttttgaaagatcttattttcataacacaatcgcctggtatgttatgtaggattgtgcagatacattagatattttcctctaattagtaaaatagacatgtcatatccattaatataatttttcatgtccagtagaccaatgacaataactatagacggtagaaatgggcctaggtgcaatcgaaacccttcttctttaggaatccgaaataaaccggacgaaacacaatcagacaagatctggtttctgtaaacacatcagaattgggacggataaagtggaatagccatatagattgaaagaatgtgcttaagactactagaccagcttcaaagacgataaaatctcagcaagtctgaagagcagaagcataatttgatctaggagcagttaaacacctctcatgtcattgttttattaacaagtaggttgcctgaatcaccgctcccattacgaatcatatcataatcattcataaaatcaaataaaaacaagcagagattaaaacatgtgagaactatctcagcgtccaatatcgagggaatcgatttcggacagaactgagatagatctccgattgtggtcttttttatttagggcgctgcattcatctctatggcatcgttattttgctaaagagtcaaactccagtcccgattgacattaaaaaaaccaccaaaacacataaaccataaaaacaaatcgcaagaaaaaaaattagcacagagatctatcgaactatatagattgataataagctttgagtggccgattctcggataacttgattagggttcaaagttagacgcagctatttaaagaggaaacggatggagctcgttaggtcaaaaagctggcagaattttagtggactttatttgggctttagtataacagggcttattgggcccaaatgaaaactctttttaacatttctgctctctctattttgcatgttttattaatgagtcggattagaaaccgaggggtcagtcgaggagactaattggtaaacatcaatgagttctttttacacctttgattttcccatttatctatctccttatgaaatatcatactcatcacaagagaataagaagaaccggaaaatattatcatcattaaaaaacattgcaattttgaagctcccctacagacatcttcctccataacctgcgtttctgattagtgcttgtttagtagcttccgaagtaaccatgtatctctgctcaccaacctacatatatacgaaaaaaacagaatataacagaaaataattatagaatatacatttaatttgtcgatgcaccaagtaaggctaaatcaaagtgtaataatatttgtacctcaaaacaagaagcctgcaatgagaagtcactgaagcagctaatgacacattgttcaatctctaatcctagagtctccaatgtactaaccgttgatacaaccaaacccggtttcgtaggacaacatatatcaatatgcgtattaacttccctttgatctacttcaaactgcaaaagattcgttttcgttatagccagaaaaattgtctgcaccttcaagtgattataattttttgagtgatatctaatgggaatcaaattgattcaagtatatgatgagggtgtttgtaacaaatgatttgtaatgggatgaatttgtaaaaacacaagacttatgagtactgaagcacaaataccataataacattatgttttgtttttagcttttacctttagggagtttctgaccatagattcgtttgtaatgagggtgcttagatgagagttgcttccaagttcttgttcgtcttcttgcaacttgttaatcttgtccaaaagctccttcatgtaatctattgcatctcctagtatcgatgtcctatccatctgattttattatataataatcatcaaaaattatatacattttctcatacaacaaactctatgcagattcacaaaaagcaataaccttttatcagtgaacagtgtaccaaaaaaaagatttcaacaagaagaaaacatacatgtaacgttaagaacttaacaaaaaaggaagaatatttcttcttgacttaaaaataaaaaccatataacatgtgacaaggatgaggtttatggaatttgaccttggtgattttagggacaatggatcggagcagggagagtcggtcatttaaccgtttcctccgccgtctctccgccataagattcttcgaaggctgaccttcaagcttcttgttactccttttcttgttagtctctccgatgcttatgaagctcttgctttcctccatcaatggtgagtaattgttggtgttctcttgcgaagccggaaggatcaatggaggaggagaataagaggagtgtatgatatcctcgagaaaaggatagtcgaaagcggaggagagcggcggagaatcataaagaggtgacgacggttgtggtggttgatgaagcaatggaggtggctgagaaattagattcatcaaagaagaagaagaaggatgatcaatgttgtcgtcttcttggagaagattgttgaaacagaggtaatcgaagttccaatcatttgggacgaattggtcaatcgccatgaatcctccattaacgccgttgagattgttgctttcttgttttctcaattgcgtcaattccgtttccatctctctttctctctattttctgaaactctgttatttgtgaaagtggaagtgaacagagtttgtgagcttggggtcaaagaagatacaaatgcatgtaaatgcattacataagtgtgaattgtaatgaagaattcactttttaactgattagaattactttattccatttgacatatgtatatttatgacttgtttgttacataaaaagtggattttaatagttaaaaatatatatacaaataagtagttttgtctagttgtttaaggagagatccactagaaaacattacaatttagtgtgtttgtttttgatccatggtccagcaccaacctatgaggcataagctgagattgatgaaattttttttttacttaatatcgttttcttttgtgttgttgtctgaatcgtattattattgatggttcgttttcagtgacgatattaagtaatttatacgttctctttgatcggaaaaatgatctgacccacaaagtatgtcccggccaaaatgaatgaacatcatcatctagctctcttccttagtcaacttatgtatatgatacgaatggtatttaatattagaaatatcaaatatgaataatcagatgcttacaaaagtaagagataatggtctagatttcgagattgagaagctgccatcatatttgcttttttattattattattggataggcttttggcactgaacgttaataacatggaaaaatcttgaatagatatatattattgtgagtttttgccatttcaaaagtactcgtatccgacgatatcgatcaattacgggaaaaaataaacacccgtgtctcttctaatagacataattccgcaaattattacattgtggtgtatcagtgtatgattgtattaatatggaaaaagaaaagactgacaggtcaaagagatcgaagaaggcttaagtcaaagaaatttgtttcttatatcagaagcgagttgcgtgagagtttgtggacacacactgtctcctactctatcttcactccattatttactactcaatcggatatcattattgtctgcattatataagttgcttttctttgacaattcattgttttcatttctcaacatttaaattgaaaattaacaaaatttcatatatttaaatttctaaactaatcattcttggatacccattgactttttttaaaaagtatgtgtttatcctaataattgttggtttaactaaaaccagggatcaacagttgggttgacaaaggtttagtaaataaaataaagtaacaaccataagaaaaaaatgacacaattttcaaggtgaatgcatgcaagcagaagcagggataagaaaagatgaaacacgtgaataagcttcagccattatgtgctatgtgaccatgactaagccactatggatgcatatttgaaaattttggggttgttagttaagtttcaatattgggttttgagttttcggttcatttattttagagagttttacaccaaagtaaataattctgacttttaatataactacaatacataaaatttggtggttttaaaatttttgttatttacaattaatatttttaaatccttgtgaataaaaaatttatatacaattttaaaatactatcatttttaatttttttaaaataaaatttaatgttttcttttgtcaactagctagagacacttgaaacccacccatttgtaaaagtaaaattattcaagcattagtctacaaaaattgtagaccttgattagataaagccccaattcataaatgttcactgatcttaattaattactataaatcgattagataaaggcccataatgatttggcccctctaccgtccgtcaaatgacaagtaacaagaaacagcagtgaaccaaccggtccaactgttaatttagattttaccggtctatttagttcggtttaaaactataccttttagtttcctttttcactcttctctacagatttattttcctccaaaatatgaatcttcagttgactctaatctccttactcttcttcacttccgccatagctgaaaccttcaaaaacctcgattctcatccacagttcccttgtaaacctcctcattttagctcttatcccttctgcaatgtctctttatccataaaacaacgagcaatttctctcgtctccctcctcatgctcccagagaagataggtcagctctcaaacacagctgcttcagtaccccgtctcggtattcctccgtacgagtggtggtcggagtctttacacggactcgccgataacggtcccggagtttccttcaacggttcgatctccgccgctactagttttcctcaggtaatcgtatctgctgcatctttcaatagaacgctatggtacgagattggatctgctgttgcggtggaaggtcgggctatgtacaacggtggtcaagctgggttgacgttttgggctccgaatataaatgtgtttagggatccgagatggggaagaggacaggagactcctggtgaggatccgaaggtagtttccgagtatggagttgagttcgttagagggtttcaagagaagaagaaaaggaaggttttgaaaagaagatttagtgatgatgttgatgatgatcgtcatgatgatgatgctgatgggaagctcatgttatctgcttgttgtaagcatttcactgcctatgatttggaaaaatgggggaatttcactagatacgacttcaatgctgtggtaagactaagaactcttttcttcactatgtgtagcttgtgtatcaacttcaattggattttaattgagaactctcaggtttagtggatcaggtttgacctaaaatagaattaaatctatagactttattgaatgcacctttctttggtgttcatgaaacagaatttaactagttatattgcttctggcttttgcattatctccatggttctgtgtcgaacactgagtctagcttactctgtattagtaggtcacagaacaggacatggaagacacatatcagcccccatttgagacttgtataagagatggtaaagctagctgcttgatgtgttcatataatgcagttaatggggtccctgcttgtgcgcaaggagacttattacaaaaagctcgagttgagtggggatttgaagggtaagtgaatcttcaacagggaaggagagaaaaacctgatttttgtttgtgatgctttggttcggccaatgaaagatttaccggggagtctttttcttgtatctgtgcaggtacattacatcagactgtgatgctgtggcaactatttttgcgtaccaaggatataccaagtcacctgaggaagctgttgctgatgccataaaagcaggtccttttgagttcttttaacacttgttaacttgtaaataggttgtcttaaaatgaaatctgagattgtgaattcataggggtggatataaattgtggaacatacatgcttcggcacacacaatctgcgattgagcaggggaaggtgagcgaagaactagtagaccgagctctgctaaatctctttgctgttcaacttcgtcttggactttttgatggtgatccaagaagaggacagtacggaaagttaggatcaaatgacatttgtagctcagaccacagaaaattggcactggaagcaacaagacagggtatcgtgctcctgaaaaatgatcacaagttgttgcctttgaacaaaaaccatgtttcttcattagcaatcgttggtccaatggcgaataatataagcaatatgggcggtacttatacaggttcggactatctatcttcttgttattttcaagcaggctaaatttttctcctcgctgaaacagtttataaatgtcatatttgtaaaggaaagccgtgtcaacgaaagactttgttcacggaacttctggagtatgtgaagaagacatcttatgcgtctggttgctcagacgtgtcttgtgattctgataccggatttggagaagctgtggccatcgccaagggagcggattttgtcatagtagttgcaggattagatctctctcaagaaaccgaggataaggatcgagttagtctttctttgcctggtaaacagaaagatcttgtgtctcatgttgctgctgtgagcaaaaaaccggtgattcttgttctaaccggtggaggaccagtggatgtaacgtttgctaaaaatgacccgagaatcggaagcattatctggattggttatccaggtgaaactggtggacaagcactcgctgaaatcatatttggagacttcaatccaggttagcctatcgcaaatcaaagcatcttctgttcatcccagtttatgaaatgcagaaactgaatactaaagctttttggttgtatatggttttggtttcggttcaagtgtaggtggtagattaccgacaacgtggtatccggagtcattcacggatgtggcaatgtcggatatgcacatgagagccaattcatctcgtggatatccaggaagaacgtacagattctataccggacctcaagtttacagttttgggaccggtttaagctacacgaaattcgagtacaagatcttatcagcaccaatcagacttagcttatcggaacttcttccacaacagtcttctcacaagaaacaactacaacatggagaagaacttcgatacttacagctcgatgatgtgattgttaactcttgcgaatctctgcggtttaacgttcgtgttcatgtgagcaataccggagaaatcgacggtagtcatgttgtgatgctgttttcgaaaatgccaccggttttatctggtgttccggagaagcagctgattggttatgatcgtgttcatgttcgttccaatgaaatgatggaaacagtgttcgtaatcgatccttgcaagcagctaagcgtagcgaatgatgtcgggaagagagtgattcctctggggagtcatgtcttgttcttgggagatttacaacattctctctctgttgaattctaaaacactgtaatccgaaaaaatttcattactgtttatttccttctagaatgatctatatatatacttttgaaactacagaaacaaccaggtcagctaaagagagtgtgacacgcacgcaatttttctgcgcgtgtgattgtggtagagattaatcaacagagaaaagtgagctgtcgtgggtcccacgatatatcagggaaatggtccccacatctgttgttgtgtttggggatagacgcaacatttattattatttacggttatgacctcctttttccagtatacaacctgacacctcataatatgtgtttttaatcaaggatccgacggcccagattttacccaacttcgtcaaatgtatataaacaaaattgcacttattttctcaataattgagtcactctcacctccttcctttgaaaaaaaaaaacttggatcgagtctccttcctctctcttccttcaaagttcttgttgatcttgttcaaggaatcaagggcttgccaagaaaaaagattagatccttgagaaatctggggtatttccacagttcagattcatgctttactgatgatttcttttaaagggtattttcgtcatttgaaaggttcgacggttgccccagttggctaattcctccggctttaagaaaataaaataaagtacatcggtgtttcttggctgtcctaccccttcaattccggcgagtttgaccgccggtgtttagtctcgaataaagttctttgaattatgaatttgtatctctatcaattaaattgtgatgcatttctaaatttatgatgagataggaatatttaatctaacaaatggacagattattcaagaaactgctgacctagcaaaagtgaaagcgagaatattaagaataagtctcaaaaaaaaaattatgtcgaaaagaaaaaggaaaaataactgtgggcccatgtgaaacagttcagactccgaaattaccaatttgcctacattttgtttaattaagaaaatcgctaagagaaataaagcacgcacgaaccaacggctatggaacggtcactggataaattaacgaaatctgagccgtccacgtcagattactcgggcagatggatcgggcaacgtcattaaacagatctgaaccgtcagatctcgaatcaacggtgaggagaagcactaagcgttttaacgggcagatttcaatgtcctttaagaagagacgatgcctcaccttgtttttcctcgtcctcctctccaaacaacaatccctttcttttcttccgatcgccggaattgtttttccggtggcgttaatttctcacttcaacgtttctaaattatacaagggtcagatcaaaggtctgattccggcgaagggagaaagagatcatatccctctgaaatgatcttgtgcccttcgagttttgtatggcacctgcggttttggctaacctaaacgaaccgttgtttctgggacaatgtggcgccgtttttatgaggaaatacacaaaccaacctctttccggtgatatcaataatcctcttttcaaccctaaccctaaccctaactcaatctccgcttacgggaacaattcgagcaagcatttcgatgattcgtcagcttatggagactacgtttcctttgatcttgatgggtacacctcgaatcagctcagggagctgaagaagcgtctcaattcggagctcgaggaagttcggttcctgagagaacggatcgaatcgggtacgttcgtgagcggctctgtttatactactcaagctcgtagcttcgctggtgaaacgaatgacgttggagtgaagaagacgaagacgaagaagaagaaaattgggcatgggcagaagcgaagcaatccgtttgctacggacgagcctagccttaagcgtcatgtggctttggatctgatgtctgagaaggtgttgaagagtatgatgacgacatgtggtcagatcttggtgaagctgatgaagcataaatggtcatgggtctttttaaatcctgttgatgtggtaggtttagggcttcatgactatcatcggattgtggacaagcctatggatctgggtacggtgaagatgaatctggaaaaaggtttatatagatcgccgattgatttcgcttctgatgttaggttgactttcaccaatgcgatgtcgtataatccaaagggtcaagatgtttatttgatggctgagaagcttctgagtcaatttgacgtttggttcaaccctacattgaagagattcgaggctcaagaggtgaaagttatgggatcatcgtctcgtcctggacctgaggataatcaaagagtgtggaatcagaataatgtggcggagaatgcaaggaaaggacctgaacagatttctatagctaaaaagctagattcagtgaagccgctactacctacattgcctcctcctccagtaattgagataacacgtgacccatctcctcctccttcaccggttcagccaccaccaccaccatcaccacctccccagccggttaaccaagtggaagcatcacttgaagtgcgtgaaacgaataagggaaggaaagggaagttaccgaaaccgaaggctaaggatccaaacaagcgggaaatgacaatggatgaaaagggaaagcttggcgtgaatctacaagaattgcctcctgagaagcttggacagttgattcagattcttaggaagaggacaagagatttgcctcaagacggtgacgaaatagagttggatattgaagctttagataatgagactttgtgggagcttgatcgttttgttaccaactacagaaagatggcaagcaagatcaagcgacaagggtttatccagaatgtgtcaactccaccaagaaacatggtaaagcaaacttctgatccatttatcaaaatgcacactttgtttctgattggttagtactgatctttgtcattatcatcagcctccggtgacagaaatgggaagtgctgagaagagagggaggaaaggaggggaagcaggagaagaggatgtagacattggagaagatataccagttgaggattatccatcagtggagattgaaagggatggtacagctgccgctgctagtggtggctctagttcttctggcagcttcagttcgagtggcagttcttcttctagtggtaatatagtcttaccctttcatctatttctcatttaaatgtttatcttttgccaatgtttaaacggttttcggtgtttgactctatgcagattcagagtcagggagttcatcaggaagtgattcggatgcggatagtgtgcagtctccatttgtggaagcaaaagaagccccgtaataattgttgaccgtacgttgaaatatgcttaacaactccaggagactagaatcggagaatttgggtggaggtggaacctttgtgtaaatggaagggaaaggaaggaagggaaactcgaaagaaaagattttgagtgttagggaaacagtagatagaggaaaacatgtaaagggtagttagtgaatttctaggttgagcaaagaggtggaagttttctgtccttttcctctttcagattaaggttctttagattattggtgacaccatgaacagagtgacttagtaagaaaagatcgagaggatctaagaaaaatgtagtggagaatgtgaaaatggttcgaagaaaaatattatctctgttcgtttcgtttatgaaccatttttttttttaccagctgcacttctatgagatgattactacaacacttgaagaaagcatgctcaggaaacaagcaaggaaaaagtttaattttatttaatgacattaataaacccaaagttgagtgtgagagtagcaaaggacataattagttcaagcagaagcagccaagagtccattgtgtctgagcagaggctctggggaaggttctcgtcctctgaactccacaaacacctgttcaatagtttaccattacatttgatcattataagctctggaaacaaacaacttggatttatgatatgcagaacctatagtataaaaggcagagaagagattttacttttagaggagcttttcctcctcccagagcaagtatagtgtttctgaatctctgtcctgtttctttgacagcctgtgttttgcaacccacacaacacagagagatgttcagagtctggaaaatcgaatcaaagcttcagtaagtttgtttagcagcatataccttaatgtcatccaacccagcatcttcaaaagctgaaaacgcatctgcagacaaaacctccgcccactgcacgttgtccacaaaagtgtatttagatatttgaccagcagagaaccatcgtgaatagaactgctgcatcggtgaattatatagaaacaaaagaatatattttaccttgtaactgtagtatccagctgcataaccacctgacaagacatgagaaggtgaacaagtgaaacaaactatcaaacgcacctacgataactgcacatgactaacgtttacggatgcgttacaacaaaacgggtttaaggatgttacctgcaaatatatgactgaagctacagaggaatctatcttcaggaagtggagggatcacttgtgtttttatggacaccctttgatcaacttcgtagatggtctctgccccacctggcatgtattttgtgtgcagctccagatcaactgtagcaaacttcaactggaacaacaagagccaaatttactgaaatgtgtacaatccgctgaagaagagaatcttgcttagtactacatatgaacatctacagtttgatataatgtactgacctggcgaagactaagggaccctgcacggaatgttcttgcagccagtagcttcttgtatacattctcgggaagagtttctcctgtttgataatgcttagcaatgctcattaaggtatccctgaaaccacattcagataatgttcattataaatttactagtaaatgcctctacgcagcactgcaaaagtatttgtaagaggacaaaaatcacggggacccaaacatttgtaaattaaattcggcaaggcagttgaacccaagtacctgtggtagcaccagttctccataaactgtgacggtaattcaactgcatcccactcgatattccggataccagccactagcccctcatcctctttggtaagcatatgctgaagagcatggccaaattcatggaacacagtctctacctgtaaatcagaataatattgtcataaagaacaaggatcatgagtcattgaccatgcatgtaagagttctccaaaagcacctaaagtttcaagtatggaaagctacatataggtcgaaaagagaagtggtctatctagtgctactcctaaagattgtaaaatttcgtcatagcatggccctccacgccaccaatatgtaaagttccatgagtgaataccaatccacaatagtcgaataaatcaataaaattacacatgaagtaagttttctcaggtaccaatttaacttctagggcagggaaaactacatttgggggcatgtgtactcatagtttgttaccaactaccatacatactcaggcatttacttccttcacaatcaatatagaatttaagatattttttacctcacggaatgtcataaggcttggcttgtcaccaacaggtggagtttggttgcagaccatttgagcaacagggagtctaacggaggaacccttctgggccatgactcggctacgagaaaaaacttcatccatccaagcgccgtctctcttttctgaagggcgagagtagggatcaaagtagaaataagcagttggatttccagaagaatctttgacacagtagaacctaacatcgctgttccagaccttcacggcaataatatataacatgttaaaaaacataatagcatgatggacatatactgaaacacgacatattaagttccagattttaccggcgctacaccgtctgctggcacaacatcaattccaaatagtgtcttagctagaccgaataacgcatccataacctttggcaatgagaagtaaggtcgcagttcttcctacaaaattacaagcagtgagcaataagcggcaaggattgtaaaacaatatacaattgtatcacaaactaaagaataaggacgagaacctcattaatatcgtatttggattcacgaagcctctcactccagaaagtgatgtcccagtgagtcaaactgtcagcctctgcagcaccttggttcttcgcaaaactcttaaggtcttctatgtctaagtccataacacatgtaaaattaattataatcatgattttggtttgaaaggccgatacaaaaaagctatgagggaaaccgttacatactttattggatagagaaatgcagtaacagctcactagttaaagaactatatgttgatttaagtatttttctcactagaagttaccttgaacagccggatcccatgaagcactgcgaagcttttctagtagctcatctgctttctccacagtagccattttcgtggccatgcttacctggacaaggagaatgatattaaatttaagcccatgagtaaaggagagtaagttgacttagtagactataatacctcagcataatttctgtaaccaagaagcttagccttttccagtcgaagcttcaagatttggtcgataattgctgtattatctaaatcacccgaagaggcacgggataagtaagcacggtagacttcctcgcgcagagctcggtttttggcatgttgcataacgggaagataactaggagcatcgagtgtaatgagccatggtccagtgtcagcagttgcagtttcatggcccttgggtcatatatattaagacgaatcaacaacttaaaaacccaatgtaaatcaacatgaaactttataaatctttcagatattataccttggaaacagctgcttgtgcgaacaatccaagtgcagatggtggcaacccctcaatctctttcttgtctgttatcaacttttcaaacttctttgtagcgtccaaaacattctcagaaaacttatgagaaagtttttcaagttcctatagtggacaagggcaaatcaagtaagcagatcatattactaattacacagaagtaatgcgtgtggactcatggagctgacatttattcgtcaagagttatagaataaacctgttcaattttgttaaattcttccctcttatcatcttcaagagcaataccactcagaaccgcctcctttatttgggctgaaaacacatggaaactatattagcacatatctctgagcattgaaaatataaaacgattcctcttatacaaaaaaaaactggaaaggaaagaacaaattgtgttccttcttatgctccgattataattacttgccttcaactaatcgttgacgagcttcgctcaatgaattccagtctggagattctcgaatagccttaaatgcattgtaaatgggtttgctctgtcccaacctgagctggaacttcaccttctccggctgtagagtgtagatgaaagtattgttaggaaaacaagaaaacgaatcctaatccactgaataaacaaacaaaaacttagagctccctttgactgaatccataattttcatgaatatcaatttaacagtgatgtacatgtttgatgacaatcaaacaaatgtcgacaccaataagtagatttgaatttgaattaaaccagtcatgagcagagaaaaacttggcaatacaaataaaaatctacctgaacttcttcaatggcagcacgaagctcaggtgtgtccttgacagccttaagatgattgatcattccccaaacaacagataaccgatcaataatcttctctaatggctccactagttttggccatgaaggctctacagctttttctagctgctccaattcagcttcctggaagaaaaaatcgtttcacacaaatggcaatagctaatatatgcaacattttactaatctgttcataggatcatagaaacaatacacaagtccaatagaagaagaagaaaaacaacaatgatcgggatgataaagaaagagaaacgtacgagctgctgcaacagagcacgaatcccaggtctgacatggtgagcatcaacggagtcaaacggagggaagtcaaaattctgcaatagaggattcgaggagagagtatcttcagaagccattgattgagattgacgagaaagagaatgagaagcggcggtagtggaagtgaatctgagggaagccagatggggcaataatgtgacttaagggaaacttgagggacgaaaatgataataatagaaacttgcgtttcgttaatgctaaaggataattttgtcaaatcataaattctatcattctgagttttttttgaaccgggcttggagatttttcaggtagttcgttgggttggtttaaggacatgctcaccaagtgttcgacgaaaatgaagataactggataagtcatagaaagtttattgttttctgaatggccatgatccagggttacaaatatttaaataagttcctacttttttcttaatgatttcacatcgttttcaaagataattttgtttttgtatctgggtttgttcttgcacgtaggataagatcatatacaattgtttatcacattcctctcatgataacagatagacttagttgactacttttaaggttgatgctaattagttttatctgaggttgagctggctatcttatttttctaatcctaggtttggcattgacttgatggaagtatattcgcttataatggtctcttgatgtgtatgtttttaatcgatttcttaaaagaacagatcttttgaccttttttactgtgcattgacatgttcttgagtttggttcatctgtgttgatgattaatcatgtcatgttcaaataactaatcgtggttgtgaataaacttgttctgtggaaaatatcagtgttacatggactttttgattgtgatttcttatttttgaagtctataaagtttgactctgcttgttcacccattggcttgaggaaaaaataagtcttctctttgatatacttgagttcctttgtgattatcataagctgtcttacaatttaggatgagtatcaaacatgtcttcctcatttttctaatctgttataagcaatcaatacagagatatgatctgtttactcttagggtcaactatatggtgacttttatggttgtttatcaaaaaatttaattcctgtgatagcttggatcacgctctcaaatgatttcattcttataatcaaggtttagtcattgacttgctgataaatatacatatcagttgcaccaattttgtctcttgagctaattgttgtttctgcctgcaaatggccaactcaattctgttattttcctttgttttggttctcccttttgtctgttcagttcaatttaacatatctcgttttggatcagatgtttctgaaatagcataccaaggagatgcaagagcaaatggggctgttgagcttaccaacattgactacacatgccgtgccggttgggctacttatggtaagcaggttcctttatggaatccaggtaccagtaagccttcggattttagtacgcgtttctccttcagaattgatacccgtaatgttgggtatggtaattacggtcatgggtttgctttctttctagctccagcgagaatccaattgcctcccaactcagctggtggtttcttgggtctattcaatggaaccaataatcagtcttctgctttcccacttgtttatgtcgagttcgacacatttactaatccagaatgggatcctctcgatgtcaaatcccatgtaggaatcaacaacaactctcttgtttcttctaactacacttcttggaatgcaacgtcacacaaccaagatataggccgtgtcctgatattctatgattccgctagaagaaacttgagtgtctcttggacttacgacttaacatctgatcctctggagaattcaagcctatcttacatcattgatctctcaaaggtactgccatcagaagttacaattgggttttctgcgacatctggaggggtcaccgagggaaatagacttctgtcatgggagttcagttcaagcctggagctaatagatataaagaaaagtcagaatgacaagaaggggatgataattggtatttcagtttctgggttcgttttgctgaccttttttattacctcgctcatcgtcttcttgaaacggaagcagcagaagaagaaagcagaggagacagaaaacttaacatcgataaatgaagatctcgaaagaggagcaggaccaagaaagtttacttataaagatcttgcatcagctgcaaacaatttcgcagatgataggaagctaggggaaggagggtttggagcggtttatagagggtacttaaacagcttagatatgatggttgcgataaagaagtttgcgggtgggtctaagcagggaaaaagagagttcgtaaccgaagtaaagataatcagcagtttgagacatcgaaaccttgtgcaactcattggttggtgccatgagaaagatgagtttctaatgatatacgagttcatgccaaatggtagccttgacgcccatctatttggtaaaaagccgcatctcgcttggcatgtgagatgcaaaataactctcggtctcgcctctgcactgctttatcttcacgaggagtgggagcagtgtgttgtacacagagacatcaaggcgagtaatgtgatgctcgactccaatttcaatgccaagcttggtgatttcgggttggctagattgatggaccacgagctaggtccacagactacagggttagcaggaacatttggttacatggctcctgaatacataagcaccggaagggcgagcaaagaatctgatgtgtatagctttggagtggttacattagagattgttacaggaagaaaatctgtggatcgaagacaaggaagagtagagcctgtaacaaaccttgtagagaaaatgtgggacctttatggaaaaggagaagttattacagctatcgacgagaaactcaggatcggtggtttcgatgagaaacaagcagaatgtctcatgattgtaggattatggtgtgctcatcctgatgtaaacacgaggccttcaataaaacaagcaatccaagtcttgaatcttgaagcaccagtgcctcatcttccgaccaaaatgcctgtcgcaacatatcatgtatcctcttcgaatactacatcggtaagctctggtggagctacggtaacgttttcaagtgctcaacatggtcgttgagcagatcccttgttgctgtgtgtaatatagcctttttcttactcttgtttcttgtgtgtgcgtgtgtgtgtttcactgtttgtactcggtccttgtgctaaaaaatgacaaggtcttattttcagtttttctggtgtctcgactcttttgggctgggctaatgggcttataaaactttttttgataaaaggatacaaaataaacgcgtcaggtaggggtcgaacctacgaccttctgcttaggaaacagacgctctatccactgagctacagacgcttctttgggagttagaatcataatattaataatgaagaataaatgtcaatagcattgagccattgagaaaatcggttgaactgacttctctaactgaaaattcacattggtgagtttggtggcgatttaatttttgggcgtatattattttttagaaaattaagatagaaattaatggttgtggtagtatatattaacgggtttagttcaccaactaacacaattaatcttccctacttacactgcgatcgtttgtttttatctagttctaaattactagaactagtttacttcagacaacaaactttataagtagaaaaccgagtcattgtagattattatatttgtaatttacttaatgatgttaccatgaaaactataagtagtatatataagaattttcttttgcgtatggactatatacgtctgagaaacaaaacctaactgttactaatggagtttcaatgtaatgaattgagtttggactttggcgttttgagatagacaagtactaaacatttcacttgggtttgtctcacggaaaggtggttgattttaatgccttcgggtgataactcttttttttttctccacgccttaggtgatggtaaactcataaagtcattttaatcctcgaaaattaaggatctatccacgcctcatattataaagtaagatttgtgtttattatggcatcccatatggccattggtgcaagtttgaggtgggtccaaattgtcacgcatgaaaaattgacaatggttacgttgagaaagaaaactactaaaatagtagtatagtttattcgtaaaccaaaacaattgtagccatcattacgaatggatagctcttgttattaactttcaaataacagggattatgtagtagaaacttgtttttttgtattagtattatggctcgaaagtgatagtatttgtgaatacaaatattctagtaatagttgaatattaaaaaatcatatcaatgatacgatggcttaattttgtagtcaaatttgtctgccatatgtttcctctctttatgccgccacgaaaaaattgaaaatataaagaagaagaaacagacagcacactcacaatttgtcgaatttttaactaatgattttgtcaacttctataagtgcaaatccatattttttattccttggttatagaattttatttaacttttactaattttcgttgttttaataattttaaatcatactagcaaaaaatgtcatccaaaattaactaaaacctaatgttccgacactttcaatctcattctacatgtaaacaaaaagctcaaaaatgtaagaaaaaaataacaaggtttgctaaattagaagagctatttaatatcacatgcgctatttaattttcttttttaatcacgaatcacgaattagctattttgcggagaatagaatttgagtgaaatataatcataacaaaatccctttaatattaactctcaattcattacaagcaaaggtgatgtcttattttatatgacgaaaatgcccacaaaccagccagatatatcaaccgtttgagttctttacatcgtaaatgcgttagttacggcaacaatctctaatcctttcatcttcctcaaaattattaaaatcataggactactaatttagaaacaagaaattacaaaaaacaaaacaagaaaaacaaaacttgacttgacttgcagttgaaagtaaaaaataaaaacaaaagttgaattgctacggtggagttgtataaatatagcagagattccaatccatctccactcagcaaaagctgactcttcttctaactttctatttcttccaagaataacaaacttttttctcataagaaacaaaacaagaattctacaaaacttctcattaaacctctgttttcttgtttctcttctgctctgtattttcgataattctctctgttttgtatcctttcttattttctgtgaatctgtttttttatggaaatttaattcaaaggcttattagaggaagaaagaaagaaaaagaaaaaaaaacccactggagctatggctgttgaaggtaaacctaaacataaaatttgtttgctttttgttaagaaagtgggggaaaaaaataaaatcattgatgcaaatttattttctgggtttatgaaaatttacgcagacatgttatagaactgactttttgtattccttgtaacattaacagataacaagaacagtgaaagcaaaaatcatcaagaggtagagcttcataggaacgacttaggcctcgaagattcatcatcgccaagaggtgttctcggaatggtttcagattccgacaacagcagcagtagttgcagctcttgttcctctgatgataaatcatcatcaacatcgtcaccattttcaaatactactaaaaccgtttcgtcttctcaccatggtcttcaatggaacaaaatgattgaatctatcaagaagaagtccatgagacgattctctgtcattcctcttcttgcaagttacgaactcacccgtaaaaacttgcgtcgtaagcaacctaagctaactccctctgagagtgctttcacctgtgaagccttctttatggctaaaccctcttggagaaacttcacttacgaagagctcgctgtagccaccgattatttcaatcctggtatacacaaaaacgcaaacccttcttcaatagattttggattgagaaatttgagttttggttttgtttttttgttagagaacatgattggtaagggaggacatgcggaggtatacaaaggggttttgattaatggtgagacggtggcgattaagaagctgatgagtcacgccaaggaagaagaagaaagagtgagcgatttcctttcagagctcggtataatcgcacatgtaaaccacccaaacgcagctaggcttcgcggtttcagcagtgatcgcggtttgcattttgttcttgagtacgctccctatggcagcctcgcttctatgctttttggtatacttaaaagtctccttcttactgaaaatcttgtgtctagtacttttttctacaatgttgtgatattgtctctttgatctttgtaggatcagaggaatgtctagagtggaagataaggtataaagtggctctaggtatagctgatggtctgagttatcttcataatgcttgtccaagaaggatcattcaccgtgacatcaaagcttctaacatattgctcaaccacgattacgaagctcaggtaaatgatcttgacaaatgacaacatctctaaacattttcttggtatttggttggtttgagaaccatttacatattgtacattttctcaattcagatttcagatttcggacttgcaaaatggctcccagagaactggcctcaccatgttgtattccccattgaaggaacattcgggtaaaagagagaaagctttgtaactatccatgaacagctttgctgatcaaaactataggtttcattgggttttttctccctttagatatctagctccagagtatttcatgcacggcattgttgatgagaagattgatgtgtttgcctttggagtattgcttctagagatcataaccagtcgccgagctgttgatacagcaagcaggcagagcattgttgcatgggtaaatgcatcagtgactctttattgagactcatcaaaagttcagcttgagatcttttgtttaccttattgatttggttatacaggcaaaaccttttcttgagaaaaatagcatggaggacattgtggatcctcggctaggaaatatgtttaatccaacagagatgcaacgagtgatgctaacagcttcaatgtgtgtacatcatattgccgcaatgcgacctgacatgactcgggtatagtacctattcttcccatgttcatagagccaaaacagatctttggtatcggttttgatgtgaattctttgtgcagttggtgcagctgttacgtggagaagacggaccagctgagctacagcagaaggcaggtgaaagaacaatgagcgtgaacgcttgtgatctacaagatcacacctcttcctcatacctcaacgaactccgccgccataggcaactcttaatggagtgagtagaagcaataacatcaacttaaagaactgtttatcaacctctttctttttagatttttattttcttgacttgagttttgcttgttattctccattggttgcttttttttcttgtccaaccaaactgtgaatatcttcaacttgtgtctctctgttgcttctactgaactttgttagtctcaacctctcggtagagttgtcaatttgttaccaatgagctcacaagtagatagatatcaaacaaatagcaacacagaactttctgaagataattttttcataaatggaaacagagtacactgcggataagctgatagccttatacatacaagatacaaaagaaaccatcccccctaattcccaaaaactaccatttttctccaccgagtttaggtttaatacattcttccacatttccaacccccaactactcctgcctaaacaacaacagttaatcaaaaacaaaagtgagatttttaagattcttctagtcagcttatgtgttagccagaatcaagaagttgtgtctcttataacgataaaaacttgactcaatcaacttatatgattggttttagtaagactgattaggccagaggaagaactcagccggatttggtgccataagtcccattgttccctgaacgttggagttgttgttagacccggtcgagtcagaagctgcattcgccggaaaatgctggaagaagttctgttgctgctgctgctgttggtgttgctgttgttgttggtggtggtggtaaagagcagctgcttcaaaagggattccacaaggaatgatctgttgagactgaactgctgaattaggacagagagcgaagttaatgctactgtgattaggagatgactgaagctgaagctgttgttgttgttgttgttgctggaaatggtgaagttgatgatgaccgaggattggtttctgctctgatgaagcagcagcttccaaagagagcttaagacgtttagctgcaccaccgatgggaagtgcactcttcatgatggcttcaacgtcgtaacggttcatctcaaagttagttacagcgtttattcctctgaatttgattgctgctatgtcatacgcttcagctgcttcctcttccgttgctacaacaacaacaccaggactaactaattaaccacagacaatgattgttaaattagctagaccaagtttgaagattttacataccaaaggttccaaggtaaagatctttgttcccagcaactcggccaatccttgcttgccaacgtccttgttgatgatgccttgtaacacctcggtatatcgaagctcctctagagaaaccgctactcttcctgtgttatatcagtttttaaactctggttaccatcaaagaaacataatataaaaccattgataagattttaaagagtttttgcttttggacttacctcctgagggaggcaatgaactcttgcttggtcatgtgcttcatttcctccacttctttcgagtaattcgtaatctaaatatcattagaacggattaggaaaagattgaacaagttatataaactactaatggatacagagaaagaaggtacttacagggaaattggtggtagcagtagcattccagtatttcagagctgctaaatcgtaagctcgagctgccttatcttctttgtcatatccacctgaatcattaacaaagttagacaccacagatacatattcaacattattcacatgctgactgattaagatatttgttcttacccaagtatactgttgattttaagcagagccaaaatgcatccccatatcaagtagcacatgccaaaaaaagagtagaagacttagccaaagcgatgattagaaacaattatgttatgcaagaaataatgcagagcatgtttaaggcagattagttatcatccattatattaagttctaagaatgtttttgaatattgatagcagtctagtaatcagaaagcaaaagtgatagaatttgaaacaaaacaacaaaataaaacacgaaaagaggttggatgtggtcaaagcctagatccccactcttgtgttgtggtggtactggtagcctaaagcaaaaaatatataaaattaaagcaaaagccactgagaatattcagactttgctttgttgatgtgaacactacacataaatcattctgacaccttatggacacagaagaaacactaccacccatctctgaaaacttacattattaatttcaaattcctcatctatacacactatattttgtattcaaaatcaatctctaatcaacctaagtactctctactaccccctataagctaaaactgaagaaaacagtccaatggtctcacatcacatgcctgcataacgtcaaatcatatatatatgctaacacttacagagatatataggtgaagagaaatgtaggattagagggtcaaagtgggtccaaaaacatgtcaatcaaagaaacagagattacatcatataggcaatgccatgggaccccatctaatgtacctttaggctttagtatgtgtaagagtgtgaaatgaaaggaaaagaaaaatgtaataaagacaaaggaacaaaatggcggcacccttctgctaaatatatgaaaaatcaacaacaaacaacaacaactaatattttatttatgtcttttccattttttccataatcctgactcaaaagtattgtcaagttaaaaaaaactttggctcccccttcacaaatgcaaaaaatcacccaaagttctatcaatcatcatataaagatatagacagatcaatagaataaagaaaaaggtaaagcttcttttgaatcttgcattcaattttcctttgacaaatcctttgtcctatacttcactctacttacttctaaaccccacttaataataagaagagacatgaaaaacccaagcttcttctaaccacaaaacctcatataattcacaagaaaaacattaagcctaaacaacaaaaaacaaagtaatagtgaatcatcaaatacatataagaaattcgaaaactgaatggaaaatatataccttgacgtcccttcctggcctgaccttctctcctacagctattatcccatagatgtgcttcatatcttcccgtccatctatgtctacatcaatcaaatatttacattaatacttacacttagaacaaaacaaaaaccaaaacttcaatagtaatagtattgaagtctttgacctttagtcaatggcaaatcacaaaacagtacttaattaattcctaatcacaacttattggattcttaattatatacttaccgagtaacacctctgtaaatcgaagtcctttgaccaaacgtatcagcaatcttcttattagaacaatctgatgtttccacagccacaacagccttctccttctcagaatctgtcttctcgttgtcattgttgttgttgttgttgattctctcaccattgttattgcctcggtaatgattatcattatcattccggtgattagtattgttattgacgttaacaccaagtgacaaagctccggtagatccaccgtgaaaccctagctccggaccagaagattcaaccacgtgtcccaaatagtctccagcaagatgagtccttccgatagaagcagagtcatcgacctctgaaccggagttagtagagaaagcggattgaaaaccggccatggttttgaaatcgtggtgatcggagtaaaagccggtttggttatggtggtgacgtggatcgtagatttgagtgagggaagagtcttgtgtgtcggtttgactgttgtcggagtaacgaacgatagaagaagagtcaccgagaaaatcttcgagctttgggatgtgattctgagaatgatgagattgtgggtctacgaatgttgttaagattgttgaatccgccattgaagctgctgctgctaactgagcttcttctttgaaaaactcctgaggtttttggtttgaccaacctttgaaaaacaaaaacaaaaaacatcatcattagttcttcatcaccaagaacaagttattttccgggaaaatgaaggaaaacgagaaaaagattaatactttgagtttcatgacggagaaagtacatggatttagatacccagaagattaacaacaacgaaaatatcgaaaaatcaaagaagagagatcacgagaagatataaaaattagattttgtttttttttttgggtttgcctctcttgggaaagagacaaagtcagagagaaaacacgagggaggctgagttaagcataactcggttatagaggataagctacgaagtcggttagtactcaatcagagaggctttagttacacgagcatgtactgttgagaccacaatcattcgtatgtgtcgtacaaagaaaaaaagaagagaaaatttggttggagagagaagaagaaagaaaagggtaccatagaaattatcgaggagataaggagaggaggaagcggcggaagaagcgtcataggagacaaactgagactgatcagatgacctcaacatctccattggtgacagagaaaacgttaaccagttcgtcatcggagccatcataaactttcttataaaaacaattttactttttctctctcttgtttgttgtttgttcttcttctttggtaaaccctttgctgagcctgagattatattttaaagtaaaaattattaggagaggaaaaaaagagaatgggaacgcctacaaagttctaatgtgcagaaaaggacaaagaagatttaagaagaaacccagaaataaaggtttgtcttttttttctttctttttttttactttgtataaatacaaacctgattaagcgttacactatattagtacttctgcatttgtgtggtaacgaagaagaagaagaagacttgagaaaacgataatcacgaggttattatcagaagaagaagatctctttatctactttgcatgtgttttggaataaaacaaaagtttcaaggagatcaagagagcaaatgcatgtatacacactggtgtgtctgagatttgaatgaaggctaaaaagaagctgaagcagagaagctctttaaggaacgtctcagacgtatatttataaagaaaattaaatcgtttattttatttgtttaaactataaaaagatacaaaagttgcagtagagagagagagagaatgtgcatgtagagtagagagagagagttaaaaaaaaaaaagtagaagcggtttcttctgtgtcgtccggcgtaataccggaggggattttagagagcgatgtacatttttacttagctttaactttttgtctttgttatgagacgtatcttacttaattcattttgtaatgtaataaccagttacacaatttgtccgacacatgacctttgactatcacttaagttttcaaaaactattttgtacaattgtgacttaaatttctgggaaaaagaagaatgtcacttcagtataatttctaaactccaaatttgtattacttaaaattactaatttggtttgaatacaaataccaaatttaaaataactaatttggtttgaatttggtatattgttgttagacatattaattttcttcttgttacttttttagtgtttgggggaaaacttttatcttcaaatatttaatatttattttcctccaatcatgtgatgttattttttattattcagagttgaaatgaatttgataaaaaccatatcgaaattcctaacattgttaccgtttgttgaaaataaaggataggaggatacagatatctcaaattcaagatatcaaagatttatagtacgtgcgtacaaatgattgtgggaaagggaaactattcatttaagaatactttgcttatcttatgcttttatattctcacatattcgacaaacatcacatcatctcaattgcggagacttcagtgagcattctttacgagtaacggtgactatcacgatgacctgtgcaatgagaaaaaaaatgaactgattcatataagaaagttccaaagaaaactttttcacatgaaacggcaaagaagaccatggtagtttgggattctgttataatcgttcaagtaggattcataaaacatgtatcaagctatcaatctttcactctggaataccttaacgattaattttcttgccatatgtcacaactgaatactagatatttgagagttttacgagttattgagtactagatatatgtgagaatgttctatgtaatcatgtttacttgaaaacagtaataattaattaccaaacgtctatggcgtgaaggccaccaaaacgagtattacgttctaatattaccgtaaaatgatgtttttgtgtatatgattgtgtgtgtatatgatctttaccgtataatcgtctgtatgattattaccgtaaaatgatgtttgtttatggattcaaaaaatgaaaaagctaaagaatagagatagatggatttgttacgacctaactatcattttgaataagatttgaaatattatatgattctatgctatattatttagtgattctatgctaatatgatttagtgataaagggaaaaaacaacaattgtttagttgtggaggtgactattttaataggactgcggaggagaaattttgtctagaacaaggtcgcaaaagatctgggaggcgatgaaattgactaaaatacccctaaactccaaaccaaaccactagttgtttccacgctctccacttgtcgtacatgcattgctcttccgggtcgggttttctttgctttttttactcggctacgttttttatttacagtttcacccctctttaactaaatatttcacatttttagctctcttgtttctgctttattctgaatttgtcacgatcaaactatcaaagtgaaatacatttttacattcaacaactttttcatcggagggtggaatttacaaagtcttgcatgatccatcagttatttttaacagcttattactaaatttagtaaacgagtagtatcactactcgattcaatttcactccaatttctataaaaaaaaaaatacatgacaatccatattattctttatgttaatagtttaatcgtgatagatagaatttaacaaaagaaaactagtgtggatcggattttctactttgatattaacaaaaaaaatagttgcattgtaaactttcttatttaccactatttaaaaaatcataagagaagtaaatatagcttcgctccttaaaatttatgtaataggtgcttacaaaattaggtttaaaaggatggtgggtaatagagtaggatacatatgcaaagtgagaactaaaagagaacaacactagctacaccttttgggtcaaagaaaatggtcaagtccctggtaaaataaatattgagccgcggttaaataacattttttggcatactgtatataattgttttccgattaaacgtagctaaactaaaagatcaaatcgaaaactttaattaaaagtagttaaaatattaaggcttgtgaagaagttgagagttcgagaaacaaaaagaaaaaggcttgtggggaacaacccgccagatgaggaggcgggtttcctctgtaaataacgaagcaaataaaagtaattattttaaggtggataaaggaaggcccagcaattaaggcacgtgattagggctttcatgtcctattattttatgtctacaacatttcgtatcctatacttatactttattcaacctccaatatcttcaaccttatgtttttaattttaatatggagtttgtatctttggcaaataagatatttatctagtgtcccttggtttctaaagaaattatctaccgtcctttaggtagatgaagtgttattttaccgcgttttctaattcttatttttttagccaattttcctaaaacgtctgtacaaacacaatcaaacaatcaaaactttataagatacctaatcaagcatcgtatttttatagtacaatcaaaacattattcaaataaattattattttgtttagatgaagcatattttgttgtatatgcatggttttatacaccaatttttataaatatttacactatttgtttttagattatatatcatatataaaatctattatattgtgtctttattgattatatattaccatacgtaacaataacatactaacatccaccacaacagaagcttacatgttttaagcttaaacgagtaatgtcgatataaagtaattttgttgataggtcgaaacgagatcttagcataagaatgagtgaacgttgatgcgcttgattccattagtgcgggtaatggatcagagttaataacaatatatttctagtggacgtgtgtgagtaggtccacatggaaattttacaagaacttgacgtgtgtttaaacagacaattttggtcgagtcccttcttatatgaatgtgaaccagcaccctacggatagacggacacgacaatggcaagtatcatgttcgttgaccatcaatacattcgtaatcagaccaaatccaagagctatacggattgttgccatgtgtatagctcttggatttggtctgattacgaatgtattgatggttgacatgtaattcgtcaaaacgttagtaactgatgctctacaattgtcatactttcgtgatttacttcactatatataagccagtatgctcgactatttgcatctaaaatatggagacaatcgcctagtctttatttataaatccatctttatacttctttatatatgtctttcgttttaatagtcgttcaacatcctatagtcaaaatatgctgaaatgatgatatatctaatcgaaatccttaaatcactttctatggttctaaaactttttaaaatggttaaaacatgttaaaaaccatgtcgctcagtgatccaattgacaaaaaaaagttgatggtcaatcacatatttgacaagtatattgtgtacaaatataataacataaaccgtaatcagagattgtcgttcatactcaaacgtagaatccagttcacaataaaagaaaaagaaagaatacgttaaaattatgcgaagtccttcatgggtgtttcagttgttgaaggcattgtgggacgtgtggcctctcgttagggttctggccagagtgatgtggcattatagtcattaaaaggtactggtgatacattcggttacatacttttaaatacctaaacatttatccttgctcttattattgtccttatactcaactcaaagttttctttttggtatttttcagtttttacaatgtgttctctaattatttgtgtctctggaagactttgcttaaaaatctctcatgggaaatcacacgtggggatggtcacacctgcccctttcgtatcgaatgttaagttgttaaccttttaaacgatattaggtcgaatttaaagattccgaataaagatatactgttcaactgcggataaaatatgatgcggttcaaataataataaaatatatatatatataaagaattttgttactatttgaaacacattgcactgtacggctcgatcacattcaaagccaaaatttatacacatacacatacaaatacacatacacatagatacaaatgcatgtataattcttgttgaacaccgaacacatgtatatagtaattttctgcgatacttaatatctttacaaagtgccacatcaacacacgtggctgaatctagcaacttgagaggataagcacatgcttccacattagcttcgtctttccccttttgaatcacacaaatattagatgattaattcgatcacacgtacttagtcttataccatccatatctatatacgacttttatattgatcatatcatagttttctgtcctccagtagtataatcagttttgttgaaattgaccaaatatattctctttgtttggtataaggtcatattatcatatggattctttctctttgttattccttttttttttttctcaaactctttttgttattcaagtttctaaaaataaactccaagataccttgttaaattgtaaggtgacagttgcagacggtctttgatcataatgatcttataataataatttggttaaaacattgtttattcaatcattgacaaatacgtgcaaaaaatatttgcacagtctagaatatgcaagttgtagtggattgttgatttatattaaaactctattatgtcacagactcaaagttagatagatattcattataatttcgatgatagatattccgagtagtctatatataaaactaaattttctgtttcgttaaaaaaaaaaaatccgatactaaaacgaaaaccccatcactaaatacagagttgtagttgagttttttcttatatgtgaaaccaggtattcaaaatcaattataaaaaaccgcgatttataattataataaataaatatattcgtattagtaaggaatagaatgataaaaaaccttaaataccgaattatatcgagttcagcttacatataaaagaagtgtagaggtgtgaataatatgaacaaaaccttaaagatcttttacttgtgaagtagttaattagttcttcttaaagagtcttttaccaacatacaagactctcctaatcatcatccttatcttggatacccatcaaatttctttaaataatgcaatatttatgattcatctaatgaaatgttgtttatattttgggaggtccaataacttggtggtaagtgtatcagttgcttttgacctttgaccgaggaggcacgtgcgcagcatcttttgattcataacgtttctctggtcgaagatttcggtgttgcacgtgcgaccctgtcctccttattatcttaatctctcatcttttgtcttaatctccttaactaaactttctctttaattctttttgttcctccccaaaaatattgcttcttaaaatatttgcactttaacctttgtccctctttttaaaatctttaggatgttttggttgtattaggcaaactagtaggggcaaagacccaaattagcagtgaaacaatgtaatttttaaaaatggtggacgtttgattgtttgatttgtacaacttttcgtacagaaattacgaagattttattgaaccgatcggttaaggtatctcattgaacaattttaaaatttttgatttagagaaatctcattcttacaaaatgtttacataatgcagcgtatcgttaagtgaattagttttcggctaatatattcatattaaatgattttgattgaattttctataattatgttaccaatccttttatttgtgtacttttaaattttgagattactatctgatgctgaaagtatttgacataaatcgaatgtcaggttttaaactgtattgacataagaatttagaatttcttgtaatagcaagtttcgaaagatggaaataaattgcgaaatgtagtgatgatatgtgctaaataaaatcaaacattaattacatgttaatcgtaggctatagacacacataatcgacaaagagaaaagcataaacatgtattttttctgacagtaactccgtgtttgaagggtaagattacccacttgaggtaatgatgttaacactttgcacacttcttaaagaattcttattatgtgtaccatagaataacgagtaaattttgggtacaatcactaattaaaaaagtaatagactagagatagacgttaaaaaaatatgattagtttagtagattagttaatagtgacaaaacctgatatttgtttagtatctttcttttacagcaaaagatcacgaagaggatgtgtgaatattgtcccttagtcaaacaaaacagccgtgaacagcttagactaacgcgattttgctagctgtacatagtaattatttataattttatatgtttattacaacctaacaaaagtaagaaaataaagtaattcacaagcttaaccaacattattctaagtatatattttctttttgacatttgaggcctaatcacaagaaactgaaaagtaaaaaaaaaatcagatgcaaagtagaatttgtcttgacgtttggtgcattactttgttttgaagtcactgtttgtaaacatttgcaatatatattatttaggcaattgaaaatattaccgtaatttgaactttgtttaacaaattcaatagtccaatactaacggggatatgtaattttttttacaatatgattggattctcataggttttgcaatcgtcgtacaacaaataagatataggcctttaagtgagaggatccagcaagaagatcaaaatcccaactcaaaagcccatgtcttgtctttgctttagaccaatctctttggagcaaaacatgcttattcctagatttagccttatattgatgtttacgtttgtgcataaaacaagaaagacgatcccatgcaaataagaaaagatttaaatccattaacacaattgatatgtagtagtagtacatggaaagatatgtaaaagttttctatgaaccagcaggcttcttcatcttagacaatgaaggttgaatacaagagaaaagggatagtctttgcttcttcggttttctatcgaagataaatgacctcaaaggaatacgagaacgatcttgcgaagactgtgtgtttgattcagaaagtgaaaactcctcacttagtttctcgagtgttgtatcagcatccttcatcagttttgtaacttgatctaaacctgtttgcaactcttctgcaatcctattgttttccttcttcatgtttgaaacctcgccttcgaatttggctccttggtagattgtaaattttatttcagagtcttcagaatctgttttgagagcttctgttatctcattgtgtatgtcactcaaagttgaagctctgatgttgatttcttcttttaaaagcaaactcttctctaaccaaacagtcatttcggtgcgaatctcgctgaggtgtttgtatatgggacgaacatttgatctcagagtgttttttcctccatcttgattcttttgttttatgatcttcaacatctcaccatgtaagtctttgatccctgtgtcaaactgttgtattttgccaaaagagttgctaaacctcaccaataagttcaagttctcgcttagtaatgcatcaactcgtgctcccaattgctcttcatttggtgacatcctctgtttttgaccagttattgcatttgtggcgttattatcttctctgcaaattagcatgaacaattggccccgttgttgatccttgccttcatctttcaaggtgtttacatttttcagtttagtttcagtttcatgtagcaacttcttcacttctttatagttccgaagtactttggtgtattcagttaacaaatgtttttctctgccttcgatcccatgtgcgagcaacttctgcaagaataactcatctgatgactcttgtgttgttatgatgtctgattttggtgatgagatgtgtttctctaaatcagataacgaagcttcctttgttttagtttcaatagcctcttcttggttaacttcatcggaaagatccttttcagcaaaaaccacctcagatgctgatttaatgtctaaagcattttcagacacaacggtatcatcaatgttttcctctggaaactttgtatcagtcaaagatcctatatcttgaattggcacattagtagcctttaattcttcatcttccccttcttgcgtcaagctttttaatctcttggataagaaacttagtttcatatgtgctctcgtaagatgtttatcaatgttgtcactcttttcttcaacttcttggtctatatctttaacaccattcaccttttcctccatctctttcaacttctttcccatgtccatattgtcatcagtttgagatgaattgttttctttttgtagagctctaatctgtgctttgagatcatcgatttcttctcttagtctgtgtattaaagctgcttgagatgagaacaaattctccaaattgatcacatcattcacaagctcatcgattttatcagccacgtctggaatagtaagacatgacttagcctcagagtcatcaaactcatcatttaccttttctcctaatgactccaacttctctttctcgctgtatatctcatggtttcctttcccatcaccaagcaatgcatcagaaagattaccaaattcctctgttgattcactgatttgttttcttgaaacatctacttctttcacattttgttcctgtttatctctcagctcttctagtttctcttggcatgatttgagagctgtggtagacatcaatatctgagcttctttatcttctataacaacagcaccttcgtcaaactcgtcttgcaaactagaaactttcccttgtttctccatgatacatttctcaatctcccaatactttgcaagtccattctcataagaagtcttcacaaactctttctcagtttgcaaaacaagaatctctttctgcaacttgtcaatctcttccaccgcctcggttttactcagcccggacttgttaacaacggacgaggcattctgttcttgaatagctttccttgacatgaacatcttcttggcagcctcagggtcttttatgggcaaatcaggaacttttggaacattcttatttgatgtcttatttttatggtgtctaggtgagacaggagcatcatcgtcgtcatcttcgttcatggcaaactcagggacttggtcaggaaaaacagatgcaattgtggtgttggcgttttgaagctctttagagatatgatcataccgctctgctaaagcacgataagccttgaaagattcttctacaaaacttatcaattcaggccttctcttgtaatacatttctgcacgcttagcaaatgaatcaccttcatcttccaaaagcttaagtgcatattccaccttctcctcgatatctacataaacattttatcaaaaatatgtggaagaagtgaaaaatgatgataatatggaatgtaaaaatatgtaaccttgaaggttttcttcaagccatttggattgtttggttcgaacgtggcttgcccaccaccaggagtacgcattgctcgcagctcttcgtagcatctttattctctaatctttttcttgaaaaaaatttcaatcaattgaacaaaatctcatctttttctggaggtttcgttcatgacaaccaaaggagatgtgttttttttctctcgttattattgttgttaatcttgttgatagagaatggcgtagagaaagattcggtgatacatagtattaatgataagttgctatttaaaacacatgcaacattggatctgaataatagtccaaagcataatgctggttgattgatgatacattgatactcgtactaattaaacggtaacggaaacaaactagtctcgtcctcttttttttttggcttctattttaagattagattgtgagatcatagttggtcctgaaatcaccatggacagtgcaaaaacaaatagacattccattaagaagatatttctaagatatgtacattatatttgatagttggtcctgattcctgaaatcaccatggacttgttctttgtttttctttctatattcgttcctatgaggatgattttgtaaataaatatgcccaagcatcaattttttatacgaatctattagccgcaacaagtctgacgtgtcgaaatacgtggcaatttgttcaccactttccactttacacggaacgtttctcaatacgaaacggcatcgtttcttgtgtctgctaaatgcgaatccccttgttcgtcctgtcttcgaagaatctccctgaagaagacttcaaaccctagaattttgtttgttccctcgatttttgattcactgggtaagtattttatacccttaatatgtttatggttctttaccgagtttcgattgtaaactccgatttttgaattcgggtttcgtctggttttcatgaggaattttaactttgtaagttttgatgttggatgtttcctcgagatgagattaggttaaaattagctgttttaagttgagttaagttgggattgtgatcgagaattttaatccaagttgtagattttaggttactctctggtaatgaatatggcacgccgacgaaattgaatggtcttgtgttttcgtaagctctagttcgttctcagttcagtagcagattttgttgattgctaagaatcttaaggatcacactgccataggttataattgcttcaactattctcacagttttgtgaatgagagatttggaagtttaagaaatgcaaattttactactttttgttccacccaccgaagctagactttcaatggtctactgtttgctgtatctgaatcatacacacaggttttaactggtctgcttcatttctacggtgcagagtttgtgttggcattcattagtctctttccgttaggctgtgaggcttatgatcggtgccactaacgttactggctaagtcattgaatctgattaaaatatggccctttatggtacattgcagttgtctcatagtctgggtttgtgcagaaaccaacggttttgtaatccagaaaatgtatgtttcttccattttagccctgacatccttttcttttaatcatttcttcccttcatctttcgaaaaatgtacaatttttcagagtgccatgagaaggaggctgcatatatcaaatggtcctctctcattaggtgttccggtaatatttcaaacaaaatttactctagcctttcaaattcggttgctgatagttagtaacattacttttctgcttatagttgggacaacatggtttcagcaacatattactctcaaattaccttcgtaggcctatttgttcagttccatgcagaaccaccgcttttaggtgtcattccttttctgcaagcggcaaggcaattgaacctgctgttaaagctgtcaccgtggtgctaacaaagtaagactccttgtttcctatcatcacatgcagaatgaccaccttgtaaaattggaaactatcattatttttatttagttgatcttcatggatctgaatgattgcatagtaatatttgggcatctaactcaaaatgaatgaattaactctactcataaacattgtggacttgagccaaacattgatgtatgcaggccttgtcattaccatggctccccttagggaagttgtaatttttttggtggggaaatctgagggggtgcatttatgtttctcgtaatttctcttctttttttattgcactctgtaattatttgcattccgttttttgcaggtcacacgggttgatgcaacaattcccttttgtatataaattggttccagctgttgctcttcttgttttctccctgtggggtctagtgccttttgctcgccaaggaagaaacatactactcaatgtaggtgcagccatttcaagtttatatgcactttttttttgtttactgctttcatttctgtgttgtctcagttcaaatcaatgtggtatcttttctatatgagattctgaatctttacctttgaatcattgtagaagaatgataacggttggaagaagagtggtacgtaccatgttatgacttcatatgttcaacctctgttactatggttaggagctctattcatctgcaggtatatctatcaagtagttcctcgggactttctgagatttaattgttgagatattttggtggtatcctcatctgaagtgcttggttgagataattgattgctggtgactattccttatatagggcattagatcctgttgtccttcctacagaagctagcaaaattgtgaaggatcgactgttgaattttgtgaggtcattgtcaacggtacttgcatttgcttactgcttatccaggtaagagtattgtctaatttaaatacaagacttcgtcttcatcttatgtttctgtattttagtggcttctatcacgtgaaattgctatgtggccatctcatgacttctgattctttgatgttcccatgcagtcttatccaacaaacacaaaagctattctcagaaacgagtaatccgagcgatacaagaaatgtatgtaaagtgacactcataaaaagtgctttaataatacattttgtagagttattattcttaggatgtttggtctattttgcatatctgtctacgcaagatcagaaatctctatcaacaatataattggcttctcaatttgttttgctaatttgcccctggaatggtacagatgggatttcaatttgctgggaaagcattgtattctgctgtatgggttgctgctgtatcacttttcatggagttgctgggtttctctacacaaaaatggctcactgctggaggtcttgggacagttttgattactcttgctggccgagaggtgaaacctaattctcattttaattactggtttcttcggaatatccactgttagctttagacgttccttttcctgttttatgctaaagatatttcataaaaactgagtttttttttgttttttggttccagattttgacaaactttctttcaagtgttatgattcatgcaacccggccatttgttttgaatgagtggattcaaacaaagatagaaggttatgaagtgtctggtactgtggaggttagaatctctgagcttagatgatgtgaattttttcctagcttcggtgcacgtcattgccatacctgaacgtttccttaaaattagctagctatctttctgaattgcttgttgcaatgcatttacagcatgttggttggtggtcaccaacaatcataagaggtgaagaccgcgaggcaattcacatcccaaaccataagttcacagttaatgtcgtgagaaaccttactcagaaaactcattggcgtattaaaactcacctagcaatcagtcacttggatgtcaacaaaataaatgtgagttttctaattcccatatggtcgttaactctttatacaagttaaggtccaatcatggagtttttttagctgatccttgtttggaacttcctcaaacagaatattgtagctgacatgcggaaagtgttggccaagaatcctatggttgagcagcagaggttacatagaagggtattcttggagaatgtcattccagaaaatcaggccctctcggttagacttcaatacctatctcttcttttgcacccatcttcagatatttcaggcagctttggaaggtctggttcttacatctggttctcgtttttacagatactgatctcttgctttgtgaagacgtctcatcacgaagaatatttgggtgtaaaggtaatttttcagtcttttatcttatcatctacttaaagttcacaagaactattgacttatttgctttcgttttcttgtattggtgaaacaggaagctatattgttggaccttcttagagtcataagccaccaccgagctcgtctagctacaccaatccgtacaatccgtaagatgtacacagagactgacgtggaaaacacaccatttggggaatcgatgtacggaggtgttacttctcggcggcctttgatgctaattgaacccgcttacaaaatcaatggagaagacaaatcaaaatctcaaaaccgtgcagcaaaaccaaccgcagagcaagaaaacaagggctcgaatccaaagtcaaaagaaacgtcttctcctgatctaaaggcgaatgtgaaagttggagaatcccctgtttctgataccaacaaagtacctgaagaaacagtagcaaagccagtaatcaaagcggtctcaaaaccgcccaccccaaaggatacagaaacatcaggaactgagaaaccaaaggccaagagaagtggtggcacaataaaatcaacaaagacagatgaaacagatagttcaacatcatcagcgtctagatcaactttagaagagaatatagtactgggtgttgcactagaaggctcaaagagaacacttccaatcgaagaagagatacattctcctcccatggaaacagatgctaaagaactcacgggagctcgcagatccggtggaaatggaccattggtggctgataaggaacagaaagatagccaatcacaaccaaactcaggtgcttcaaccgagccgtgagatgaaattcaatgagttagctatttttttataacactctttgatgtaatatacgattgaaattaattgaatttaccctcccaaaattctggaagttgggggttgataatgtcgtatattaaatataggggtggtttattgatagttgggtgaaagtatgggtttaaatcataaatatcagaagaagacggttgagaagtagcttacctgtctctagtcatgatgtaattcataaatgctcctctcctccgatctctccgccataaaatctactctttcttcttctgggtgttcaaagaattagtcgttctcgcgtattcactttccatggcgggctttctctccgttgtccggcgcgtgtacctcactctctacaattggatcgtctttgctggatggcaagtcgagctcgactctctttcttcttttgtctagtggagtttttatttttctctcggattgatttttgaattttggtgacatttggggtattagggctcaggttttgtacttagcgataacgacgttgaaggaaacgggttatgagaatgtctatgacgccattgagaagcctctccagcttgctcagactgccgccgttctcgaggtccgtctctcgtgacacaattcgtgttttatttcttcttgttttgttgcatttcccgggtaattagagaagaagaagaatgatttggttcacacttgttgcaactgagtatttgttttttttttctttcctctgattaaaatctggattttggaattttccgggtgtggagcagattcttcatggattagtaggtgagtgatctgatccattagactaatttcgaacttgcactacaccattttgattaaactctttttaagatcattgactgagttgtgttctgctgtgttgctaaactcgaataggtttggtcagatctcctgtttctgcaactctgccacagataggttcaaggctatttctcacttggggcatcctatacagttttccagaggttaacttagaaagttaccagcattactagttcattatttctctttgattgttgcaagtttcatcatttgattgttgaactttgtttcatttaatttcaggtccgatctcattttcttgttacgtcgctggtcataagctggtctatcacagaggtgattatatctagtctctgtgttgattttggtagccattgatatcgctcttactaggagacatttattagattcgttgtatgccataaatctgaaatgtctaaaacattgcttctcttactgatgctttgaaagtttcctatcacaacatggattgttgaagtacagaacaagagattagctgttaatatttcgaacagtcaagatttgacttaagtatgactccttaattactccattttggttgaagtcttatcctagtagcgtccttttaggataacgtgcttcagttcatatgtttgatgaataactcgctctgagcgcagattattcgctactcattcttcggctttaaggaagctctaggctttgcaccttcatggcacttgtggctcaggtatgccattcatgtgcaatataataatagacattgaaaaacagattaatttgcaactctaatctcatttatttctctctcgttaatctgttcagatacagcagctttttattgctataccctaccggtatcaccagcgaagttggtcttatctaccttgccttaccacacatcaaggtaacacaactggctcatgtcaattccttaaacagagaacaattctttcctttacaatatcatttctttacgggttgttacacccttttgtgtattagaatttagagctcttagagtagacatgaactgttaaagccatttccctcagactctagtagacaggatctgtttgttgactttcaagacgtcactgtaaaataatccatatatagacttaactttaatgccatctataaagtttcagattttctgttccactggtatcaggggagagtatatatatggttgattcctgaatggtccctttgctctttttttttctttttcttttgtctgcagacatcggagatgtacagcgttaggatgcctaacatattgaacttctcatttgacttcttctatgcaacgatactcgtccttgcaatctatgtcccaggcacaaactcagtcaacctttcttataacatatcccatacatctgttcaattctgatctgcgagactaaatttgtatttggctgttgcaggtagcccacacatgtacaggtacatgcttggtcagcgaaagagagctctctccaaatccaagagggaataaaagaaaagatttagaaagagacgaaaaagctcatcaactgttttctcctcttgtcttgttcgttcatgtactactagtctactactacaacttgtcttttgtttagcttgtttgagcttttacttcctcggcgattacttgaacttacatgcagcaggatactattaagtgtaatgtggtttctaaattaataagaaaatcattggttccttctcagtagaaatgaaaaagttgatttaagctaaaatttcccaaaaagtcgaaatggattcttaataatatttatgaaattgaaaaaaaatcaagaaaattgtgaaattattgggtcatatcgtcttatcatggtttaaatatttaaatgcttttgagatgatcacgagtcaaatttactttgcccaaaataactatcaaaacttgtttttttgtgatatataaaagtcaacgtagttcgttagtgagagatttatcatggaacacgataaggcgtcgtgaagtaacgcagatcacaaaatatttgtgtctgaaaaggcatcggcgttgtctattttcttaaatataaaaattgaaataaatataaacgtcgtcgtttggaatcaatcaaaaggaccttctccgcctttcattattttgtataccaaaccgagggaaaaatccacagagatgaaccaaaaataaaaacaaaaatctttgattatttctacaaaaataaaattcgaaaacttttgaattctttcatttggctttcgaagctgctgcttcaattcttgctgctttgatttgattttttttttggatgaaatggccgatcagagaagtaaaaccaatagatggaactgggaggtgagtgggttcgaaccgaggaagtcttcttccaatgcatcgtttgcggagagtactggtcaccgtacgactggtcctctgcttcgccggaactcgatttcgactccctcgcttccgcctaagcaagcaattgcatctaaggttaacggattaaaggagaaagttaaggtgataaatttcacttcctttttcacttcacagagtatacttggcttttggttttgagctgaattaattttataaaaggctgcttttagtttcttaagtctagcttgtgggatttgatggaagtttttagtgttgaagccattacttatcaagaaaaaaaattgtgacttggttgaacagcttgcgaaagaagattacttggagttgagacaagaagctactgatcttcaggagtattctaatgctaagcttgacagggttacacgttacttaggtgttttggctgagaaaagtcgtaaattgggtaagttttgtgtttcactagtcgtaaatttgaagtctatgtaagttgtgtgcaagcatcgagaaaaactgagtattcattacatttggtgcatttgtgaccactggagaagttaacaacactagaattggttggcattttcccaaaattgaaacctttattggaaacttcataaatccatctactgtatctagctctcgtggttgcgtttatttatctgttttgtggtggaaatttggtagtgtgttgtattgatttatctacgtaaaccaccacagatcagtttgtccttgagactgaggctaggatatctccacttatcaatgagaagaaaagactgttcaatgacttgttaacggccaaaggtacacagcttccataaccagtatcatcgatctttctatatcgataatctttctttggtataggttcactgatgtatgatagttctctgctacctgttggttaatgtggatttgtttttcgtacttcagggaacataaaggtattttgccgtgcaaggccattgtttgaggatgaaggtccctctgttatagagttccctggggattgcaccatatgtgtaaacactagtgatgatactctgtccaatcccaagaaggactttgaatttgaccgagtttacggacctcatgttggacaaggtgagtaccatagttcattgtaaaatgtagtctctccttatgtcatgagctgtttctggtttcaatctacaaaagctgcaacaatacgacctctgtacttatactgtaatttttgctcagctgcactgtttagcgatgtccaaccttttgttcaatctgcactggatggatctaacgtctccatattgtcatatggacaaactaatgcagggaagacatacaccatggtaaccattcttttcattttcctctgaaagttaacaaataggtcacatgttgatgttgtgaagcaactatatagatggacttgctgttactttctagtgtctagctttgcttgtatgtgagaatttaacatagcttatgatgtatatgcggttacttttcttttgaagaatatgctcattctatagctctcatgcgttcatttgcttaattacatgcttattcttcttctatcgggttcagaattgagcctgggataagcttctttctggagttatgacatatgtaggatgcatatcaaactgattttgttagtataacaacatgctttctttaatatctgaagtgaatattgtgtctacattatcgtgtacattcacaggcatgtttctatgttgaatgaggtcgttaatcataggactgtctattttcacagtgatttgttattccctatggctctccgttttatcagctttgttgattgttgttttgccaggaaggttcgaatcacgatcgtggtttatatgctcgatgttttgaggaactcttcgacctagccaattcggattcaacttcgacatcacgattcagtttctctctttcagtgtttgagatctataatgaacaggtgcttccaatcgagtttaagtactaatacttttgggtttcattttctttgccaagatagttctgcagtggaatttgacacttctaatttgacaaccttcattgtcagatcagggatctactttcggaaactcagagcaacttgcccaatatcaacatggatttacatgaatctgttatagaactcggacaggaaaaagttgataatccattggagttcttaggagtcttaaaatctgcatttctgaaccggggcaactataaatcaaaatttaatgtgacacatctgtatgttttatattgtgcttgaatacctccttcggttacatgcatataattatctgctaaggaccaagattctttagcacttctttacggatgttttctgccttggtaggattgtctcaatacacatatactatagcaacacgattactggagaaaacatatatagcaagctctctctggttgacttggctggaagtgaaggtttaatcatggaaaatgatagtggagaccacgtcactgatctgctgcatgtcatgaattcgatttcagcgtatgttaaattcttatatctctgtatttatccatgaatttgttcttgttaactttgtttatgcatatatttctggttctataggttgggagatgttttatcctcgttgacatccggaaaggattcaattccttatgataattcaattcttacaagagtacttgcagattccctaggtaaaatttgttatctcagtacatgcatctttcctcttttgtgtcacccttaatagtatcatcttttgtttttgtttttgttttgccaccatttcttaaagctctttgtaagtgagatacaatattctgtaatgtgtaggaggaagttccaaaacattgatgatcgttaacatctgtccaagtgtgcaaaccttgtctgagacaatctcatgtctcaattatgctgctagagctcggaatactgtaccaagccttggcaatcgagatacaatcaagaaatggagagatgtggtaagtggaagtgaaagagatttttccttctcggatattcattttgttacaaaatttgctgcataggtaaccttttgtcccgcaggcaagtgatgctcggaaggagctgttggagaaggagagagaaaatcagaatctgaaacaagaggttgtgggcttaaaaaaagctcttaaagatgcaaatgaccagtgtgtattactctacagtgaagtgcagagagcgtggaaagtttcatttacattgcaatcagatttaaaggtcataaagcttcaccagggttcttgtttagcttgtcaacaattctttataacttttttgttgttgctcattatccgttttgtacttcatgcagtcagagaatattatgcttgtagacaaacatagactagagaaggagcagaattctcagttaaggaatcaaatagctcaatttttacagttggatcaggaacagaagctgcaaatgcaacaacaagattccgccattcaaaatctccaggtttgtgccccatgagtgttagtatctacgctttaaagttttagatctatgttaaggcaactgatttttgaaattgttgacttctctgtacatgatagacatataattctcctgttgttcaattcaaattaatgcaggctaaaattacagacttggaatcacaagtaagtgaagccgttagatctgacacaacaagaacaggagatgccttgcaatctcaggacatattttctccaataccaaaagcggttgagggtacaactgattcttcttctgttaccaagaaacttgaggaagaattgaaaaaacgtgatgcactgattgaggttctcctccctcttactctgattagagttcgtgccctctggctgaaccatggatatttgcactagtacatttatctgaagagaattatgttttccgcagaggttgcatgaagaaaacgaaaagttgtttgacagattaacagaaaggtcaatggctgtttcgacccaggtcattattttctcttgtatagctatgctatattaagcatttcaatatcatatcaaggcactgctctcagctgttaagagaaaaattaatttaactccattctttacaaattgctactgtatgttcaacactatgcatctggaggtttacttgctaccagtactccattgcttaagtgttcttatccattttttttttattaggtgttgagtccctcattaagagcttcgccaaacattcagcctgccaatgttaacaggtgattccgtgattagtttgaactactgttttctgtttctgtcctttcattataattaatccttattatatactgatatgtaatattctgtctccgggagaactagtaggggtgaaggatattcggcagaagccgttgctttaccatctacaccaaataagaataacggagcgattacgttagtaaaatctggcactgatttagtaaaaaccactccagctggagaatacttgacagctgcattgaatgactttgaccctgaagaatatgaaggtcttgctgccattgctgacggcgcaaacaagctactaatgctggtacttggttaagaactagtttcttagtatctttattagacttttcagtggtgtagttatatgacatgacaccattgttctatcataatatgaagaatgaaggttatgatggattcctgatgtctctagacactaatatcggttaaggacatgtttttatatcaacttatattggcaagcatttttcctattgttgactcgcaggttttggcagctgtcatcaaggctggtgcttccagagagcatgaaatccttgctgagattagagattctgtcttttcatttattcggaaaatggaaccaagaagagtaatggataccatgcttgtttcccgagttaggatactatacataaggtccttactggcacgatcaccggagcttcagactatcagggtgagcataggcatccgagttgtatctgatttttattttagctttggccttagcttgtatgactatgttatttctcctggtaaaattaaccctatcctcctcatttaggtctctcctgtcgagtgctttcttgagaagcctaatactggtagaagtaaaagcactagcaggggtagcagcccaggtagatcccctgttcgatatcttgatacgcagatccatggctttaaagtaaatataaaggcagaaaggagaaacaagttggcatctgtggtatcaagaatgcgtggacttgaacaggtggatttaccttggaagagcacttgaatttcaaagatgcttgagtttatctaacatgttatatattaagagagacttatgctcttgattgttatcatctaggatgctgggaggcagcaagttactggagttaagctgcgggaaatgcaagatgaagccaaaagttttgctattgggaacaaagccttggctgcgttatttgttcacactccggctggtgaactgcagcgacagattcggctatggcttgcagaaaattttgagtttctttccgtgacctcagatgatgtatcgggaggaaacggtggccaactagagcttctttccacagcaattatggatggttggatggctggactaggggccgctgtgccacctcatacagatgctctcgggcagcttctgtccgagtatgcaaaacgtgtctatacttctcaaatgcagcacatgaaggtatgcgatgtcattggtcaaaaaatattttttgagtggaattggcagatagacattcccaatggtctgaaatgaaagatctctttaagtagctgatgttgtggctgactttacggcctatgttgaggtctaaggactaaggttttagtctgagtaattagtttggagtgatgcctaatatggaactgtggtacaggatattgctggtaccttggcggcagaagaggcagaagatgctggtcaagtgtctaagcttcgatcagctcttgagtccgttgaccacaaaagaagaaaggtactagaccgcacctgaaaataaacgatatagttctgggtgctttgatttttatcttagaaacgttcttgtgctctgactttcgtttgctttctttatcagattttacaacaaatgaaaagtgatgcagctttgcttaacctggaagaaggcagttctcctattccaaacccttcgacggcagctgaagactcaagattagcatctctcatttctctggatggcattttgaagcaagtcaaggtatttatacctcatgatgcttcatactagatcttggtttttggttaatttttggtcaataacttattttgcatcttgcaggaaatcacaagacaagcctctgtccatgttttgagtaaaagcaagaagaaagcattacttgagtcccttgatgaactcactgagcggatgccttctcttcttgatatcgaccatccatgcgcacaaagagaaattgctacagcacaccagttggtcgaggtacctttgatttccatgtataattagtttatgtataatcagtttctcaatgaacctaccatagacacaaagaactctacctgatataatgatgagatccggattgaaatagtaaacaaactaacttgtttctcttgaccgcagacgattcctgaacaagaggacactaatattctggaacaatcacacgaccggagaccctcattagaatcaatatcctcaggtgaaactgatgtatctcagtggaacgttttgcaattcaacacaggctcttcagccccattcatcataaaatgtggaggcaacaacaactcagagctcgtgatcaaggctgatgcacgcgttcaagagcccaaaggaggtgaaattgtcagagttgtcccaagaccttctgtgctagtaaacatgagcttagaggaaatgaaacaaatgtttgtgcaattacccgaagctctaagtttgctggctttagctagaacagctgatggcacaagagctcgctactctagactctacaaaactctggccatgaaggttccctctcttaaggaccttgttagtgaactggagtaagatacctaagtcgtgaaatggcatacagatgttgcagagatactatccaacaatggagattccatgtgtatttattattttttgtgagatttttggctggttatgctacatatgagctacagattcattgtgtaatatgtaacttcattttgtattcacacagctataaattactttctcagcaaatgagctttttaaattactctctctgagtgttaaatgaaggcaaaatgtagttcaagaagcaataatatgatttgtacaacaaaacgaaaactaccatttaaaggctgataatacataagttgggaatgcattgtgtttagcagtaagggtcttgactgagtctagacttgcagtttcatcaaaagaagtgagaccaagctcattaccatgaatccctccagtgatgaatattgattcaattcctgaaacatttgctccccttatatcatgatgtagcgaatctcctactgcgatagactcagacggattgactcccgcaattgctatagcagactcatagatcatctaccaaatatacacacagtcaaattcaggtggtacagagagaagtagcaaattttaatgttcaaacggattttacaccttatgaggttttcccatcgacttcacttctcctcccagttcttcatacttggaagctagtgtacctaacaaatttgtgattgagtatatcagtcttttatatggcatcatatgtggaagacacaattagacattttgagatgtaaatatatgtacctggcatgatatgaaaaacatttgcttcaacagtcacgtaatctggattagctacgatcatgggaagtcctcgagctgcagatttctccaaaatcttctctagctcatcaatagtccttggagatacactgcctgaaggaagtcctagggcttcagtgccgtgcgctaaaacaaagtcagcttcttccacattctccacaacatttagatctagaccctgaaacataaactatatcatatacctaccaataaccttcaacgataaatcaaccagcaacaagaaataaggtgataagtaacctccaaagagattgctcctcggtcattccaagtaatgtgaatgcacctccttcccagtgcagcaaaccaaggatcatctctcctgtaagagacatctatcagtaagttctagtaactcagtaagtaaatagcatcttaatcacgaagaagaagttgttggtaataataacctctgcaaagattgatgagttagttcaccactagttatagctccggtgaagaaagaaggatcaaagccaaggcctttcaacttttccattgtagttgaagcacgtctagaagaattactaatgatcacaattttggcacccgctgttgcaagatttttcactgtaaatccaatagaacaaaagaaagatcagtcattatgcagaagtcagaattacaacgaaaccgaagaaatctgaaagaaaactatcaagaaatggaaattctcaaaagtatgatgatatttcattttcggtttcacaacttatatggacaaatatacattgccaaatcacatctgattacatcaaatatagtcaacactgaagccaagtcctacctaaacattaaacagtttaaagaaatggttttatgcgagctacaaatgttgaaccccaatggaatcagaatcaacaacccgaatagctatatgctcacagatagaaatgataacgtacatgttgagatagcaccggggtaaggttttttgccatcatgaagaactccatactgatctaagagccaagcctgtgacacccttcatcaagtttagctataaaaaatatcttgagaaacattcactaagctacacacattcttctttaccaaatgttaatctcgaaaaaatgtgatggttgctcaaatgaaaactacacttggcaatttatttgtaataagctacaaattctaatcagaatcccaggttactttttttttttttggtgttcttacggaatccaatttacagaaagttgtatgcttttccaaattacaaggctaatattatacaatacgtgaagcccattagttaacaagatgaagtgaatcgaaaacatgatgattttgtagacaatcggatcatcagactaacatagatatgttaatggcttcgctcgtcataagaggaggagaaagtcagagagcacataagaagacagtaaattgaaggtcaaaccttaaaatttctcgtctcaactatgtctttgaggccattcattggctgtgagagctgcgaggaacagaacatttttcttcctgtgacgagaagaagaagaactgaagagaactggaccaatcgaaaaacaaaccacaaagtgtttttcactttaccacaagcacaacgcatacgtacgcgcaacatacgcgagtaagctccacgctttacttatgtaaaacaacattatatagtagctaatccttcagcaaacaacatagtcgctttggccgagtggttaaggcgtgtgcctgctaagtacatggggtttccccgcgagagttcgaatctctcaggcgacgatatttttttaatattttgtctttcaaaacaatttcccgccctttaaacaaacaaccgctcagttgaccaaagcgccccttctctctttcattcttattttggtggcaacagtgatgaatttgtatatcagatttatagaaacttgaaacgatcgctgagtttatatatatatatatatacattttattaacaatagaaccaaaatgaacatatgagtcatcactaatctaactacaccatgcccaactcttatagctgaatgttcaaagtatggtttctatcaacatattttttctctcttcttctccaagtagtacagtatgcagttttccatatagcgtttacaaaagcatagaccgaagctccattatcaatcttggtgcctccaaattttcgtcctttaacgaattcccgattaagctttgcattcgagtcacaaatatctcatctaaaacctgtaaatcatcatataacaataacaagataagaatcaaaaaggcatatccttattgttttttgcagtgataaagagttgtgaaagagaaaaagaaaaagaaaaatgagttgtgaaagtccaaagtaaaggccgaaagaaaacataacggccgagagacggagcttgttcccatccgtcgatgcaaaaaaaaattccttctggactcacggtgacggttgaccacatgaacgtattaaaaagtctcctttctcggactttgtctttttatttttcacttttttcctttgcagacgacactactactaactattgatttccattttggttaatatactttaatattaaaagaatatatactttagtcttttaaattatgtactttatttctctttaagaaaaagttttcgcattttatgcaacaacaaaaaaaaaggtgtgtattacaaacttcataagtattggaattcataaggcccatattaggcctaataaaggcccaatcagagttctgactttaaaactagtgactagaagctgactcactaaaaaactattatcgtccattcactcgctcttatcacaaaccccaaaccctcccaaccatcccactcgccaacacaaaccacgctcctcactctacgaaagactataacatcaaacgccgtcgtataatcgaaagtgaacacacttgcgcgtgggtttaatatacatctatttttaatagcccacctgactctttgccctttattcttcttctctctttctctttcccattttcttcaaattttccccattaaacaaaaaaaaatcaaatctctctctttctctctctaatggcggcgacattaggcagagaccagtatgtgtacatggcgaagctcgccgagcaggcggagcgttacgaagagatggttcaattcatggaacagctcgttacaggcgctactccagcggaagagctcaccgttgaagagaggaatctcctctctgttgcttacaaaaacgtgatcggatctctacgcgccgcctggaggatcgtgtcttcgattgagcagaaggaagagagtaggaagaacgacgagcacgtgtcgcttgtcaaggattacagatctaaagttgagtctgagctttcttctgtttgctctggaatccttaagctccttgactcgcatctgatcccatctgctggagcgagtgagtctaaggtcttttacttgaagatgaaaggtgattatcatcggtacatggctgagtttaagtctggtgatgagaggaaaactgctgctgaagataccatgctcgcttacaaagcagctcaggttattttcattctccaaatctgatttggctgataagttttgtttgtgaactctgtttacgagatttcttctattggtaatagcttccaaatctagtaattatgtcctgatctagaattggtctctaattgagctactatgcttatcaaatcatgagaaagtagattgctgttttgtttcagtttttgtcttaaagagtaaaaattgctttcttcaaactgatggagatgtttttgtctatttttcgatgtgatgttttttgaaggatatcgcagctgcggatatggcacctactcatccgataaggcttggtctggccctgaatttctcagtgttctactatgagattctcaattcttcagacaaagcttgtaacatggccaaacaggttactcttcttctttctttttcgctgcttgcctcaattaggaacatctctttctctctctttccgttgcctctctggtaacaaacatataagtcgttgacctgagtttgtctcttgagagtttgcttctgtttcttgctttatgttattacaaaagagaattgaccacttgttgactagtcttgttgtacttttttcttttcttaagatgtattgttgggtaaagaaccaatctttggccctctgtgtatcatcatttcttatcactttgaatgagcttgcttgatgttttgactaagaggattgaccacttgttgactatttctgttgtacctttatctcctgagtatgttttgttagataaagaaccactctttgattcatggtgcttcatctagtatcactttgagtcagcttttttaacaaaattcctcttttttaataatcacagactaatatgatgatgaagatccatgttgtccaatactaggactgatgtctcattctgtttcaactagaacttacgtataagacatttagtaaaacggcagaaatttttcactgtgggggcattctcaattttgatactggatttttaattgtaggcttttgaggaggccatagctgagcttgacactctgggagaggaatcctacaaagacagcactctcataatgcagttgctgagggacaatttaaccctttggacctccgatatgcaggtattcacatctctttatgccgtacctcgatattctacaccattcgaataactataaagatcatatcttagtgtgattagtgtttccatcatagaccaatcagatgcatcatataagagacatcaaagaacatgttaaaactgaaataaccgcaaaaccgtgtgtgctgagttattactactctatgtaacaggagcagatggacgaggcctgaggatctagatgaagggggggagggttgttacgcgatgtttctgccaccaaatcgatctcaaaatccccataacctttgctcaaaaactgtgaaaaaagattgaagtgtttatgatgattatgattgtgcacagcttgatgatttatctactctactaaacctctgtgctcttaatatttattgtctcgactctgctcaagccttaaaaacatctttctccttaaggctcctctggttaaattatgatccttctactgtatcgtcaaaatcaagttggaacccaaaattcgtggattttttgtcggtgtgaaactgtgaataataaaaatcgtcaatgttgttacgtatataaaatccagtcaaaccaagaaaatctgtgcaacataggctgtggaagaatgcgaccatagagaagcacacacgtatcaaagaagtcgaatctctcattacgcaaagagatgcaaaatatcaaaagtgtacttggaccactttgtctgcattgcatgcatgaaaactatttataaaaataacagtctttggtcgaattctgagacatttagttgttttctcatacattactccaacttttctttttcttccaccaatcttttcagagaaagatactgtaaaaaccaaagttgctcgctcacacgtgattccagtccacgttcattatttatataaagcttgtcatgttaaaagctttatatgattttaaagatgtttattcttgaagtttaattgtatttggattttcttaagtagtggtattatttttacgggtttcttttctttgaactttttggttttcagttcttttgttaagagttttccttttcagtctaaatgcaaatagatgaatggatcacaatatgtgtgctctccttttaactattatgtagcaaatgattttcgatagccaaaaagacttgagatgagtctcctcatgttagttatctaatgattgcatatgacaatcacatgatcttatgcttatgcagggggttctgaaaattcggtgttctcaagctaattatattgtagtccacgaatatgtttggtgcaaacgatattcacacttctcacctcaccagcaacaatattagcttctaactaacaacactaatataatgactagatattcattgacttggcctctacttcaaattcctaattcgtttccattttgtcactgaaaaatattttaatgcaatttactatctaatgtaatattttctgttcataatttgatgtgcgtttccatgataattttgtattaaaatataaaataatatgaatatattctaactaatatacaaatatattctaactaatataccaaaaattacataaaatgtctttcgtattcatatttatatattcataaaataactagaacacaaatgactcgctcatatttgcaatttcttatcatctaatgtaatattttctgtttaaaacttgatgtgtttccataataattatttttattaaaatataaaataatttgaatatattgtaactaatgtaccaagatttacataaaatctcttgcatatacatatccattaaatttgttgaagtataaatctaagattttttctcaaatcaaaacttagaaaacgaatgactcgccatattttcaatctaaaaataacgaaaatctaagttgttataccatatatcttaaaatgtatccaataaagagcaaccattgacccttttcacataaattttccttattatatagtttcccatattttgaataaaaatatttatttccattataaaaatgctaattttcttatctttttaatcttttgttatcctctctccttcacattttatctcttaccaaaaataacattttcttctcttacaaattacaatattaaaagctcccatctctctcttctttctttttggttttgacccaaagcaaattctacaatagagcaaaaataaaattagaaaagacataaaaacagagaccaaatcttttcttcagttgaatctcttatactataaaaaccatattttttcctccaaatcctgtaacagtaaaatttgtatagatcgaaagaaagctacaatttttgacgctctataatggctgaatttatggaaccaaatcttgtatccaattttgatgatgagaagagcaattctgtcgacacaagatcgatttttcagatgggttttcctctggagagcgaagagatcgttagagagatgattgagaaagagagacaacactcaccgagagatgattacctcaagagactgagaaacggagatttggatttcaatgtcagaatccaagcccttggttggatttggaaggtcagtaaatcagacaaaaatttcttctttgtttcttctgttgactcaattcttacccaagtcaataatctgatgactttgatatgaaaaaagacatgacttttgccttatctttgttttgtgtctttgattattattacaggcctgtgaggaacttcaatttggaccattgtgtatatgtctagcaatgaactacttggatcgtttcttatctgttcatgacttacctgtaagtttcatccttggcttaagattttattaatctctttggttatggattgaaaggtttatgattcttgtgtagagtggaaaagcttggactgtacaattgttggctgttgcttgtttatcattggcagctaaaatagaggaaactaatgttccagagttaatgcagctgcaggttctattaataatctcattgtctcttattgtgtagcattaaaaccaaagttgtaacattgtagtaatgatgacattaataggttggagctcccatgttcgtgtttgaggctaaatcagttcaaaggatggaacttttggtgttgaacgtattgagatggaggttacgggcagtgacaccgtgctcttacgttagatacttcctgagtaagatcaatggctatgatcaagaaccacatagcagattggtaactagatcactacaagtgatagccagcacaaccaaaggtgatagattaggtctcttctttttcaaaggggttctggttttctaaacctcagttttgcttttgagttatggggttatggacttttggggttagaaatgattgatggtggttgtgaaaaagattgttgatgtgtgggcaggtattgacttcttggagtttagagcttcagagattgctgctgcagttgctctttctgtttctggagaacactttgacaaattctccttctcttcttccttctcaagccttgaaaaggtaagagaagtcaccaaaagtctccttcatttacaaaagtagtggttcaatagattgtcaaaaatatggaaaatcatgagacatagatataggcatacattaatgcacacattgtcttttaatgtcccctctttgaaatccctttttattcgaaaaactagtttgtgtgtagaccaaaaagaagagttcaattatagtcttcatgttttgaaatctcgtgacacattcacatgttggtaaaaatgttattttcttttgtttttgtcactccaaaatctaatggttccaatcacaatcaaactaagtgacttgggtcctcgtagggaccaaaaaggggctcaagctttacgttttacttgtctggtttttatgtgtgtgtgtgtgtgtgtgtgcaggagagagtgaagaagattggtgaaatgatagagagagacggatcaagttcaagttcacaaacaccaaataatacagtcttacaatttaagagtcgtcgttattctcattctctttctactgcttctgtttcctcctccctcacttctctttcttaattttcctcatcttcctttttatctatttctctctttttccattgtctcaatttggattttatttaatgaaaaatcacagaaaaaaattgcttttcttttagcctggtaatatttgataaaagcggtttagaaaaattgcataattaagaagataagatggttatggcatgtttatggtaagtactttaacaaacaaaaagtgttatggttaagtaaggctattgtttggcttcccgccaaatattatagcggggaaaaacagttgagcgagagttgactttttaatcgcaagtgcaacggacccttttttaaagtggctcgtaaagttttgggcttacaattagcccatttagattttttcttctttggagaaaagtttggggttaattaggtacagatccatttgtattataggctctttattcctcagaaatgggcttgctacaataaaattttagttatgatgatataatattaaacttcaacaaggtagtgagattatacccgagaggtgggtgttacacaactcagatcgttggttgttcaaatcagcttggtgggaaaccactttcgtggtcggtgtatgaacatgggccttacttagcctaaatagagtcaaaaagataattcaatacactactatattaactagaccatatttgtttatgccagggctactttctttttggctatcattgactataataacataattgtgttctttagcctaaatgttttcaaacacagatttgttgtacatggtcccttctgtttaatgagttggttaaggctcattattgtgttattgacaaaatgaaatcaaaattaatggtacggcaataaaagatatttagaaaatgggatcggtggctatcagtgaaatatcagagattagagattggtttagtctttaaaccaatattttggttgtaacctgataaacaattttgtaatcctcttggacatttgtacaaacgaattagataaattgtacattctagttcattaatcattaaacatttatctgatttttcattttggtaatactttatctgtttatcagttcataatcaaactggttctctacactttatggaatcaaacaaccaaatttctttaacatcaaacaacaaattttcaaagtagcgacttgtagcaatatgttcatcttaacaatgactattattttggtgtaataacatttgagcttattcgattttatatggttatactttttttggggaaagaatagatgttataatatcacatcaagtggcaataaaatgccaactatatatgatttcagattcactaataaacattcgatcgataagaactttcaaaatgacaccttaccttctgaatcactgtcgaagtagcctttacaggctatcaaaaagtcttattttatacatttttcttctgttaccttattatatttatacaaaatatttaaatccactgacagctctttccaacgggtctattagcaatgtacaacggtaacaacgccaataattttcacaaaaactaattcaatgatcttatcaggtcaggcacatggtttaatgattattacaagtttttcacatttctttattatactaccaatattttgccaaaatatataccataaactaaagaaaataaaagtgtacatgaaaaaagaataaaaaagactggtggatcaagtagacaaaaagacatgctaagttgcaactcttagttcttgaactgaacatgttagctgtctccccacatttgccatgtcatggactttgtttaccttgatattttcaactatacgtgtatcattacaaatatttgattctctctccaattatattcaccatccaatcacagctcgataagtcagaagtttattcacctaatcataatttacagctcttatgttaacgttaattcatgattatggattgtatactaaggaaagtcaatataataataacatgttaagacttcatccgcctaataagtttgatattttttctttccatatgtaaaactaatttacctagtaatatgtatgttcattaatcatattcaatatgtaattaagcatagtctaatcatattcatttatgttataaaaaatacttaaaatatattaatgctagggcaaccccatgttacaattatgcgtttgcatgttagtctgcaaaatttatctttaatatattaaaagagatttataggaatcttgttttaatttaatcgaaataattcttcacatttttcctcctttttatacatctcttccatttttcctcaccttcacaactctctcataatctctctccctcactctaacaccaaaagaagaagaagcattttccaaagagaaagagagagaaatgggttccaagattgtccaagttttcttgatgttggctctattcgccacttcagcactcgctcaagcccctgctcctactcccaccgccactcctcctcccgcaactccccctccagtcgcaactcctcctccagtggctaccccaccacctgctgcaacccctgccccagccacgccaccacctgctgcaaccccagctcctgccactactccaccgtcagttgctccttctcctgctgatgttcccaccgcctctccaccagcaccggaaggtcccaccgtgagcccaagcagtgctcccggaccttcagatgcatcccctgccccaagcgccgcattctccaacaaggctttcttcgccggaaccgccttcgccgctattatgtacgccgccgttttggcttgagaactttttttatataattttttttttatccctcaaattatttcaaatctttggtgttaatgtgagaatttgatttattttcgtatttcgctatttgatcgttaattttttttatcatgatttcgtgtgtcggaatggggaaagtaattattatcttggttgaagctaatggaatgttgacacgtgtaatttaccattggaagggcttcatatggttgtgtagaggaggtggaattaatctgtttatgtaaatccaatgataataaatcaatttcattactctttcacttaaacataatcccacatggttttgctttaacaacacacactacaacaaggccattaaaaataagttctgtaaaaaatggaaccagtggccagtgggtatacatttttactaaacttgattcgacgtatgtatcattttcaataaaaacaaagtttgtaacacaagcctctggacagcattacaaaagcccattagttcgatatgaccaactatttcagcccaataatgttggggcgttttttttttttttttggttaatgcgcatttttagatatctctcctcgctagctagtgtcctgttatcgtttagaaggaacactaatataattccttaactacattagaagaaattcatctatttgactatgcaaatactaaactggttattttcttttgttgattattgattaacaacattacgtcttaacagcttgtacatgattatcaatctaattaataatctcctagatttttcgattccgaattgtctatttgaaaaattaccaatcattacctaaaaagttgatcgcattgatttccaaaccaaactagtcaatggcaccatctttccttttcatttaattgtactctgttttgttttattttatcttctttattttgtgtttcactaagacatgatcatgctgtattgctgttgatcaaaacaatagcttcttgtttcaaaaaacacaatgcttttctccaacaatcctaagtagattaacaaaacaaaattttgaatttttacatttatatatgatccattacctagtatgatgcaagtttgaagaaaagcaagttattgtaagccatgacattatcatgctgtccaaaagaagaagaaaacccttgaatagttggttagagaaattgaatatagaggactttaatgaaagaggactaaaggaaattaaaacaatatttattgctacttacccgctagctatcaagaaacatataattcagctcgaattcttcaaagtgattaacatatcgatcaagtcccatatcttttcatatagtcacttctttaaaaataagattggcgatggataagaaaagtggtggaactaaagcaatagaagaagcaaccgttccactgttggaatgtcataatgcggcagaggaaggcggaggaatgaagagagaaatatggatagagactaagaagatatggtatattgttggaccgtcgatatttactggactcgctacttactcgatcctcatcattactcaagccttcgctggccaccttggtgatcttgaactcgctgccatctccattatcaacaacttcacactcggcttcaactacggtttactcgtatgtgcacacttaattaaaaatattttcgagattgtattataatgtttatgcatgttacatattctgaagtttaatctatgagaaaaatgcttgtgcagcttgggatggcgagtgcgttagaaacgttatgcggtcaagcgttcggggcaagggaatattacatgttgggagtgtatatgcaacgatattggatcattctattcttatgttgcatcttgcttcttcctatgtacttattcgcgacgccaattcttaagtttattggtcagagtgacgacattgccgagcttacagggaccattgccctttgggtcatccccgtccacttcgcctttgccttctttttccctctcaaccgattcctacaatgtcagctcaagaacaaggtctactacttggtcgtagattgttaaataactttacaaatcatggtccataccaatattatattagctggtcttagtagtagttccaaacactgaagcttcacttaatgatgtagtggaaaactttggagatagactagcaatctattgattttcgtaataccttaaaaattaggtttctcataggaaatataaaagcaagctagctctctatgaagtctttgttaatcgaaacctaaacaagatttgttctttttaaaagtctaaaagcttaggaatcctaaaacattgatagaaaaaccagtgaaaatgtaaaaaaaaattttttacataaacctaatgatttttataatttatattttttaaattttcagctgcatgatcactgaagctagctactattgtttgctgattttcaatctatataattaggtgattgcaatttcagctggagtgtcacttgcggttcatattctcgtgtgttggttcttcgtctatggttataaactcggaatcatagggactatggctagtgtgaacgtgccatggtggttgaacatcttcatcttatttttgtacagcacacgtggtggttgtacactcacttggaccggcttctcctcagaagctttcaccggacttttagaattaacaaaactctctgcctcttccggaatcatgctttggtaccattcgtcgaacaaatacccacttctttcacattatgttaaagtttagtcatatatgagttcttacaatatatcttgccccgatacagcttagagaattggtactataaaatactaatgctgatgaccgggaacctagtaaatgcgaaaattgctgtggactccttatcaatatggtacgttgttttatttatttcttataatcgttatgccatatttttcttgttgttgtttgtgttttttgttggaaaactcttatattttttttacaaagaaatagacgtcgttttttactgttaacgtactgaacttaattctctgtgcagcatgtcggtaaatggttgggagatgatgattccacttgccttcttcgcgggaaccgggtaaaaaaatcctattcggttgctaagtttagagtttttttttgttggtatggatgttaagtttagagttacgtacgtagggattggattgatgatagttatctaatatctatctactccatcaaggacaataacatggcctaatgctacaaactttttcgcacaacaatttgcaacaatcttgttatcatcacaatttcacacactcacagttttcctttttctttaatgtattcgttttagcaaatattaaagtctacatgtaatctaagttcataaaccgggattatatgcacacataaacgtctccaacgtagttattaaacaaataatacctattttgtagagttcgagtggcaaacgaactaggagctggtaatggcaaaggggcaagatttgcaacgattgtttcaatcacactatcgttaatgattggattattcttcacagtcatcattgtaatttttcacgaccaaatcggctcgatcttttcgtcaagtgaagctgtcctaaacgcagtcgataatctttctgttctcttagccttcacggttcttctcaatagtgtgcaaccagttctttccggtacgccttgaaactgatttcataaaccaggtcaacgaaagtgcgttgacttttgacatttgattaaggtgttgctgttggttcgggttggcaatcgtacgtggcatatattaatttgggatgttactaccttatcgggcttccgtttgggcttactatgggctggattttcaaatttggagtcaaggtttgcccaattttcctctcaacaaatgtcggcatattattatgtcggcaaattatgtttcttttgatgttcatatttgtggagatgaactaacatatgtgtatggatgatagggaatatgggccggtatgatatttggaggaaccgcaattcaaacgttgatattgattatcatcactacaagatgtgactgggacaatgaggtaaccatttggagtatattacaaaatatcactttcatctaaaattttagtaaattttgtcatagttagtacattactttttaacttgatataagaatttttgagtgactgtttacagtgtacaatcttaaaacattgcaggcacataaatcaagtgtgcgcattaaaaaatggttggtctcggacgcaggaaactgaagatgctattttagttgtcaaataaaattattttggagcatccgtttcgtaaatctaaatcctatttattgcataaaacacatagcttatggtttcaatatcacatgattagttgattgaaatgggctaaaccggaggagggattgatttgctttctttataaataacagaaaaaataattatgcacactttcacttcatataattcataaaaggtttatttacatacggaatcacttcttctttgtctttatgaaataaggattcaaacataattagaagaaaaaaaacgagataacccattctcaagagtcaagacaaaaaccaaattaaatcgtaaagctggtatttatgtacgtatagtgagaagtctaccatgtgtaaaccggatcttgcttcacctaactgaaccaaccagaccgaattattcgtcaatccgttggagtcgtcaaatgttacccatccggaatccaatgtaacttcatgtgttaatgtctcagaaatcagaatcgtcgaatgttacccattcgggttgaaccgaaccaaccaattcaatcatctcctcatcgtccttaaccgtagtctgaaccaaaccggccaattcaatcatctgcttattgtttttcttttctgtttcagccttcaacatctcaaccaaacaccaaaaatcatccgctagacgtctgcaacgccaaaataatccactcaagctctccttgcattctacaagtctcaccaaaagcagactaaaatcgttcagaccgagatcaccaataggtttaacacccggtttaatcaatcgttcaaacaacacctgaagccgtaccataaccaatctcacaatcttgaaatagtcttcaatcactagctctctaatctcgtccacgatcttgttttggaacataggcggaatctcaggtctggtacatatatgctcaaaaaaactcacaagagaatccgtttgtcttataatatacccggtttggtaagacgaaacacgatctttctcttcaactttatcttttggattcaccaacaaatttggaaaagatcctaataccttcggaacccacgagagacgatccaagtattgtccatacctaagttacattttttttttaaaaatgtcggtatgaacatgtccaaattattagataaatatcacaatcaaaaaagagaactaaaaaatctttttaaaagaagaagtaaattaccatctaatccactgagacaattctagcgtgagattagaagatttgtctgaaaactcgttcaactttagattgtttcgaccatgacctagtccttcaaacttgtctcttgatgatttgataagcttgtggatgacgatgagagacttggtggccacaatagcgttcttcgtgacacgtaacctccacagagccgctgagaaagccgccggagcgtaacggctgttggagtaagagataacagcggagacatagtcactgtttggtggtttgttaggagtacgagttgttgacttcaagagggctaagtgaatgtatttgacggcggtggacccgaaactatgaaccaatcttgctttgcctatcgaagctttgtctttgaattttccgattatgtgagttttgagtcctggcattatctcgatggaactagatgaaaaaaaaattgaagctgttttgctttgtgaggttggaatttgatttttataagcgtccaatgtttgattcgctttccattttcttatagtttccttttaaatcttttttatatacgtgagtttccttttgcaatcattcaaaattaacattatttttttggtcgacatccaaatttgattaattttacttttctcaactattaatttggtaatatatcttttcattctaaagtcgtcgttcattcattttataaaacttatattaaacatgacgagttcatattcaacctcataagaccaataaaatgttgttatttgttaaataaaatgttgataggaatgttatagaataagtctggcaactactttgttatttctattacatatatagtttatttgtattgactattgactttacaccaatgttttttttatttgtattgtaaatgaataagtttaccaatgttatatttaacgaataggtttaccagtattgtcatttatctagtatctaattaaagattagaaaagtcaatacaaattaactatataagtaatagtaataacaaccacactgcagccaccagcaaattccattaacaaaataaagatctcgaaaatttgaacaccaatttacgattttttaacgtcaacatgaatgatatattcataaaaatgtgttgagaacaaatttggtcaagtcaagctttagatccgtaagaataattgattcatggcttcttccgcataaacacataaatcaaattgtatatgtgaatttcggcattgacaattttggtaacatatgacgtggatgctgagaaagtaattcttattggttattaacacaggacgcggatcgtaaagatacaaacatttctaaccgttgataagccaaacagatctaacggacaaaacacaatcacttcctctctacctttgagtataaaaaagcctcacaacatcactcactttcccatcgatcgcattctcaccgaatcaaatccaaaagagcaaatttacaatcttgcgaactcctaaaatggctcgtaccaagcaaacagctcgtaaatccaccggaggaaaggcaccaaggaagcaactcgcgaccaaagctgcgaggaaatcagctccagccaccggaggagtgaagaagccacacagattccgtccaggaacggtggcgttgagagaaatcaggaagtatcagaagagtactgagcttttgatccgtaagcttccgttccagagattggttcgtgagattgctcaagatttcaagacggatctgaggttccagagcagtgccgtcgcagctcttcaggaagcagctgaggcttatcttgttgggctctttgaagatactaatctctgtgcgattcatgctaagagggttacgattatgcctaaggatatccagcttgcgaggagaatcagaggagagagggcttaagtgaacgaagatgatgaagattaagaagactagtcgtttagttatggattagcttgtttggtttcaatggatatgtaaagctgtctcttttcgttttcgagtgttattagttttttacttagatgtgtcttccagatgttcgatgaaatgcctaaaggaaattttaatctactgttgtctaatcttttgattcgttctgtcgatctccatatttctgccacgcttaagaatcgtttatcaacggaagagttaattttttgctcgatgaaattgtccaaattgatttgcaatagtagctgcttagggattctcagtcttcttctccatgaacaaaacattctacaaattcttatttagaactaaatcattcactaaacgtaagaaaagtatcggttctttacaaaatcaaagtgagaattcgcagattgttctattcctggttataccatcacagtaagaaatcctccaaattattttacttaatgcgtagatttgctgaataagagtaatgtaatttctcgaaatttgtaacttcaggctaaatttgttatgtaaattttgaaataatttcatccttattttctacgattgaatttttttgagacccttcatagccaaaattttcgatttggcgcctaaaattaaaagatttggaagtagcgcaaaagcctacgtggactgaaaaggatgatttaaattggttgatagtaaatgacacggatggccggaattttagtctattttaattcgttgataaggtctcacacggatttatacctgatgatctcagccgttgattgaaatatttaatccaacggacaagaatacaactttccctccaaaaacaaaactccctcccatgtttttttcacctcaccgccaaatttctctccccataaaagcagtccctcttctgcgttgatcttcactacaaaatttctcattcgcatcctccacaagaagaaaattcgatcggtcgattagtctttgtttgatttcgaaatggctcgtactaagcaaaccgcgaggaaatccacaggaggcaaagcaccaagaaagcaactcgcaaccaaggcggcaaggaaatctgctccggccaccggaggagtgaagaagccgcatagattccgtccaggaactgttgccttgagagagatcaggaagtatcagaagagcactgagcttctgatccgtaagcttcctttccagcgtctggttcgtgagatagctcaggatttcaagacggatctgaggtttcagagcagtgctgttgctgctttacaagaggctgctgaggcttaccttgttggtttgtttgaagacactaatctttgcgccattcacgctaagagggtcaccatcatgcctaaggatatccagctcgcgaggagaatcagaggagaaagagcttgaagactgttgttatggtttatatcttttgatttagttcgtcaatggaactctatttctggattttgatttgcgttttagtagtaatgggttcttgtaagtgttgagctttggctcgttttaattttcagttgttaggtactttggtttagttagccttgaagtgttcgatgaaataccccaacgaaactctctcctgtttaatagaacttattttccttaatttctttggttttgctgctcgttgatcatataatattgaaacattgaaagtttcgatttatttcagatactgtatataacacactagatattacattaagcttcaatgtagttacaccaattaactggtgttaccagttacggatggcatttggttttgtggaatcggttgttcgttccttactcttcttgatgatgagaacaagttagcactgaagctggtatagaactgtcttccacttctagtagcattgttaataccatcgcaaagtgataagcttcctccaattgaaaacgatcttctcacgttttctactcttcctgagccacagtagtttgccaaatcactttgtgcccttggaagaaaaatgttatggtttcttctagatctggaactgtcttgtcttccacggaggtcattgctcgattcagaatctggttgatgattcgtctctgtttcttgatgaggtggttcagtgataagaagtacaggggcacgacataaaggacagttcttgtgagagagcaaccaagtgtcgatgcaatttagatgaaaggcatggctacactttggtaacagtctcagcgactcgtcttcttcaaactcgtttaagcagacagagcattctgtgccgtcgattatcccttctccctttttgaatccaacgactgtgatcgagttgatcgcggaacggtggagaccgacggttgggatttgccaaacgtgatgaaagtcggagaaatctctctcctctgtttcgtcctcatcttcctgttggtttgtgtcaccgggagttacgctggcggctgaaatccgccgttgttgcgtgatgtggaggtagaggaagaagactagaaatagaaagagtatgattgagccgacgacgcagatcgaggtggggagtaggagagagagctccctcggtggcggtggtggtggtggcgggggagggtattgccggaaacaaaagcgtaaatctttaaactgtagacatgaaagaagcatttttctgtgattaaacgccattgtaggagttcagagacgacataaacagagcaaaaacagaggactttactttcagacacaactagtagaaaacagaacaagaacaggggaaaatgggtatgacacacaattccaagtttttgcttctgatgaaagcaaaaagaaataggacactaaaacccacaaaatgggttagaatctagacaagagtcatgacccaaaaaatcttcgtgaggaaataagtgggtacacagccacacacatcacaatctacaagactaggaattagagaggatttgtcctttttaagggttggaaagtgggtggaaatttcctgaaagtgataacgccattaaaggcgatgtctctgtatgttaggaagtagtttcctttcaacttagtaaactctctgtagacatttacgcgtaatcagtcatgtagcgagtcaagtaagtctttcatttacaacaatcttaatttatttggcatccggtttagattatgatcggttttttcagttggttaaagaaggtataactaccgaactacactatcttcacatatgtacacattaagcataccagatgttacagaatatagatacataggtccggtctagtcgggctgggcaacggggtcctctgggacaccttactcgactaatccgattccaccatgaattgtccttaaatgggcataacaaggttcttcttgagtgaagacgtctaagcaggtccaacaaatgtgctttccacaccggcacttcatatggttacacccatcagtcttctctatcgtcgacttgcaaatcggacactcctttacgttcttcccttttgcccagtcctttagcgacaagtccggattttccttgaactttttgtacctttcacaagtgattaacgggtgatactcgaggtgacaccttgtgcatatttctgagtgacatgctccacagatgaatggctcaccagattcttgaggtccagctacacggtagacggaagggcaatcaggtgtggagcaaaacctgaactttccatcactggatgttacaaaagaggacaaggatgcgctgaagagttcatcgagcttctcttgtgataagagggctctcatatcagcgagtactattggagctccacagtctatgtgagaacaaagtattgggaatgcgtcaaagtttctcatcgatgcctcaaattgctccaacaaacaagctttgcagaagaggtgtgaacatccttcaagagagtagccatcatcaacttcagacaagcaaatggggcattcaacttcaatctcatctggtttttcacccagtgcactcttttctcgtgcaagttcattgaccatcttttgtacttcctgcctcatttctttgctcccatgaacctgaataacatggtaccgggtgttgagcttgagatccacaccatgcaccttttctttgataccttggagctccggaccaaaccgcttcacaacttccttcatgaggtcaggacggatctcaggacctcggaggtggatttcaagttgcttgctctcatgataatccataagtgcctgaatcagttcttgttctgccttggcaattttctcacttgttccacaaatgcgtactgtgagattgtgcctatctaatagaatgtaagtttctgtctcctgctggatcttccgcatcagattaataccatctctggacataagatgctgcaggactctacgtgtgaagcctggatggtttatgggtcttcctcttaagagttcttcaagttctctccgcatctccgcaacgggtcttgttgcataagcagtaattttaacacgataagccccgttatgagttggttccagacagcattcaccccctacaaaaatataaacaaacgttaatgcacatcaaaatttggacaagttcacaggaaaaataggacacctaagcttatgcatccttcaaatatcccttaccctacacgattgttcttaatcaatatcggagtcagaagtagacattcagtaaggttatttgttgacagaaaattaaagagcaaaagatcaaatgttgtgtagaaattttacctttttgtctctcaaaccttgctaataaaacgttcaattgtcttttgacagtgttgtagatagaagcggagcagattatggagctctgaaacaattgttcgcactttatcttctgccatggaagacatccaggtagcacctccccatttaactcttgcaaagcttttgcagcttcgaaatgtaatctcccgtcaaacttaattaacgctcgcatgaagtaattgtcttcttttggttcaaaaacttgaacttggacacagtttggctctggattctttgctgacatgcgcgcaaatattctcttatgaagctcttcttcgcaagcagtaggagatgggcactgcacactgtatttttttctgaatatgaaaaaattcagatctcttctctgcgttctgaattccaaaacatctaaaacttctgcttccgaaagatctccaagtccacttatcaagatagaatcatttgactgttgatctctctgaatatggacataatttgttcctatctcaaggctggatatatcaccaagtatacggtgaatatctccggaagggcacttaagacatcctctaccactgctttcccttctcggccaacgaatcttagctgtcacggaagagaaataaggcatcttgaaaattcctccaccagttgacagtgatggaaataatttgagcactgatcctttgaaataaaatttctgaatttctgttgccttcatagcagattctggagtgagaaaggttattctaccccacttctccttctcatcacagtcttgcttgttcgcagcaaacttgtatatagagcaaatagacccatcaatcttcttctccagaaacgtcagaagctctctgtcatcaacaacatcatcgccataataaagtacatcgactgtcagaaatctctgatcaacttcaagatgctttatctgagcaccagatccaaacagtgcaataggtacttgtccccgaccatgatatagatacttctccaaacattcattatgcatccatttcttttcacattccaatgcatcgttcacaagggctgacactttttccatgtcgaggggaggcgcatacagtcgaatctcattctgatcaacatcgacttgaataccaatcctttcatccgaacaaagagacctagcacgagaaacaattgaaagcagactacgattagatttcccacagaatcgttttagcacagtgctgctacaaccaaccacttttttaattcggagcctccgctcatccatctgggatacgtcaaaaggtggtggtggatcaagcatatacaaagcttcaaaatcacacgcagttacacataccaagtactggtccacaatagatagaagttcaccgaaaacaacccagcttggcttctggccaaatgctagcaatgaacacgatggatgtaactgaacttgttgaccagtcaatgccacctcgtatccaagctgattatagccagtgtacatcgccacgttttctgcaagagatgcaagtataaccattttcaaatgcttgtcgtgtttagtaccctcatttggattccaaacccagtaactaggactgacaagagtaagttctctctcaatgcatatctccaattccttgactgtgtcttcacatctcctcattgatttggcattcaggctattttcccagcaccatttatttcttctctctcgcggcagagatgcccattctttgtacaccgaaagaagagtgaacaagtctccattctgattgcagaattgcaccttgaagatgacacagtaaaaaactttagaacatatttctaacaggttgtaagaagattttaaactacaaaagttcaaaacctgtgaataccagtaaatcaaaaatgtaaaataacaggaaagggtaatcattctatggaagaaaaataccacaataacaaaattaaccgggagctcagaatcatacctttaggcgatcagctttcatcttatcatcgaagttgccaactctgcaaaatatactactagcattagccatgacagcagcaagaacaatcccctctttgcccattctgtgtctgaagcagcctaaaattaactttccaagctttggctccagccccagcttgactaaacaatgcccttcctgtgttaattcatgaacaccgttcttctcaacaactgcacccaactgaacaagattttggacagccattgcaatggcttccgggacaggcgcatcaacaaagttaaattctgctatgttgttgacacccagagcaagcatcctcaaaagtgctacaccaagatggaccctccgaatttctggttcctgattaagattcattgaatcaaaatcgttttttgagtagagtctgtaacatcttccgggttctgtccttccagcacgaccagcacgttgtcgagcagaactctgactgacccggcacaccttgaggatgctcatccccgttctaggttcatatttactctctttcaccatcccggaatcaattacatacttgacaccaggaatagtcagcgacgtctctgcaatatttgtggcaaatatcactttccgtctcccaggatggttctggaaaaccctaaactgttcttcgaaggaaagctttccatgcaaaggcaaagcaattgcagacggagttataaacctttcgcatgcccattctacctctgcttgggaagtcaagaatgcaaggatggttccttctttctctgttttatgtatttccactgccattttaacaacatcgccaacatatgaagcaatgccgccaacaacagaattctcttctgtgtcactaggggaatatacaatctccaccggaaagttcctcccattgacaagaagaataccacaactgaagaaatactgtgaaagttgtttggcatcggccgtggcagacatgattacaagcctcaggtcaatccttctggatagcaactttttaagcaatgccaacagaaggtccgtgtttaagcttctttcatgagcttcgtcaataataacacatgaaatgccagacaaactccgatctttcatgtagtgctgaagcagacaattatccgtcatgtatacaactttggaactaatctcctcagtagacgaaaaagttggagtacaagaaacagtattttcctcataacaaccactgctttcttctctgacccgatcagccaatgtcatggcagcaatcttccgtggttgtgtacaaacaatcgactcactagcagcaactccggaatcagcaaggaactgaactaactgagtgctcttccctgaaccagtttctccaatcaacaccattatctacaaacacaattaaaatcaattaatacagactcaaaatgaccaaacacggactcacttataaaacagagaaaactgaaccttagcagacaatatgaactactacaacaagacaacagcataactcgatcactgaggaacgattatctgtactcaagtgattcaaaactagcttggacccaaagaccacttgtcaacttcgagattcttaaagatacctgttcacgatgaattttcttcaaaatctgccgccggtaggcatagataggaagtccatcctctagccttcgacactccctacgaatcaaacaatgaatacgtctccaatcataagccccttccaaacaaaacacggccacgtctccttcttcttcatcatctaaatcaaactcatacccgtcttgtcctatgagatatcgcaaaatgctcttcatggcattattgaattcttcaagccgattcacaaccaaatctctctcagcctctatagccttctttttctcaaaaacctcaaatttaagaccccttttagacgaaaaggacacaacttgacgagacttctcctcaatctccaacctcaccttcttgacgccttctccattttccataagcgaaagaatatgagacgagaaaagatcacgaagcctgtctttaagctcgttcatgtcagacggaacaataacattagggatcagctcaggaacaaactcatgcttcccttgaagtcgataatcccaaagagccaccacggcagagcgcgcatcgacccactgacgaaaactgaaacttccagcgatacaaccaaattgaggcacatgaattgattcctcaggaatttcgcaaagcaaagcgagactctcgatctcttgtttcttagtcgaaaaacacagctttgtgtcactgttagcggcggcggggtgaagcagctgaacgatgaaattaggtctagcccgcgtaactggaggcgagtatcccgacgacggattacgatcacgcctgtaatttggcgggaaatttgagttagggtactgagagtgttgctggttccaagtaggacggtggttgagcggcggagaagattgtgcagagcgagagttataacggttcgtggaggatgagtgagacgactgctgacgacgatcagtcgccgatcttccaccgtctgaaggaggaaaagagttcctcatgatgggatgatgccagtttttgttttgtgtgtgtgtgtgtttgtttaacaatgagagagcgaaagagaaagactctgggagttgaaaagagttaggggtagtcgatcataatttataaggaattttgataatttaaacaaatcattaaaaataaataaatcaaaaattctacattatcgctaaagagtttttttattattttgttaattagttttttataagataattttgtaaaatttttcaaacaatatttttatttttataatactttttacaaaaaatttatgattttattttgttaagaaaaatgtagaaaatcatgaaccaataacataataatttaattcattataattagagatttttttgttttagttgaataacacaaaacttttactgattttataaaagtatgaatccaataactccagatttataaaagttttagattacttctaacaaatctaaaatgaataacacaaaactttaacaaattttataaaatcttgattgaataacaacatattctacataacattttaaatcactaaaactcttttgaaatcataaaccaataatggcccctttgagaggagacagagttatatcaatcaatattaatatcctactaaattttatttaactttttttttcactagaaattggatttcatttattaagattttttattttaatattagtttgtagtattatatttgagttctctaattctaatttaaaatatattttctactatttaaaaattattctgatttaatttaatattagataaatgtttgctctcatttttattttctatcttatattttaattaagtttaaatgaaatttatagtactatttataaaaatttagaattgttgtccataacttttttttaacaattttttgtcaattgcccaaatttaattatgggcccataaaatgtaggcccaattcaattaaacctacctattggttctcctataagttgcttctctcaactttctcgcaaaaccctaaaagctgagccgcgtcgagagcattttatatcttcaatcatcttacgcaggctgttgtagcagcagtgtctatcggagacgatgaaggtggctccatctttttcttctcatcaattctgttctcgtttatctctttgttatttcgtttgattcaatcgattttggtttgtgtcgcagttcaacgtcgccaatccgaccaccgggtgtcaaaagaaactcgagatcgatgacgatcaaaaactgtaagatctttgctttaaatcacattttcttcatggatttgtttacatttggcttattgagtgtagagtgtgaacaatctgctatgaagttcgtaaaattctttgaatccaaacctttgaatcgtaggatagttactatttcacactgctaggatctgtttatagctgatgcattactggaatctatgatgtttactgcgttggtctgatatataaccagttctgaatctgaaaatcaacattgtcgattttggtaaagatattgagtttcatttctgttgttttgatgcagccgcgcctttttcgacaagaggctctctcaggaagttagcggagatgctctaggcgaggtgaaattttttctcctggttcagtgtttttttctgatgtcttgtgagttcagtatacttaacagaattgtgtgtgttttgagctatttgcaggaattcaagggatacgtattcaagatcatgggaggatgtgacaagcaaggtttcccaatgaaacaaggagttctcactccagggcgtgtccgtcttttgcttcaccgaggtactagattccaccccattgataaaattatacagcttctctttttttcattaatcttctgtgttttttatttatgtgatctggttattgtgtttaggtactccttgttttagaggacacggaaggaggactggagagaggagacgaaagtctgtccgtggttgcattgtgagccctgacctgtctgttcttaacttggtcattgtgaagaagggtgtaagtgatcttcccgggcttaccgacactgagaagccaagaatgagaggtcccaagagggcatcaaagatccgcaagttgtttaaccttggaaaagaggatgatgtgaggaagtacgttaacacttaccgccgtaccttcacaaacaagaagggtaagaaaattagattcacttaaagagataattgaaaactgtttatacgattgatgatttactaatatatgaggcttccatgtgcaggcaagaaggttagcaaggctcctaagatccagaggcttgtgactccattgaccctccagaggaagagagctagaattgctgacaagaagaagagaatcgccaaggctaactctgatgcagctgattaccagaagcttcttgcctccagactaaaggagcagcgtgatcgccgtagtgaaagtttggccaagaagaggtctagactctcttctgctcctgctaaacccgttgctgcttaaactgcctcaagattaagaaatttctttctctctagtttgtttctggtcgtatttaagttgctccacagacatgagaacgccattttgaacactatttttggtttctgttttgtgtcaacttttcaagccttttattatatcaaagttttgaacctcttagtagtacgtttgttatatttagttcttatttatatgcccgtttgttgatagtaaatgaccagatgtcttcattattagataaactgatgacctacctttaaagtgttttttccaaaaagtgtaatgttttgaaccaaaactcaatctcgattaaactcttttaatatggagacccgtcgctgaagactgactcctttcttcaagctggtgttgatcggagactatggagtcggagaatcgcttctactgtctccttatgccatcttcgccgaaatcctctgttttacaacagtggtaagtaaaaaactaaaaaggttggaagaagacgaagaactttgcttaactgcaattaaaatttatttatttaacaaatggctgtagatatgttttggggaaaagtcattcttatcaatacctttggaataatttggatcaaactgtatcatatttttgtggataatttgtctctgatataaattaatctgatccatattatgcagtattatttcacagacctcttaatttggtccataaatttaatttgatccatgatataatttgataaattattcacaagcctgtttcttccataatgtttggggcctatgatgggccgaattgaattttgaagaaaaatcaaaaccttcagattcagttagagtgttatgataatgggctcttgtaagtttgtaaccgaggcccaatacgagacgacgtcgttgtttgcaatcgacctatctggatcggtaggaaaagtgtgcaagtcgttttcattcaccaaagcgaagctttattcgtttgcttgagctccgaagagtggaaacaaaaatggaggaagaagagcacgaggtttacggtggagaaatccctgaagtcggcgatacggatgttcccgatccggatatcgatatgtctgcagccgatgaggacgccgttacggtctacttctgcttcgttcgattttgattttgttgtatatcgtgtgtatacatctgtttgatttttggtgttttgatttcatggaatcaggagcttgctgagatgaagaggagattaaaggagatggaggaagaagctgctgcgctacgagagatgcaagcaaaagtcgaaaaagaaatgggagctactcaaggttttgtgactctttcgttttttttttgaattcgtttgctcgagactatctttgaatttgatatactaggaggaatctgttgattgtgtagattacttttaggaaattgaacttctgtttcttgcttaacaatttgtttcagatcctgctagtatggctgcaaatcaagaaggaaaggaggaggtggatgctcgatcagtttatgttggcaatgtaagatagcttattttctacttcatggtatctcttctgtgcttgaatcattgtttcatctaaacggctttgatctgtttgccaatcttagtgtggattagcttaggctgactattttgttaacttaaatttcatctttgataaaagaactgcttgcaattgtgtcttagctttgttctttatcccttgagattactgttagaatctgtatcaagaggctttctctaaatttaatgttgtgaagtaggttctttattgtttctagttgaagagtttgacctctatgtcctatataatcgcagggttgttctcataaatgaagttcttaatagctctgggttctcaactaagttttgtgactgttttgctagtttccttgttgtagtgttaaaatcattcttcccgtgcaatttgatgataaaaaagctataaaaaaaatgttgaaagtaaaaagaaaagagaaggaaaaaaatttgaaaaaaaaaaaaaaagatatagcagaaaaatgtggagaaaaatattgcatgagcttgaaaaaaaaaagaaggatttcttgagaggaaaaagggagtctgagtgagttgggtgggattagaaagcaaggtttctgttatccttgaggagatggtctctgaactctgaagagctggatcaagatgccaagatgctggatgctttctaaacaagacccaaagctccgcagggaggatacttggagctaatacaggtttggttgtttgcggatttcgcgagaggctgcagtttgatgctggccttttatcatgtatttttgaactcacgctcataaaatgaagactttcatagcgtttatgtaccatacataacttaggtctaatgttagacatggaaaattgctttagaacacacaagtttgtctcttggcttcccttagtggggtggttaacttatctatctgttacgttctcagtaagtcatggttttagttgtaataagaatgcttgtgttgtactaagacctcattatccaccctgcaggtcgactatgcctgtacacctgaagaagtgcaactacatttccaaacatgcggaacagtcaaccgggtaaccattctaatggacaagtttggacagccaaagggatttgcttatgtggagtttgtagaagtggaagccgtgcaagaagctctgcagctgaatgaatcagagcttcatggtcgtcaactgaaggtatcttctcgtactaagaccaatactgaaggaaatggacagttcattgatctcaactcttctcttttggttttcatttcaggtctcgcctaagcgaaccaatgttcctggaatgaaacagtatcatcctgggcgtttcaacccttcaatgggataccgctttcgcagaccctttgtgcctccgtatttttattccccatatggatacgggtaagtttaaactctgcatatttaccatcagtttatcacaaatggctttctcttcttcgtctcacgagactcggcaatgcctcgtgcaggaaggctcctaggttcagaaggccaatgcggtacatgccttaccaatagaaaccgtaccggaataagaagaactatgacagagatgatgccgaggtcgtccctccatttcgagctttatatatgaatatgactttgctcgcacctgaacttaattttgaatctgtcatgtacggatgagattataagcttttgtttctttagattatgattatatttggtcgatattactttcagtttatatctttgttagtactttctttcatccaaagggggctaaataagtataccaacaagaagattgatgttacgtagagaagcctttgtaagaagctattatgtttccgcaaaaaatcccttagtcagaagctaacctttactaatcaatgatgtatggtataatcaaatcccttattccttatagtatttgttatcttttcggtttggagaatcgatgattacagagtaaaaaaaagaataatgttttttcttctcgtcattagtacttttgatgtatggtataatcaaaacattaaatttatgaaaatttgtaatgtgatgttgatattgataaaacatagtaattcataacccagtgagtaaactaatcagaaactagaatgcttggacaaataacgaccaaaaaagaatgcttggacaaataaccaatcattcaagtctacaaaatagaaattaaactcgggaaataacaaacaacagttgcacagcgattagatgtgtaaggcaaatcataagatttggtatctggatcatgtgttaggaatgcatccccgtgtgtactatcataaaacaataacttgtccttgtccaaaactgctagtggggtgaatgcgaatatggcactaaagaacaaagaagaggtgataatgaggtctatggaatatatttgcttccatgtcttgtggtctgaatcatccaacgaccatatgacttggttgggccacttttgctcggatacgcacaaacgatcaccgaggttgcacatgacgatataatattcatcagagacattgagaaagggagctttagagatgacttggaacgtttcggagtgaagatccaaagacaaaaccatggtttcgccctcgtgtgacaaggcagtgaaccagtgaagtgacccgtctacataaacaggatcttgggtgtgaagaatcagatgaggggacgcggggaaaacgtacctccaagcgttggtggcaaaatcgaaaacttcacaagtagtaggcttgtcatttaggtctaactcagcggaattatataaccaaactggcttgtaagtgccactgattttgtctttgccaaatccaggagtagggcatgcgactttaaagcactcgtgtctctcacccttgtcggcagcgactagttgatagttgcatttagggaaagttcgatgccatcgagtggtgggattgacgacaatactcggcagttcatagaaactaaagaggcatatcagaccatcacagctagtattgcaaacgaagtacaacttgtcctcccaaggagtagggatctgaacagaagctgcagatgactccaccaaaaaagttctcagagcttcaaagctgcttatgcttggatcttgttgacgagcacaaggatcatataaggacaccaaaagcacatgtggatctcctgatgattggctaagatggtggatcaactgtctttcttggaaactaggggattggattgtagacatccattgcttcgatacagacttgaacttgaggagggttttcacatcaagcctcaccattatatgatactctatcacatcgtgtggtaacaattcttccatacttgtctctgaatctctcaatgttatagattgaagacaagagcctccgtatgctttatttataaaccaaacctatcaccctagtcagagtccgagaaaaataaaagggtagatcagtaaatctagaaactgttttctttttttttttgattttatgaatttgagaaatcttaaaattttaaacggatttcatcaaatcagtatgataaaagtaaaattttcaaaaggaaaaagaaaaataaatctaattctactaaacattcgattcaaacttatcttgatctaattatattattcatttaatttgaacttgttcctatcttatttaattactcattcgatttaaacttatcttcgatctaatctattattcattcgatctgaatttgttccgatctaattctattacaattatgtcttctaacatcgtacgcttaaatttctgtttttcatatttgtattttttttccctattttttcttattttataacaattgcaagtgcaattaataccactagtaattatttatatttattttaatctcatttgacgttccaacattaaatagtactaccatccttttcggtgttcttcaaggcctaggggtggcggtatataacttgttcgcatgatattaccgagatgtccccacggacatcttttcacctcgtcgccgaagagaatgggcgtgtcatggcatgggctgacatggattctcctaggccgtttgggtggcggtatagtcgtcttgcgcacgaaataccgagatgtccccatgggcgacactcacacctcgctcacactcgggacagcctaggcggatccatgctttccaacgaagcacgcccatccaacctaggcgggtggaatcgagcctaagtccatatgtaaacttgttgatgaagcccattaaaactgaaacttgactaattcgggtcggactcaaatcaaaaacatacagtatgttgaaaaagatgaagtgaagacaatggttggttcctataatccataacgtaggtttatcttggttcaattttcaactttaatttcttatacataaaccgacaacaatttttttagtaaaagttttttttttttcattcaaagtgagaaacaaaacatctcaaatctattacaaaatatttttatatcatttttagacttttgctcatgcatagtgcaggttaagcacttactgctttaataaataaaaaaaacaaactagaatacttagaaaaatgttgtcttcttacctccactccataaatataatataatagctaaatgccttaaaccagttataatgtaaaataaatttattgacttccccatttgtttaatatgttcacggattgccccggttgttagctttccagggaatctaactacccttcgatccgatatctcatccgagaattatctccatgtttctgcagatgcaatctcgtttgacatagaatcctttcttaagaagactagtcatcttagggatcaattcccccacaagtctcaacgattctcgaaactagtagcacatctatggattttccagcgagtcaggtgtccctagaagctgacctcacttccatcagagctgtctatcgaatgttatccctgcttctatccagaagatgcgatctttagaactacgaatccgtctgaataatccagctcaccacggggccgatttcccgacaaatcacagggaatctcgtaagggttaatacatctacggatcgcccagagagtcgtcttttcggagaagttgacctcgccttaatcgaagatatatgctgagatataaacgtttacctcaagcaagtgcaaccagtcatgagacccaactctataaaaccagtcagcttcgggatcgttttccttgaaaatcctgatgaactaggcagtgatatacctatctacaggtcggcttctttgcacttgacacaatttccctgacaaatccgcagctgtcggaacagccaacttacgaatcaaactccaagcgacctggaaagaaacaagatacaatctacgcgacaacggaaagcttcgagttttatagagacctatctcatctctataggtgaattc

SEQ ID NO: 1418 - DNA, 42694 bp, Arabidopsis thaliana
ctggaaatatcagatataggcccgttaaaagcccaacaatttcattagttattatttacggttttgttgtgtgttttccatattcttactctatccaaccgaaacccgaatccggatccaaatccagatccgaagccttcatatcgtcggcatcaacaggcgacgaattacctcaaactcaaagctaaatttacaggcggagaagttggattcgaaggaacgtctttcgtaaatcaattctgctctgtaactagtttctgtaagtgtttggatcaatattctttgttaagctcaaagttaatgaatttggaattggattttcaatatcaccgttcgtaaaatgcttcagaaagatgtctgaattctctctttgttactcattgcttctgatcactgtcggttttgtgggtttaagtccgacaagtgtaggagcttttgcttctgagttatgtcggttttattatcttaactatatatgtgttgtgtttttttatacagaattgaaacttaacttacatacaatctctgtttttttgtttgcccttgtgcgcagaaacaaacgatgcctcgtaaaggattatccaatttcgatgattatgatgatggttttgatgatgatgacgatgcttttgattatgactatgatgttgatatagatgaacatggtataaacatcttcccattacttttcttctggtggttaatggtctctctttaacttggtttatgatttgatttcctgttttcttaaactacagaagaagaagctgctgctgaaccaaaggaagaaattgctaaaacgcaagggctttggcgatgtgctatctgtacatatgacaatgttgagactatgtttgtgtgtgatatctgcggtgttcttcgtcatcctgtcgccggaaatcaaagtatcaataagaatacaggtactatatcttttctcctccaatctgtattagtgagactttattttaggcaatctctctttgcctctgcataggatacacgaattattgcatcctatctgttttgtttttctgaggtcacttgatcaagctattgatttatgttaagaaaaagcagtgactgtggtttttacacttgtgatgattttggtattctaggtgtttaattgtagaatagatgtgttttatgcagttgagagcagatgcaaagaacctgtggtatccaaattggcaaagtcccttttcggatcagtcccatctaataaaccgaaaagagctgttctttgtctgcctgaacacacgaatcttgtgatggaacagggacctctgcctggaatttcccgtgggaatattcatgatctttacaaggcctttagttctaaaaattcctgcgttagtataggttgtcaacttgctgtagtttgatagagttttctgttttttcacttatcatggcaagctgttcgtgttgtgagtctctttgcaattgtggtgttgcaaaggcgttattctgacagttccttttcaacttatgtagcacctttcaagtttgatgctccatcgccagatgatttagtctccaatggactaacatcctcaaaaactggtccaaaaggtatacacacttggttttcactttgagtttgatgctgtaatgataaagtacggattaacttatattgatatggatccaatgacgccttgggtagtctattcacgtagtgacatagagaaaaggaaacattacctcaagtcctagtctaactaggatttatagttcaattacttattgcaataggatttctctttttttgtttcgttcctttgtatttttgggttatttttcttattaatatggctaaaatttgtttgtgaatttcatccaagttattctctttgggcgtttttactctgttctgtttcaaatttttgataaaaggttttcgtttttgaattgggttcttaactctataggctcaggtgatgctagcatgagacagaaggagaagcaagatagcgtagaacagaaacctttaaagaaaggaggagatagttcagaaacaagctcccgaggtagacatgataaacttgatgataagggcggtgctggcggcataaaatcaggcaaaagtttgccaaaagcaaaagcagatatgtctaatgagacaagttcgtcctctaaatatatggagacgtcggagagtcttactggtactatgaacaagatgtctttgattggggaaacagaaaactctagcgatattaaaattagaggaccaaaatcacaatctaagcataagccagaggagtggatgcttcttgataaagaatcagatgcactaagccagcttaatcttgccatcgtgagtttcttcaacgactggcgactatttattgatttttgtccaggcagattactgatggttgcaatctgattataggtggggcatgttgattccggtaagtctacactttcgggtagattattgcatcttttgggaagaatatcgcagaagcaaatgcacaagtatgagaaagaagcaaagttgcaggtaacttgttgttttgtttggatcttaggtacttgaattttcaatattctgctatgcttgcttgacattgtctttctgatctgatcagggcaaagggtcctttgcatatgcctgggcattggatgagagtgctgaagagagggaacgaggaataacaatgactgtggctgttgcttatttcaattccaaaagacatcatgttgttttgctcgactctcctggacacaaagattttgttccaaacatgatagcaggagcaacacaagcagatgctgcgattcttgtcatagatgcatctgttggtgcttttgaagctggttttgataatttgaaagggcagacaagggagcatgcacgggttctgagaggttttggcgtggagcaagtcatagttgcaatcaacaaaatggatattgttggctactcaaaggaaagatttgatttgattaagcagcacgttggatcttttttgcaatcctgtcgttttaaggattcttctctgacatggattccattaagtgccatggaaaaccaaaacttggtggcagctccctctgataaccgcctatcctcatggtatgctcctgttttcctttctgaactggcatttctggtacagatagctggtaatttacttagcatgctcgaaataggccatgaaatggtttaattttttgctaattcaggtatcaaggtccatgtttattggatgccgtcgactctgtcaagtctcctgatagagacgtctcaaagcctctactcatgcctatatgtgacgctgtaagatcaacttcgcaagggcaggtatctgcatgtggcaaacttgaagctggagctgtccggccaggatctaaggtacaaatttcactatgggaagttttcttctcgtttggttgcgtgattgatgattttatatctgtctacctgaattaaccttaggatacgcttttctggtgattttacctttccattcccatcccatatctgagtcgctcgacctaaacccatgattgaacttttaacatcaaatgcccacaattactatattgtttacaatatctgtttgggtgttggaaggtttcacagtattaaattccctttgttatcagtagctttcgatcaaattattttcttgctgttctcttgtttaatgaaacaaatgaaactgcttcaactgattacttaaattactggaactttctgctaggtaatggttatgccatcaggagatcaaggaaccatacgatcactagagcgtgactctcaggcttgcaccattgcaagagctggagataacgtagcgttagcgttgcaagggatcgatgcaaatcaagtaatggcaggagatgtattgtgccatcctgatttccctgtatcagtagcaactcatttggaattgatggtgctcgtcttggaaggcgcaacaccgatcttgctcggttctcaggtaaaaccaaaaacaaaaaaaagggcccttgttccctcttgctcgattctccataatccgttccatgttttctgattcttttcattgaaattcaatcattgtagttggagtttcatgtgcatcatgcaaaggaagcagcaacagttgtgaaacttgtggcaatgcttgatcccaaaacagggcagccaacaaagaagtctcctcgttgtctaactgctaaacagagcgcaatgcttgaggtttgaaaaattctttgccttatgaggtaaattataaattattacaacagcggattcgatctgacaatttttggttgtaactgcaggttagtctccaaaatccagtatgtgtggagacattttctgagagtagagctcttggaagagtgttccttagatcatcgggaagaactgttgctatgggcaaagttactcggattatccaagactcataaacattctctgttgttgtacgagttttacttgttcactataaatcaagtcgtcccaagttttgtctgcaatacagtatcaggaaatatcctaaaatagatcatgcaaaattcgaatcaaattttattgtgtaattcaatttatccatttttttttgtgtttaacacaataaatctttcttcttaaaaataagtctttttatttgcagtaattctgtagactatgatgagttgatgacactatataatcttcgtaaggtaataaactcagtacaaaaagagtggaggtcaaagttaagataaaatctctctacaagatcaaagttaagacaagtgatacgaaacattctacaatgcaaaacatgaaaacataatattttgttttctgcaatttcatgcaaataacttgagacactttttgaacaacactgatttttacatatgaattcatcttgcaatttttcctaacatttctatagagtgacatgttagtattcccgtataatataactcagtgtaatcttgactctttaggagtatgaagagtgcagaaagagagtgtatttgtttgtataaaccaaaacatgtttcaggttcaaatcaaagtcgagcttttaatacagaaggagaagaaaatggtcacctgatcttatttacccatttgtacccaattaggtcaaaagaaagatactgttatatgtacaaaagaaaagagaagagagagcaagatgatgtagagacaagcacttggtgaagaaaatagcaatgtatctgcatcatcttggaatcatcccacaaagctaaaactgctgttggcattattcactaaatcgacttctcttcttccgcagaggttttgcagattgggcaccaattcttcatccgcagccattgttgtacacagctcacatggtacatatgttgacatggaatagtccctaattcatctccatcaacatactcttcctgcatataacatcaagaacattaacattagcttcggttttactaaaaccttttagtacactgtcctagttcagctcagatactagacaaagcagtggattatttctagtttggggtacaaattggggtgaagatagatttttaaaaagacctggcaaatactgcacttgatatcatcatccttatacagagagatggaaccggtttcatctgtctcctgataaatgctttgcttaaggcttcttgagagtgcttcttcgcttagagctgtgctcactgtacccattttatcccccaaagctagtaactcctgcaagtttgtattcatatggttttagctttcatagactttttgagtttgtgactgttaagctacaatagtccaaggaccaagaagtaaaacatgcaagactgacctcatatgacatgttatcgatgtcaagcctcatatctctatgctgatcatagaatctgaacataccacttgagaatagattggtctctatagaagccagttgctatgggaaaagaagcagaacagaaattagcatcgtcaggaaaaccataagctcagacaaaacttgttcatatcaaaataccaagctgctttatacctcatatgtaagctcttcatcatgttcaatcctttccagggccaacaatacctgaaacatttttaaaatagtattttgttatcaaaattcacgaccactcgggaacaacatatcaatgacttcagacaaaatggtgatggaaaatacctctgcaattccattcatgttgtagtgactcaaaccatcccggttcaccaaagagcttgaagggtcagcttccgtggggctaccaggcatattgctatgtacgcgtccagtactactgtatatatttgatggacaaaacgaaagagaaggattgggatcggttggtgttgtaggatgaggcatttgtcgagaagtagcagaggatgcagtagctccaagtcgctctgatctaccaaaataaccagctctcctacaaccatttgaaacaacagtactgctgtccctaatacttggtactactcgatttcttctgttatcagaaactgtgacgccattgccatgagaagaaatttgattccttacctttggaaccaacacactagtcttactacctttgctagataagctgctctctccatcagcgtttttctttttagtcacactgatttttgttgctgagtttgagttagttggaagaacatcagacacagaattgcagctcaagttcctcaatctatgcctactcaaaccgcctcttacagtgtgctcactgttaccagaagatgtagaaacagaaggacccgtcagagcatcgcgggtacccaattcagactttggatgactaattctgctggttcctctacttgagcttcctgcctttgttattacaacttctctagagacagcgctttgaggatgaacattgattgtgactcttttagtcttttggcgtggaagtgtgggctctgttgcagctggatcatcatgaatacaactcgtttccgaagattcagtgtctaaactagatgacggctgtcttcttgcagtaactttggctggctttctcaagtatccaaatccaccaggagtacgagatgagctcccaacaatttcctttctatttaaggtagatggaaccggaggcagaccaacttttgtattgttatccgtagagccaatccgagatctcttggtagaagttacctttgcagtacaaccaactcggctgcagaaaggaacattcttaccatctgtcttgttcatattctcacgcagggtaagaccactggctttccgaggcacaaccaaccggtcaacagatcgtttaccagcacatccatccatgaatcaaagaaacactttccctgcaagacaaaaacaagtatcaatacagatatctggttaaaaagtgcatacaaatagtaataatccactaacaccaaacagaaaaacctataaaataatagcttcaataaagtcatggaagctttaagattgtcttccaccaaaacataaagcaagtcgttgaaagttaaaaaagcatcacggagaaagaaagaaagaaacagacaaccacataaaaaaagcttacggtaacaacatggatgtagataataaatcatccagagcaaaacacttgatgtatcataaacatcaagctgatgattcggtgatcgtagatagataagagagagagatgaacaaaaaactagttaaaagaaacgaaaagagagagagagaaaggaggtgactttaatggttccaaaagaaagggtctgattcgaattacacggactttccataaacataacaacaacccttttctccgcgattccagcttcaccatgaaacaaagccatcaacaacaaaatctaaacagagagatgagacaattaaagaaactttgcccttcaaaatttttccgatcaagctacaagttaacaggattcgaaccctaactgtgaaattgaagaaaaatcttccaaagttgaaaatttcaatccaaatacagaaacaacaagagagaatcagatacaacaaatatatcaacttttttttttctttctcgagatcattttagagaaaccatgtcagctgctgcgagagagaggggaagaaaaaaaaaactttccggcgttacctttatttttttcctttgccgagagattactctgcgccgtctgtgagaattaacaaaaaacgtggagcgaagtagaagagagaggagaagaagatatatatatatatgaaaataaaaaatattgtgggagaagaaaaaaaaagaagtggcgtagcaaatatggaaaaagcggttagagagatcaggaccgttgattcgggttgggttcagtggaagctaaagattgacggctgagatgtacactgacgtcgtcctcagtggatggaagagtattaggaagaattaaaacgacaccgttgtccgttagcggcgttacgtattgtggacggaatgataattgagtaattgaattttgtattttttttggtgaaatattaatggatgagttatatatatatatatatatatatatatatatatgggattgacgattatattatactgtaactggtggaaagtgtaatggattagttaattttgtagataaaaaggatttagattagattaatcaaattattgatattgacaatgtcgagaaaggtgtaataacaaacgtatcgtcctttttggcgtaaatcaagagactccctatgtatcgttcttcgcatgattattatactcctataaactaaatactaaacatgtatattctttgtttagcatcagaattcataaaaacaaagacgatattatttcacttaaatacaaatttcttggctataacttattcacccaagtttctcatatatatatatatatgataaataaaaacctaaacaacagttttttaaaataaagcaaaagataaattttgcaaatagatcaaacgtggaatccttgggtagggaattcccaaagaggcaaagacttagaacaacacgtttgaaactcttatgaggtttttattagcaaataaagaactcttatgacttatgaggttcatatacaaagcttgcactttataagttgttttatgtcttttaaagcgtggatacatcgaccaccatttctccactttaacatttgttttcatttcttttattgggaactttttttcattttcatgtataatccctgtgtcttttttcttttcaaataagcaatcatatcacaagtagttgattatcttcgaaatatatatgaattcagcaaattgtttcgtgaaccttagcttcaatcaaaatatgtatcatttaactttttcttgttgggggaaaaatgatcattttctgacttggtcggagtttctgattttcggatacgacccaatatttgatcaacacaaaatacgtatgcatgtcaggaatgctatgctaggtccaaaaattaaccgaaaaaaaaacttttgaagtttttagtgttctagaggtcctttaattcgagactctccccgttagagattcctactaggctgctagtgttttaagacattattatgctctatgtaagcaacctacattacgggatgaacaatatagagagatgattgcttggcggatcaggaggaatcatgacggtaaaagcaaagatgatagaataactactgaattctccacccaagactctcttgctagagccatcagttttacaaatggtatgaacgtttggtttagaaccctatatatatttgagtatagccacatatcgatgcatcactcgatttggatttcccatctttgactttttttatgttttaaattccaatagccagttgttttatacatacacttttttatgacatctaatatatcatcttattgttaataatcaacaaacaaataaataaatgaaatcgttacttctctttttaggcaacaaatcacagagtagtctttcaatttaatgtgtggattggtaaaagctaaaaacaattgaattgttatttaattcaaaactaaattaggaagaatatatttttccattgaatgtaaagcattaaaaaaatacaattagttattatttatataaggaaataaaaataatgataaataaatttagacatgtatatctatgtaatagaaattacgtggtaagacatatactttaatacaaagatagactagctcaaacaaaagtctacggttttccaaaacgatttacttataaatttgggtattattttgtttaggaacaaataaataaatcgaggatccatggtctccaccaccaccaccacacctaagagatgcgagatttaagctccatttacaaaaactgagttccaaaaataaattagcaaaccctaattttcaaccacaaatctttggagcttacgttccttgatatacacgcctcttctccttggttcaatagcaaaatccaaaattattccatctagttcctttgatctcaaggtattcttcttcttctcatattcttaactctttaaggctggctactcttatttgatatccttctgaaatattgcaatttccttttttctaattgtgcgttgttaggtagcgtctcaggtcgttatttgatttcttaataatggcaacgacgtctagtacaacgaaaacgaaacgggacaacaaaaacctaaccagatcaaaatcactcggcagaaagccaaagccggtctcatcatcagagcctgaagcgaacgcagatggatctgatcggaaaacaattgggaagcctttgcctaattatctgaaacctacaatcagctcgagaccggacccggtcaagttcttgagaaagaacaacgccgtcgaagaaaatcagaagcttcttcgtagacgatcctttgatcatcctccttcgtctttgacttctccatcaacttcatcagcccatagatctctcaatacctctcctgcccacccacacctgcgagacaaacccgcggttccaagggagaagcctgtcactggtctgcgttctacatctttccatggaagcagcaggggaggtctcagaggaagcagtacggtgaaatcacctcctgtggcttcaagaggatcttcaggggtaaagaagagcggtctaagcggtaacagttcttccaagagcaaaaaggaaggttctgggaatgttcccaagaagtcttcgggtaaagagatttccccggattcttctcctcttgcgtctgctcacgaagacgaagaagagattgtcaaggttgagaccgatgtacacatttctgaccacggagaggaaccgaaagaggaagataaagatcagtttgcacaaccggatgaatccggtgaagagaaggagaccagtccagtggctgcctccacagaagaacaaaaaggagaactgatcgatgaggataaaagcacagagcaaatagaggagccgaaagaaccagagaacatcgaagaaaacaacagtgaagaagaggaagaagtcaaaaagaaatctgatgatgaggaaaatagcgagacagttgctactactacagatatgaatgaagctgtgaatgtcgaagaaagtaaggaagaggaaaaggaagaagcagaagttaaagaagaggagggcgaaagcagcgccgcgaaagaagaaacaaccgaaacaatggctcaagtagaagaattaccagaggaaggaacaaagaatgaagtggtgcaagggaagaaggaatctccaacagcctacaacgatgtaatagcaagtaagatgcaagagaactcgaagaagaacaaggtcttggctcttgctggagcctttcaaaccgttattgactatgaaactgctgcatctaagtgatatacatctgcagtatatcacatgcagacatttgcaactgtgtcttaattattagtttcctatgtcagtgcttttcttgtttcttgttaattttctttctataattcagcatagcataagtgttggacaagtgatatggttttgcctgtgaacatgaactagtcatctgcttttttttcttcactgaaagagatttctatatgcaaaaacgtgacattctacgaaagaagtaactcatataagaagcgatgaatctatcagttcatctatatttattctatgtcaactactgatgaagcggaacaattgtctaactcacactgttacaatcctcccgatgcccgatgcccgatgcccgatgcaaacgtggagagagagagagagagagagagagagagagagagagagagagagagagaggatttggttctcgaagagaatcttcaagttgctggtgtacgtcaaaaccatttccatggtgtacgctcgttttatctagaacacctcctctctggggttgcaactcatgcacagtgttatcaccttgtagcagtgggaagcctttgttgtaaggcggaacagcaatttcaagaggatctaggaactcaagcttatcgtctacttttctcttaaaggtgacaaaaagattcacagaactgtcagactttagaagagacttgaacattctgaaagaccaatcatccttgatttccgtcggaggtgtttcctgaccgttgagcctcaccaaaacgtcgtcagcccagaacgacatctcaacaaagacgtcgtgaccaaccatggagaatcttcgccggagaacttgttcaagtgatttgaaagtctgaattttttcgcagttaatagcctttcctggcctagttttatcaaccttgaaatcccaccaaccattggagtagcaaatccaccggccgaccatggagacgcaggattcatcgtcccctgaaaaaacgaaaacagagtcatcgtctccatcgttatttgttggtcgtacactcaatttcataaactgtaaagcttcttatgataactcataccttccatctcgacagattttgacaatgtgtgtatgatttttgaagtgacgagggtttatcttcttttgacaatgacgacttcagagaagatgtcgacgacgagagaagtttatgttcaacgagggtttaggagataagtttatgttgaattttgaatgatattgggctggtttgaatttggcccattagttttcatcaaaacacaagaggggtaaaacggtctttgactattagctgtattagaggagggctgtattagagaggacagaagaaactaccctatcaacctatttttaaaaaaactgtctacttctcaaattatttccctaaaaactgcctagttctcaacttatctcatgaatataatacttctcagtctcatgagcaagcacatgtcctctctctctctttcacaagtttttctctactcatttgaagtttatttactctattccgacgaccacgactcctcttcatatctactctttccgactctcttcttcttcttcttcttctttttccggtgactggagcaggagaaggtaaagcttctgccttttgactctcaagattacaaatttgtttatttttcttgatgcatgattttcgtttataatctctgtgtttaaaaatgtcagatacagattctttattctatccagattctggcagctaaaggaaaagttgtttgaaatttcagagtagtttggtccattgtgttgttgttgttgtatgaaaagaagctttgataaatggagactaatcagattgaggaaatggatgtcgaagtcttgtcttcgatgtggcccgaaaatgttggacctgaagctgacaaacagttcaacgtcgagaaacctgctatagatttagacatgttgaaagaagtcacaatcgaagagaaaccgaccattgcagatttgacacggttaccagaactattgagtttgactcagcaaggctcctctcaactaaccaacctcgtgaaacaatgggagtatatgcaaaacaacgcggttcggctattaagagaagagcttaagaatctcgatagacagagagaagaagctgaggcaaaagagttgaagatcattgaggagtataactttgagagccaccagcctgagtatgtttcggttttggatgagacgagtgatttgttccgcgggtttaggcagaagagacgagaagtgttggtcgatagcaagaagattgagatctatgaggagtttgatagcaagaaagttgatgatgaggaaaatagcgagacagttgctactactacggatatgaatgaagctgtgaatttcgaaaaaagtaaacaagaggaacaggaagaagcagaagttaaagaggaagagagcgaaagcagcagagtgaaagaagaaacagccgaaacaaaggctcaaatagaagaattaccagaggaaggaacaaagaaggaaggggtgcaagggaagaaggaatctccaacagcataggctgcaagagaactcgaagaagaacaaggttagggaacaaggttttgtttcttgttcattttctttctgacaaaagtgaatatattgaaagaactaaatcatataagaagcgataaaatattacttacattcactaaagcagcttttgttctgattcaaatagccgatacaattgtgctcttgtaaaagctcctactgcctttgagctataaccgctcccactaaaattcccgcagtgaacaactataaccatcttaagcttcttttccaaaactagatctaccacacgaccaatcgatgttgttgtactcacacatgtgggcgggcttctcatcattgagaccaatggcgcatcaagctacaagaaaataattaaatgcacaaatatatcagttcatctatctttttttgtgtcaacaagtgctgaagcggaacaatattttgttttaactcacgttattgcaatcctcccgatgcaaaaggcctatgcagcttcccctgtcgtctacaattggtacaacttgctccttgaaaaaccgcatggccacattcttcaactgcagagtgcctagcagtggccgagtggcttcaaatcgaatcataatgctttctattggttcacttggtatcacctgtgtcaatagattgctgttaattaccaaacttacatctcagtattagattgaaaaattgaggcaagtacagcaaaccaccaaacctcacattctgagatcatttgcctgaatagagagtgtgggcaatagatatctataccttactaagtagatgtggacgcaatatagacttggaaaaccccaacaatgtttctaggcggacagcagcctgcggttgaacaaaaaccacccaactaaggtttcaccggacataaccgcttagtaaatacatgtttaccaaaacaaaaatctcatgtctgcaaataacttttcacatcataccatgcctccactagtcgtccaaggtattgtcttccaccttctcacgatacttaaaagaatccctagggcctcatcgagctgaaaaataatccataaaattagttaagaggacccataatcattaccagactagtatcaccagaaaatgatagacaccacataaaggataaaacaaatagaaggcccaaatccagagagtttatctaattcgttagtacctggccatcattgagagctgcttccatcaggagattatcagcttcttgttgaaccgccttggagattgatcctgaagaatccggccataagcgaagatacagatttctaaccattccataatccccttggacagcaaacgcacgcatcatagacaggtacaagtgaggctttggtcgcaagacttcattagctccacttctcttcaatatctcaccaaatacacaaagggcccctgtgaacatattcaataaagaccctaagaagttacttcaagagcatctatgtccggatgctgaaagcagcaataatcagaaataaattcatagtatcataccgcttgttgaaccacacttcagcatggcatcaactactgctgtaaatgcagttcggtcaatgaacacgttctcacacaatttcatttccaaaaaaatttcctgcagtgataacagatccgttgcatccccaaacccctaagaagtagaattatcataagaggcagaaattgataacgtttaaagcagaaactaaaaagagtactaggccatcttcctacataatgatcagatatgtaatgagatattgctggctcaccttcaccaaagtggtgtaggttacaacatctggctgaagaaaatcgtcgtaatattcctctgctttctcctgaattatattcaaaaccaagacattataattaatatgagccaagctctaccccagtactactctgagtaacacttggagtataaaactggcctttaaaatatacatgtgtgaccttcatatcattgaaaaacttcatagccgcatccaagtcgccacacttaatgcaggcatggatcaaagtattgtaggtcaacctatctggctccaatctaaggcgtaacatttcatccagcaaatttattgcagcttgcggagattctgagttgacatagccctgaaatatataacaagacatataccatgatgatgcttctctgaccctaaatcaaatgcaactatgtgtaaagaattaccttcatcagcaagttatagataagaactgacggagtaccatgatctagaagcaaaatatcatatcgtgcaagcagaccattggcacgacgtaaatctcctgcactagatcaatatcaagtgtttttgcatcagcttcaggccatttcactaacaccaagattacataatcaagattagctgcagcctgttgagcacgagaaacagttacagcttaagaatcttaccagcattgataagagcgtcaagcagaccatagataagagatgatgacaatttgggagtcccagcagcagttccatactctatagtctccagcatttggaacgcttcatcaatcctccgagccttacccaatcccttaaccaatacaaacgattcgacatcaaattcaggttgacacacgaaatcaaaattcaaaattagaggaaagaaccaaaattcaaaattagaggaaagaaccaaaatcaccttcaagatagtagcgtaactaatagagtcgactccaattccaccaggttccgccatctcatggaacatccgaagagccaaatcaatatttccacagtgaacgcaagcttcgagaactgagttcatcacaattgtgttgagcctcccataccgtttcttagcggcttctacctcctccacgatctgaccaagctgacgacggcgcgtgaggagaacaatgcgagaagtgagaggcttgagattgattcgcctggaataaggagtagctctgcgaggataacaccgtcgtgtcggaacaaaggagcacgacggaagaagagggagaggagtgacaagagtagaaatagctgaaatccgattcatcttcaaggagaccagaagctacccatccgccattgatgggcttcaagcttcaccttgaggcttgagctaatcgaaatagataacgttggagagaatctgaaatcacagcaacaacaatcagtcaagttattcttcaccttggcgggtcgaacaaatgttacacagtgtggagatttaacaaatttgggccttgagctttgaacattaaagcccaatatacttatattcaacgttgacgtgagttttgacttttcgttcccctaatccaaaattgcttctagattaagctatatctctccagaactaattttcgacactgcaacttttttgacgcggaaacaaaatatgaaatatcctaaattccatggagtctcaatctcatccttataaatatcatcaaaactacaaccctttttaacgcggaaacaaaaaactaagaacggttccatttgttttcattgtctagaagagaagaagaagaaggatgtgtttggtgttcgtgtgtgatcaggacgagagggtgatcggaaggtacgcagctcctggagcgtgtccgtactgcggaggagcggttcaagtggttgacgtaaatagccagtggagattctgcttcgttcctctctctaataaatccaaacgtcgtcatctctgttccacttgcggcaaacgactcatcgtccatggctgaaaacaaaactcccacctcatacgagatcatttctatatgtacatatatccaaatctctgacttgctttgtgtatcgtgtttctaaacgtttgtaagaaaaagaaaagaacatgtcttctcttttatgatttctctgtatatgtatgaatcatgattatgaaaatgagaattttaagaaattgggattttggagaacaagaatgatcacttgcaaagcttgagctttttgaagaaagaagagacttgggatttaggataaggctttgtagcaatacacgtcggaatattctccggctgctccatccatagcttatgagagattcctcctaatttcagcttctctgacaaattcatcatctgcgtttcccctttaacttccagagtcacctaatccccaaaaaataaagtgttttaattaatccaccattgattccggccagagaactctaaaattagggtcatgttgactaaccttatgcatagaatcaatgtgctgcggatcacagtactgaagcgtgaccggatcgtctttgaacgaccagatcgctgccactgacgcatgacatccttgtgttacaacgctcccaagtggccacgaatcgattagatctcgtcgaagcacaacgtattgcaccacgacgtcgtcgggtttctccgccgacgaagcatcgacgacggcatcgatttcgccagtctgctggctcattgaaggagaagccgttgtgaatcttcggaaatgagcaaatcggatcgtagaatgataaaacctaattcgcggcgccggagcagagagtcggcgggtaactatcgggaatcgaaacgctgcggagaggacggcggtcgccatatgaaaggaagacgcacatggacttttgctattggataagatttttcttaatgggcttttagtagacccagttattttctgatgtctcctcaattaaaatcaaatctaaattcgctctggtttatcacttaaacggcataaccaaactatttcattcgctcgaaatccaaaccaaataaattgattcttattttcctgattactcttttctcctttcgcggttgagattttatgatctttccgaacgaaatcaagcattccgacgtccgtacactatccggcgctgcttaaaccgtctctcgtcgcctgtctgatctgttatcttctctactctccggtgtcgttgagtaatcattcttttcttcttctgatagagttaattttctttgttatatgtttgaggctgctgcacgaaattttagctgtaatcctctgaaaacaagctctgctgataggcatgatagggtttctaaatcaggcttgtttctgttttgtatcgttccagtgtgttaatactgagcagaaatcgtgatttcgctgagtataactcttgttgatttggtcgctttagggttttgcttctcactcgttttttcagtgttgcaatttgtttgaattatagaattacttggaaatactagctgatttagatgtgatgtatgaacattgaaaattttggtgtagagattgattatcaacttctctgctttttggtaggagcttggtcaaaagacctcttgataagcaaaatatgggagaaatggtaaattacacaccctttccaggttttttattttctttttccaattgttaccttgaaaaaggcagattccacaacatttgctttcgttgcaaatagattgtttcaatggaccaagatatccgactggatacaacacgagcaagatgtgagtaaacagcttttcttgtgcttcagatccttttctttctttttttggtttaaagctttctggtaataattagtcaatctttatgctcctttcctagtgtcaaaccttctcaagaggcatcgagaattgtcagaccgtcttactaggtaggaaatatgcttttgaactatatagttcacttctcgatctttatgtttgctaagtttgtatttggtgatcattcattttagggattctgataagacaatgttagatcgcttaaacaaagaatttgaagctgcacggagatcccaaagtcagggtgggtatggatagctgaattgcagaattggacgaattatctaactgactttttttttgcttcataagtatttgctcatccgtgtatctattttaatcaaatgctgtatttgctcctatcctctgcagaagtcttcttagatggggaagagtggaatgatggtttgttggccacattaagggaacgggtatggcatccatcattgtgtgcttccttttattgtcaacattgttgtgtacttaaaagaggtgttccaagccttggtatctagttgaagaagacttagtagacactttaataagggcagatctagatttgattatgtcgttctgataaaaagagttatatgttctttgtgctatgaaatcttttatgccatctttttcttttcttctgttggctttattgaatttttcctgaacttgaccatgaactgtgtaggtgcatatggaagctgacagaaaggcagataacggtaatgcaggtttttcactagtttgtcatcctgaagaacgaattacttacagagtgggaaataaggtactcctgaggtcttacattcttccaaatttcttctgtagagaaattgattttgtttgtacccaaggtctgttggtgtaagccttatctaagtctatatagcacagaatttaccatgattctttcaagatacccgcaaggaagactacttctgtcacaaaagatatactatatggctgtagaaatttctggatagtccaaaggaaacctatcgttttgttcattcatcttggccggatgcaatgtttgcctaaaagatagatccaatcagaccaatcttggttgtatacttgtatatctttgttgaagaatgttgattgttgtaatgttgtgtcttcccccaaattttgtagttgctacaaactttcctgattttaaagttttgactgacacctggctaatcttaagtttagaatgacctctcactttgaatcgataccaggtcgtttttgcttatatatttggtgttttatcaaacaggtgatatgttgcctagatggatcgagaattggaatacagtttgaaacatctactgcaggtattttgaactataactggcattttgtcacaatttccaagtgttttttctttaccaaaaattattagcagttatcataatgattttttcttcaaaggtttcttaccttttggcgtgtcagtgaaagagagttagctgttttgtctccatatttctatgtatatgaagacattgggacttttcctaaccttttcatctccctgtatatgataattaaatccgttttatataggagaaacttacgaggtttaccactgtgtgcttgagagcaagtcgtttttggagaagatgattgtgcttgagcacacaattcctttctttttgccgctaagtgacttggaaaatgatcttcttttttcgaatgctaaggtacctgatcttcagtttatcctcttacttccttgtctcttatatgtttttggttttaacatttttcgatgccagaaattcatcgataatgttggggatctcctgcaagcatatgtggacagaaaggaacaggtttgtcaaaaatctagatcatgagtagatgttcaaacttagattgtgcttgtcatattggccttttaaattgttgttttcggtcatgacttcttaagtttttaacctgctggcttcttgttcaatttgtttctcagtaaaaatacatcaatatgctctctagatagcaatgaaaatggtactaaaatcatgtgaccagttaacttggagtaagagaatctcagcactaatgtatcatcaaccttgtcagattaggatatgaaatgatttttagatgtatttattttataatgaaaaacggggccaaataatctggtgtgactataccgggtgtgttgttattcaccactgtcggtgaaatatgcaccaaaagtctaaagtgttaggaacctcttaaatttcacaagttaaccaggatgcttctcctgaatttcattataggtccggcttatcaaagagctctttggacatcagatcagtgagatttatcacagtcttccttaccacatgattgaattttctatggatgattgtgactggttagcaatttcatagatccatatacttcctcttaactgctgctacactagatattgatgtggccatgttgccacttaaaattttgtttttataaccttttaaaaaaccagatatgttttggattatagcaagttcgtggtgagccttagatatggagatcttctgtgtgaacttccgacaaaagtgagaattctagtatggccaatgcatcatctgtcgaagaaacagtgtacaagccctggaagtccagcaatccctgtgcgtttaccatttgccgaggatgctttccggatccaatcactacctgaaggtattcctagtttaaataacgatctgtttaagttatgtttctacggtttatttattcttttgttcattgcagcatacgcagagattatgccgaacatgccgaatgaaattcggcaattatttcagactagtccaagctaaaagttgaagctgtgtgcaaactttctacttgtctcgttgcttcgttgtatgatgtttgattttgatccttgttccaaactgttaaaatagtgctatgaagaataccttttacagaatggatttgttctgctattctattccggttaaattgtgctgcttcatcgattagcccattactaactgctcgaaacagaaacagatagatgtatgaagttttgttctctatggcatactgtggttcgatcatatccttcatgaatttacgcacttgaaagtcaaaagtggctgtaaatcaactaaacttatctacaatgagaagagatatacatttgttttcttggtccaccatttagcaatttttcatattaaagatcctagttgaagtaattaaaaacgaaaagtatgttactaaatatgaaattacggtgatggtaaggaatcccggagttgtgttacccactttgaattatcttttcacaaatccatccatgcaaaaactttaagagtcactacttatttttgttgctgttccttcccccatcacttgtcatatcacaatttaagagattatgctccttaaacatatcggaacttaacatagaaagttcttgataaatgaaaaatttgttcattgtttcaattatttttactgtatgaaagaattcaaatgggtttgtacttggcaaattactttttgtatttttcaatgagttttttctcaaaaaaaattagtagtaatactcaatatatctacatcgaataagtgacacaaacaaaaatcaactcaattcttctctagattatggccggactatcagacttaggatcataataagagaatgtacactttttccttttttataaaaccagaaaacagtacattggagatttactttagatctatcttcctgagtgatttattattggaacatatgattaagacactgaaaagttccttgtcagaaatataaatgtaaagaactctgaccagggccctacacgggatagattatcgaattttattttaaccctttttaataatggaacccaaaaaagtagtatcaaataatactaaaatcgactttaaagtaatactaatccaagtgttattatgaaactactgaaataccgaaaattatggtatagccacacactaatagaacctcttaaacatgtcatcttatcatccatctaaccatcttaataagttatttattctgttggaaaactaaaatatagtttgtatgttactcttaagagattcacggatgacatttccactcggaaattattataaattctaacaatataatattattgaattaacaaaatgaatctatatggcaccgagtcattcataacaacaatatatatgcccccaactattgactacaataaatcgacaaccaatttgcaagttttttttttacttaatcatatgccaccacgacgtaatccatgatgggttagtccaaggaggtaaaactttcgtgagatggtaaatttctctaataatcttaaagtagtcataatgtcaaacccaactttgcacacacatgtattatgtatatgaatataatataataatgtactaagtaaataattaggaagaaagctgaaaagtatggtcctgctttaatcgagaattaaacaaatccggtatttaaggattggtgtccccatccaattaatatctccacattctcgtcttttcgtccaaaactaaaaaaaaataacaatatccttaatctccttcaccaccgtccataatttttggcgcgagagcaacaaaaaaaaaaaaacacgacaaacagaagaaacttgtttgaaaatgattagaccacgtgttagtcaacggtaattccacgtgtaacattgaggctgacgtggaacatgtgactaaccacatcacatgtttcctattagccacttacggacgggacaaaagcctccgagcgccgttcagatcgggacttaagacaccaaaaatggcttagctgttttcttaaattattttaatttaaagaccctttaatttattattattagttttgattattgtgtgtactattaccactagttgctaattttttagtatttaatttattgatatagaaatgggattgatttcagacaactaattttgtgccaatacagttgttgtccgctccattgaattgtgaggattgggtcttattcattttttctattagcttttctcgtgtttttttatgcgcaaggtgttcaaattattgatcatactagtttgcaactgaaattgaagcgtagaatatagtttaagatttgggtgattaatacaaatattatactactagttacgatacatttatttgtggtactacatgtgctttctgctattcatgaaacaatgaatgtcccgacccaattcgaatatttgtgtactttcgtcaacattgacattctatagactatatattagaaccacatgattatacattttaaaaaaaaatcttcttttttcgtaatgagtagtagtacaaaaggcaaaagaaataaatcatgcattcgttacttattgacaactagaaataactataattatgtttagttattttcattatcggatcatcaaatcatctaatatatttttccaaaagcttaacattctacaaaactttacaacacaaaaatttatatatatgattcaacttaaaaattcatgagctaaacagagttgctctgtttcggaaaatcattctaattacgtagaataaaactcacttatataaatctactaatcaaagagttgtccagtttactgattaagtagccaaatcatgaattaatagtgatcgtcgtcgagcaaattaaaatccaaatctataacaattattgacgccacttctagttactcctcaataaaggaagttgctaatacttaattaaaaaatagtgtgactatcctcaatatactcggagcgtgacgtaaacgcgccgccttatagcttccgtcgtcaactctgtgaggtataaaagacgtaaggaaaagcagagaaactggaggaaaaaaaagaacagagagaaagagagaagagtgaattgtgagacagatcgaaacgtgtcaatctgtgtgtcattcgatagtaactcggattcggtctcagaaagaaaacaaacgtgcacacacagagcagagagacagagtcgccattaaaatatgtccaacttaaaaatgtgagaaagagagagaagagaagagaagagaagagatgaatataatatacattgacctctctgtctcatgagcaagcacatgtcctctctctctctctctttctcttctccgtaaaaaaaattaccaatctttcacaattcattcacatgctcctctctctttcttcattggctattctcttcccaatgctcatttgaagtttatttactctactcccgacgaccacgactcttcttcagatctactcactccttctttctctccttcttcttcttcatttttccggtgaccggagtcggagaaggtaaagcttctgatcccttcccctttcctccggcatactcgttcctctgctttgtctttcgtttttttcatttctttctgtttcagccttttgcatctcgagacttcatgattacaatttctttatgtttctcaatgcaagattttcgtttataatatatgatcactgatgtcaagaataaatcaccaaagatttttttctttccatatattttttccgatcatcgctcaaaaaaaagtttcatcgtttaaatttattttcagattttatcgtttattggtgaattttatgatcctagttgataattcaatctgaaaaaagaaactgatacagttttctttttgaagctctgcaaatttctgatttttaagctcgaatcatataatttgaagtttcccgctaatgttcaatcagaattggtccacacacttagttgttgtggaccctttgcaaaattctattttagttcattatttttcacattttacagatcaagattctctgatggagatggtttgtcctgactctaacctctgtgtttgaaaatatctatacaggttctttattcagatcaaggttctggcttaaagaaaaaagttgtttgaattttgagatttgtctggtccattgtgttgctgttgttgtatgaagagaaaccttgatcaatggtctgtgaaatggagactgatcagattgaggaaatggatgtcgaagttttgtcttcgatgtggcccgaagatgttggaactgaagctgacaaacagttcaacgtcgagaaacctgccggagatttagacacgttgaaagaagttactatcgagacacggaccattgcggatatgacacggttaccaaacctattgaattcgactcatcaaggctcctctcaactaaccaaccttgtgaaacaatgggagtatatgcaagacaacgcggttcggctgttaaaagaagagctaaaaaatctcgatagacagagagaagaagccgaggctaaagagttgaagatcattgaggagtataagtttgagagcaacgagcctgagaatgttccggttttggatgagacgagtgatttgttccgcaggtttaggcagaaaaaacgagatgccttggtcgatagcaagaagattgagatctatgaggagtttgacactgttgcatattggaaacagaaggcgttgagtcttgagaaaatgcttgaggcgagtactgagagagaaaggcgattgatggagaagctgagtgagagtttgaaaactatggagagtcagtcagcaccggtccaagagcttactcagaatcttaagagagctgaaggtttcttgcatttcatacttcagaatgcacctattgttatgggccatcaggtaaagtaaaaggtgattcttgatcttgttttcgatcttttcgacttttctgattctttgttacttatgagtttcaggataaagatttacgctacttgttcatctacaacaagtatcctagtttacgggaacaggttagaagaaaactttttcttctgttggatttattgaatcattctctgaggaaatgtgtttaaatcaaaatctgtttcttactatatttcaggacattttgggaaaaacagacgtggagatattccatggaggtggagttaaagaatctgaagatttcaagagagaagttcttgagaaaggaaaagcttcaaagagagagatcacatttactacagatttatttggatcaaagacgtttttgatatatgttgagcctgtttacaacaaagctggcgagaaaatcggtataaactacatgggaatggaagtaactgatcaggttagttagctaaagatttttgaactattctataatctatgttctcattttcacatcttcactggatcttcctgtgttacaggtagtgaaaagggagaaaatggcgaaacttagagaagataacgctgtgagaaaggcgatggaatcagaactgaacaagactattcacattacaggtttgttcaagttaagcagtgaaagttttagaaagattaatgagaaaactagacttaggtgttgtgttttttcttttgcagaggagacaatgagagcaaagcagatgctagcgacgatgtctcatgagataaggtcaccattgtcaggagtagtgggaatggctgagatactttcaactacaaaactggataaagagcaaagacagttgttgaatgtcatgatctcttctggtgatttggtgcttcagctaatcaacgacattcttgatctctccaaggttgaatcaggtacaatatactgttttcaaagtttttgatcttgtggtgtggtcattgttcaaatcctcgattacatatgttattttttggtatttgtgtgttctttttaggtgtgatgagattagaagctacaaagtttcgaccaagagaagtagtgaagcatgtgctacagacagctgcagcatcgctgaagaaatctttgacattagaaggaaacattgcagatgatgttcctattgaggttactacacatttcagaaagagttaaatgtggcaaaagtctttgtgatcttaactttttttcctttaaatgtttaggtagttggagatgttctaaggattaggcagatcctcaccaatttgataaggttctttacctgattcctgtattatttgcataatgacaagtttcggttcctgatttgttcaaacgttttgcagcaatgctatcaagtttacacatgaaggaaatgtaggaatcaaactccaagtgatatcagaaccatcctttgtgcgggataacgcattgaacgcagacaccgaggaacacgaacaaaacggtttgaccgagacttcagtttggatttgctgtgacgtatgggacactggaattggaatcccaggcaagcaagcaattctgacaaatgaacatgaaaagactaaaaaactccaactaacctatatattaacctggttcatgttttggtgttcttgtgcagaaaacgctcttccatgtttgttcaagaagtacatgcaagcaagcgctgatcatgcccgaaaatacggtgggactggtctcggacttgctatttgtaaacagctggtaagctattattaggattttacaacactacagaagaaactaatgaagctcgttatcctaatctttctctgtttgtttacaggttgagttaatgggaggccaactcactgtgacaagccgggtgagcgaaggttcaacgttcacatttatattaccctacaaagttggaagatcagatgattattcagatgatcaagatgagttctctgatatggcggatcaacaatctgaaccagacgatacagctgaaggatatttccagtttaaaccgctcttaggatcgatatattcgaatggcggaccggggatcagcaatgacttcttacctcataaagtcatgcttactagtcctattaagctcatcaatggttttgtcgctgatccctctaataacactggacagagcgagatgctacagcttgaaaacggtggttacatggatgaatctaaactcgaaaccagttctggtcattgccctgaatcagctcaccaatatgagaatggaaatggtcgatgtttctctaaggaatctgaatcttgtagcagttcacaagctagctcagaaggtggaaccttagaaatggagtcagagctcacagtttcatctcatagggaagaggaaaaagccgagacagaagtaaaagaaacatcaaagccaaagattttgcttgtggaagataataagatcaacatcatggttgcaaagtcgatgatgaagcagttaggccataccatggatattgctaataatggagttgaagccataaccgcgattaatagctctagctacgatctggtactcatggtatgtaaattttcttagctctaaggacttgtccttttcaaattcacttatatttgaaaaaggcttataattcatattgggttcacaggatgtgtgcatgccggtgctcgatggtttaaaagctacaagactgatccgttcgtatgaagaaactgggaactggaatgctgcaatagaagccggagtagatatatcgacatcggagaatgaacaagtttgtatgcgtcccacaaaccggctgcctataatcgcggtcagtacttcttttttgaatactaaacacagagatctaatgcataacttgagaaaactgatagtcagaatgcgttgtggaatgtgcagatgacggcaaatactttagcagagagttcagaagaatgttatgcaaatggtatggactcgtttatttcgaaacctgtaacgttgcaaaaactgagagagtgtttgcaacagtatttgcactgagatttcagatttttgtgttttgtagattaagaaatggttgtgttgtatataaattgtgtaggaaaaaagttttggagagctactaagtagcttcctctttttagagatgtatagttcaataaataaataaaagcttctcttctttatttatttgtgggaaatttctggcgagagaaacaagtaaacatttttgttcccaccattcgaatccagcagagtactaaaagcagccaagctctacaaaacgacattgagcatacttaagcttttcaaaacggacttatctcgatttctgttggctgtaacgttgtattccatggacatccacaatcccgggagggaacactggatctgtggctgctctaactgcgacttttgcaaccgattcaacattcaccggaggtgtgaacaaaggtccgactaatggaagctggttcagaggttttgcttgttgaagaacctacataaagccacaaacattatgagtaacgaggtaatcttgagggatattgctataaagagaggatctcttaccatctccatgggtgaaccaaatactcctaacgggatcttcatgctcccaacactgcgagttccatatataaaaccaggtcgcaagattatacctgcacaacattcaccaaaacttcaaatgtaaaaaacaaacgagtttcagagagagttttgtagatgtaccacgaaacttatacctccatatgcaaatcttgtgagcagctcggtctcagcagctcgctgtaaggatgaaatgaaaaattcttaagccagcttatactaaccaaaaagggctatgaatagctgtagtttgaaaagtatatgatcacctttccctcatagtatcctctcaacaagtagttggctaatccgaaatccgcagcagaaatatagacaaatcttttaacacctggtcaacgatgggaacacaattaaaatgccagtaaactctcgctaatccaatatatgcccagctaatatatttccaggaagccatggtttcacataacatttcagtgctccacttatccctacgatcaactataataaattttgaaccatttggttcttagtatcatatggtcactcagtgttcatctgagatagatatctcaaaataattacatggctatcaaaagaaaaaagattggaagcatttatacagacctgattaatgcaaactagaagaactcatacctttttctgaggcagccctaattgcgttgatgtttgcagtcccgttaatcttatacatatatgagtttgaaccaaaaccaccaacacaagaaatctgcaatgattcatttcgaattactttcaataatgtacaatctacaaaagcagtactgcttcaataattaaaagtctgtagcagtcatcaaatctctacatctatccctgcaaacagaacaaaaagacataccacagaagtcactccctcaagagcatctttcaataaatcagatgatagaaggtttcctggaaacaaaagtgaaaagcaaaaagaatatgaacacgcaggaaaaaataacaagttcctacaaaaatgttgaaaagttaacaacagtaccttgatgccatgttactctggaggcccaggactcttgtaaagacgacctacctgacctaaaacccatacaaatggttaaatgcaatcccgtaaatcaacatccaacgtagatcagatttcaataaatgagaagctttaactgtgatccacaaatttcaaccaaattacatttgatctaagacatgagttaactccctacaatcaaagtttagatacctgctaaggctagagacagataagccgcgatctaaagcttctttacagacatgtgatcccacaaaaccatttcctcccaggacaagcagctgacaatagaaatgaaagataagttccaagatcatgatcatcattacaatatctttacaaagaattactatgtaagatcccccaaaaggccaatacgtataccttctcagtaggaggtggaggcacatgtacagtctcagcttcttccacattgaagggctcatcaattttgttagagtctgtcgagagatacctcccgccaccagaggcagaaacaaacctaatgcaacataatccataagcacagaacagtaaagctaaagtcaagtatctgaaatttcacaaaacactcaattgcaacccaaatcacctaattgttagaatctagatcatgagaccaacctagctacgagtaattaccaaaacaaatgcacatttccttcaacatcctactaattgatgcttagaagacgattaaggtgcgatcagagttattaaagagctggggaagagactactcaccgtatctgggaaagagacgattgataacgaatcaaacgcgaaacgattgtcctcattttcgaatcggagaagaagagaaaaagcaattcgacgtagagatgagagctaacaaaaatgaaaagtttgtaagaggagagagtccgatggcgatggaaatggaaatggagaagctcacggccaaaataatcacagcaaaacgtcgaaaagagcgctacgaccgtgaacacgtcgcctcttaccaatgtgccacgtagaccctgacccgagtatccgaacccatgggaagccacgagagccgcgcgtggcttcaacacgagatcattggctataaattgggccgaaattaattgggcttatattctaatggaccttatatgtatggtctggctcgctccgtttcagtagaattcaccttttgtcatttaatttacgagaatgccacttgcattttttccaacactaacaagtaacaacaatccaaatccaaatccaaacccaaaagaaagaaaattaaaagattcttgttctggatgatgatgggaacatttggtacatgcatggagacttggcgagtttgataatgaaaaaatacaacattcttaatttcttaatcaagtaatatttacaaatttcaaatacaaagctagatgaaaacgtcaaacgcaaacctcatttttattttttgaataaactatcatgaaatttaaaacatttacacataaacaaatacaaaagtcgatgcatgtattatatacacacaaacgtaatcataaacttaaaacaatcgtattaaatacatcttcaatcctaaatgcaaacgcgatcaacgatcagtaagtttgtttgccgtgtttgagggaagagaacactgtctttagttcctagagaatagagggaatcgctatttataccttgtcggtcactgaattcctctcaagggtcagtgtatcagttgagcgacttgcagtgtccggttttcgattcgttacattctctggtttgttccctgagccgatctggacttgcttagcttcattcgatgagatagcaaggtctccaagtggaggcatttccttggcttccttggaggaggaagagctaatgtggcttgatgaagctgacttcttctccaagaaacgaacgacaacacatgtgatgttatctgcacttcctctctttattgcttcacccaccagttttttcgctgagtcctcgggatcttcaacttcctttaccattgcaactgctgcctgcaaaatatgatcatgtattattgtaattaaattgttggagtaggaaatagaagatgttaaagaagcaattcacttcacagacctcattagagaaaacatcccacagtccatcacttgctagaatcaaaaactcaagagtatcatcaatcttttcttcctgtattcaatgacaaaagtttgagaaatttgtcagctggagacaaaaggggacaaaaagattatgcaatgtgattcttagagaagtgatgaaaagacctggatttctggatcagcaacaacatattgcttcagaagccgatcaccaaacgcacgagaaactgcaagaactcctcctaccctccaagttcctatttagtttatgaatgaacacacccctataattaggactatatgttgaaaaaagcatgaagcagcagaaatatagtcctatagtttcttgctacttacctgcccacatcacaaatccaccagcattctcaatcctttcacgttcatcactttggtccggtttatggtcccttgacacagcaatggctgcaaggtacagatttatgaaaaaaggtattatctatcaggatactactacatgatattggtggtgccatacaaagatattgcttacttaacattacaatgatatccaccaaaaacaaaaaaagataagtcataacggatctcatagaaatttaccttttccgcctctgctgataacagctctagaatcaccaacatttgcaacaactaaacggtcaccaacaagaatagctgtagacgcagtagaaccagcgtctctattgtgactattttctgacttgagaagttcggagtctgtatggttataagcatcagctggaaaacattgaagaaaatggaatgtaaattagagtcctgctgcatctacaacaaattgttttaaaaaagctttgctcatgatttttttacagtacttatagctgatttggtgtcagagataaactttgggtgggtgatcagattactgaaaagatggcgcttcacgtactcagctgctctggctccaccatggcctggcaaaacagtaagtaacattattaatttcttgttttctaatgtcaatactaagatataagctacgttacagcgagaacacgaagttaattagcaccaagaccaatcttaatgtcatgactcctggcacaaatgaactatcaggattcataaaccaggctaagtttctcaagagtaatgtataagttcttgttaagaacagagagggaagataccatcaaaaactccaaatagaccaactatttctccattgataccgtcgatcctagtttcaaaaaagtcttccatagatgatctcttgccagcggagcttgcatatccatagctaaattttccattctggctgcaatagaatcatatcatgtacaaagcacaataaacatttaacacaccaaaaatcacactttatgataggaaaacagaatgaaccagtgagataaatcgaatcgaacaaggtgagaaagaaactacaatcacaggatcaaaatcaaatccaacataattagttattggttcaagtaatttcatactcacaagtcacaacaaagaaattaaattcgagattgagattaatgacctgagacctcctccgctcgctggagcttcaacagtctgcggctggttggaatacgacaaggccaagtccaagtatcccataattcttcagaaatttcaaacgcgtattcggtattcttcgaatcaacagataatctgcccggaatcttcttctaacctaaaattgaatcaaaaacgggatcgatatcaacaatcacgatttcggaaactcagaatcgagctaaacattttcaaaaatgaaaaaaaaaagttttaaaaatagtacctgaaaattccatgaaagaattagaagagagaagtgagaatgatgggagattcatggttgattcctagttgagaaaaatagagagagagggaaagagaaaaacaggtgatcgacgttaagagaagggagcatattccggcgaacaaatggatttatttgctaaaaatagaaaaaaaaaaaaaaaagtagaaagaatcacaagtcaaccaaatttggaggatgtaccgaagctgacacgtgtcacgtaaagcaagtggagtagtatcacgtgggtccttcacaagtccacatgtacctttataattattggcaattgggctaatgggcctattgttttcagcttgactggagtagggataagtctactcctagtgccaaacagcagctaaaaacttgcaatcggagaaagagtgtgagctgctgtacacattgatactcccatagttactgcttctcgtcgccggaggaaacccaacggatccgttttgagatcaagaagaagttcattttatcgtctttcatggcgaaggagcagcacttacgaccttggtttctggatctagtaccggctttggttgttttgctcgccgcagctcatgtcatcgccttggtacttctcgtgatcttataattttttttctctttctctttttatatgttctgatctttcgaatggtttatatcttggggctcgcagggttactggatttacagattggccactgatcgtcgagctcagagtcagagaggcaaattccactgaagaaacattcgaataggttcgtgatctgaactacggtggtccagaaatttcaacagttggtggattttgcttccgatctgatatttgcgattaggtgggggttttgtgatcattgatttagtcgcttatgaggatttcggaaatgtttgcttggaattccgcctaactagaagtgattttgaagatactggttagatggatcatatcagctcacgagttcgttttcacctatgttttagcttctttttttgtcaaccacacctatgttctagcttatattgacttttatgcagctttcaggttcttctagatagattttgtagaagtttcaatcatcgtttcaatacactagtgtaaattgaaacaataccaagagggtttttgtgtgcctaatggttgaattgcgttcttgagaggaggccagtgttctttgttcttgactcctctcaataacacctttgagtatcattcagtgtcaaagagtattgctgtcctgtgataaatctttataaagagttcagagactgccgaatgcgatttcaacttaacaagattgtccgtgtgttaacacttaacatattagttggtctttgatcgagtacttaagtataggattgaaagattcgagggagtctttggtattgggtttgcttgggagctttagggcatgggagagtaaatgatgctctggaattcatctgtaggttttggtttgttcttttgcttctgagtttcttgtttgttcattttttctctgtggaaaaagaaagcagaatcagttttggttcttatccccctgctttctcgttctatgttttcgtttgagtttcttactatcgtcacagacagattattcataggtgcttttcatatggcaagtaactacccttcactggtgtttcacacattgtctgatggtaaggccaaatttcaatgtttatccatttgtgttcaccaagacagagttttagtctttctatattaaaactaagtatatatgatctctaaccaagagcctactactgcagggcccaagagaaccgaccagaagatgtaaccaagagtagaaaattgtcttcggaaaccattttatttagctggaaatggttgtcagcttttaaaacaaagttcacaatgtggatttgtataggttgtaagttttgcttgattagaaaacggggataaacaaaaggataatcccttttcatggcaggtttagaagctctaaatatgacttaaatcacacaatcaagcattttcctttgcttattagtttttctcatttcatgtttccttaaccagttcattgattttgcctgtccattcttgacttgtggaatgtagtttttttgttttgttttacttttgcttggtattatgtgacaattcttataaaagcttgtatttactggcatagattcatcccttaaactcgtagtggcttagtctttaaaaaaccgcgtatccaatgtttgattataacctctcgtgtcttatgtgcaactgttttcatcagtattaatccaaaattttccgaaaaaccttcccaggtgaaacagatatttattctttttaacgcttttcttacgcggaacgctgtttgtacttgcatcatccctgactttggaatcggcagatcagaagcatcgcgctttcgaccccctctcttgtacctttaccggcaacttttatgatgaaaagcaaccaaagtagagagagagagagagagagaaatataccttaataattcgtaatcgtaattgtatattttattgataaccagctacaaatgcgaatgcatgccatttccaccaactaattagcttgtacttttcctgtatacaaaaattaatgataatgtgtcgacaaaaagttgttcgtgcctactgccaaaaatgcaataatcatgattggttggtttaacacgtggtcttccagttctatgcaaattatttaccaatcagaaatacaagaaaacctgaaattgtcaaaaatgtaaaagaagaaaaaatcttcatttcttttgaaagaaaatattaagaattaaaatttattagaagtaaaatatctcacataattatcgtcattaattgagaaaaaacacacatgaaatatacagataagccaagcttagggagggatactaatggatggagttttctataaaactacaaaagccatttcctccgtcccttatttttgtcacaccacacaaagtcgtctttggagagagagaagggccaacgaccacacatacacacacagaccaataaaccatgagcccttccaagcagcgacatcgtagctctaccggagaaaacaagtcaaagccggtcagatccgcttcatcctccgccataccggaatggattaccgaatcaaccaacggcggatctctccgtcgcgtagatcccgatacaggtaccgacggctgggcttctcctcccggcgatgttttctctctccgctccgattcttacttgtccaaaaaacaaaaaactcccgccggtgattacctcctttctcccgccggcatggactggctcaaatcaagtaccaaactcgagaacgcgctcgctcgtcccgataaccgtgtagctcacgcgcttagaaaagctcaatctcgcggtcaatctctcaagagcttcatcttcgccgtgaatctccagattccaggtaaggatcatcacagcgccgtgttctacttcgcgacggaagaaccgattccttccggttcgcttctccaccggttcatcaacggcgacgatgccttccggaaccagagattcaaaatcgtgaatcggattgtgaaaggtccttgggtagttaaagccgcggtggggaactatagcgcttgtcttctaggtaaagccttgacgtgcaattaccacagaggtcctaactactttgaaattgacgtcgacattagcagctcagcgatcgcaacggcgattctacggctggctttagggtacgtgacgagcgtgacaatcgatatggggttcttagcagaggcacaaacggaagaggagctgccggagagattaatcggagctgttagagtttgccaaatggagatgtcgtcagcgtttgttgtcgacgcgccaccaccgcagcaactgccgtcacaaccgtgtagaacattaagttcggcgaaagttaaccatgacgaggacgaggattgagattaaaccacaacatgtcaatgaagtatttttctctttactgtctctcaaagaatctgaaacaattttcattaatctcaatcaaatttatattaattatttttttgttaatggattttgtaattaatcaagaggtttcatgatatatttaatggaattaaattgaagttcgacggattattctttgttcttttgttagctggaaccagaatatagagaaattaatagtccactttcgccggaataaataagcgtgtgatgatcatttaagagtcgtgtgacagatgagtcattaataggaaaagcgaaaatgttgaatcttgggggagattttatacctctaaaaactcataaaagtgtgtaatgaatttatgctttttcgagtaaaaaaggttacactcaaggaaaaagatgattctggtagcttaaatcggacttgtacattaagcaaatgttgaagcatgtttgacgttactaaaaaacttacttccaagtcaggattgaagtatataagaaagcaaatctacatgtcgtatatatataagaaagcaattgccgcgcacacacaaaattatttttggggcaatttacttagcacacgtactatatataaataggagctaaatttacgagccaaacccttactcaaattacaaaaccctctcctcttctttttgttcaagtagctaattaacaaccattgggagcaaaaccgactcgtccaccagccacgtcgtacacaacatctagcgtcgtctgctgaacgtttccaaagatggcgggaaggtcatcattccctgcaaacgccaaacaaacctgtgatatcttgatcggcaacgaaatccctgatccatcaagttctacgacagtgctaccggcgaaggagaatgcaatcgtcgggtatgtcaccgtatccaagccagtgaaatcgtaacatgtgtcaaaaagcccgtatcccgacgtactcttgtaactcgacatcttttccttaaaaacactgcggagttccgcgtagactttggtagggaggcgagtaaacactgtgcctgagtcgattatagcaccttcggtcgagaatgagtttggagtaatcgctaattccttgtcgcctacactgatacctatgatatcgatgccataattgaatgcgcttgggaaggaagaaatcggtgtgaatttaacggattcagagattccagcggatccaaaggtaagatggccagtactgttacttgtgaaagaaggtagacagtaggagaagatattgttgtaggtcgttgttgtttgcgccggtagtgagagtttgccagggccaaggccgagaagcccagcaacaccgtcgaaaagtccttggttgttttcaccgcaaccaaagtaaacatcctccaaaacatcagagttcgttagggtaaatttctcctttgcaagaaatccttgggtaaacgacttatcgccgtaaacgatactgtatacgcagttggaagccgaacaactctcagcgtcttcacacattggagatgagcacgagacgttttggtaagtagaagacgaagaagggttaaattttggttccttttgtgaatagcaacttcctagacatggctcacattgagtccatgtcaggtcacttccggtgtcgaagaccagcgatagatcgtgcttcggtgtcccgattccgattgttacgatgtagtttcctgatccgagtgtgattccacttttagccggtagctccgttgacttggcttcgctgacttcatttgcgctattctttgacaattttgagtagatggactccacacgtgcttgatcgcgtctgatgatttcgtcatggtcgactctcgcatcgctgctaagatgcgagcacgcaccatgcatgtgcaccacgcgcagcgacgacttggtattagatgctgtgaagaaaatagcatgttaaaatataacaaaagagacccaaaaaaagaactctaaacacaatgaatcatcggtgagtaaataggctaagataatcaccttttgaagaagggacacaagatgatgatgaagggaacagagagctgacttgaatggtgtaagaatcaagtacctttccactatcgcttttctcagctccttcagcaaaacaccaattgagacatacgcaaagcataattatcatactcaagaaattcctcattatgctcattttaacctccctcttactctcacaacaagaaaagtgttactcaattacatgaatttggttggtccttttataaccattctctttgctgtagataagtgtctagtggctgttgttaaagtctaagatatcatacatacattcacattattaagtagggactccaacctgtttgtgtttgatatttctgtctctcgagacgactgactccaagtctcaagtctccatgtcccgcgtactaaaggggttgtaacattttcctctagatattattgttaacgtgtaatttggtcctctaggctccaaatttggcgtttaatcgtcagctagatgttgatgtcattctgttctttttgtcttcactccagtctccagtctccaagtctagcgtactcaatgggttgtaatattccactaaagtctaagcgcgattgattgagcagtgaactaattttttttttttttgtagcgtcatttcattagagattaaatggatatacattgttcctgatttaggctttacaaaaaga

SEQ ID NO: 1419 - DNA, 98473 bp, Arabidopsis thaliana
aagcttctttacagacatgtgatcccacaaaaccatttcctcccaggacaagcagctgacaatagaaatgaaagataagttccaagatcatgatcatcattacaatatctttacaaagaattactatgtaagatcccccaaaaggccaatacgtataccttctcagtaggaggtggaggcacatgtacagtctcagcttcttccacattgaagggctcatcaattttgttagagtctgtcgagagatacctcccgccaccagaggcagaaacaaacctaatgcaacataatccataagcacagaacagtaaagctaaagtcaagtatctgaaatttcacaaaacactcaattgcaacccaaatcacctaattgttagaatctagatcatgagaccaacctagctacgagtaattaccaaaacaaatgcacatttccttcaacatcctactaattgatgcttagaagacgattaaggtgcgatcagagttattaaagagctggggaagagactactcaccgtatctgggaaagagacgattgataacgaatcaaacgcgaaacgattgtcctcattttcgaatcggagaagaagagaaaaagcaattcgacgtagagatgagagctaacaaaaatgaaaagtttgtaagaggagagagtccgatggcgatggaaatggaaatggagaagctcacggccaaaataatcacagcaaaacgtcgaaaagagcgctacgaccgtgaacacgtcgcctcttaccaatgtgccacgtagaccctgacccgagtatccgaacccatgggaagccacgagagccgcgcgtggcttcaacacgagatcattggctataaattgggccgaaattaattgggcttatattctaatggaccttatatgtatggtctggctcgctccgtttcagtagaattcaccttttgtcatttaatttacgagaatgccacttgcattttttccaacactaacaagtaacaacaatccaaatccaaatccaaacccaaaagaaagaaaattaaaagattcttgttctggatgatgatgggaacatttggtacatgcatggagacttggcgagtttgataatgaaaaaatacaacattcttaatttcttaatcaagtaatatttacaaatttcaaatacaaagctagatgaaaacgtcaaacgcaaacctcatttttattttttgaataaactatcatgaaatttaaaacatttacacataaacaaatacaaaagtcgatgcatgtattatatacacacaaacgtaatcataaacttaaaacaatcgtattaaatacatcttcaatcctaaatgcaaacgcgatcaacgatcagtaagtttgtttgccgtgtttgagggaagagaacactgtctttagttcctagagaatagagggaatcgctatttataccttgtcggtcactgaattcctctcaagggtcagtgtatcagttgagcgacttgcagtgtccggttttcgattcgttacattctctggtttgttccctgagccgatctggacttgcttagcttcattcgatgagatagcaaggtctccaagtggaggcatttccttggcttccttggaggaggaagagctaatgtggcttgatgaagctgacttcttctccaagaaacgaacgacaacacatgtgatgttatctgcacttcctctctttattgcttcacccaccagttttttcgctgagtcctcgggatcttcaacttcctttaccattgcaactgctgcctgcaaaatatgatcatgtattattgtaattaaattgttggagtaggaaatagaagatgttaaagaagcaattcacttcacagacctcattagagaaaacatcccacagtccatcacttgctagaatcaaaaactcaagagtatcatcaatcttttcttcctgtattcaatgacaaaagtttgagaaatttgtcagctggagacaaaaggggacaaaaagattatgcaatgtgattcttagagaagtgatgaaaagacctggatttctggatcagcaacaacatattgcttcagaagccgatcaccaaacgcacgagaaactgcaagaactcctcctaccctccaagttcctatttagtttatgaatgaacacacccctataattaggactatatgttgaaaaaagcatgaagcagcagaaaatatagtcctatagtttcttgctacttacctgcccacatcacaaatccaccagcattctcaatcctttcacgttcatcactttggtccggtttatggtcccttgacacagcaatggctgcaaggtacagatttatgaaaaaaggtattatctatcaggatactactacatgatattggtggtgccatacaaagatattgcttacttaacattacaatgatatccaccaaaaacaaaaaaagataagtcataacggatctcatagaaatttaccttttccgcctctgctgataacagctctagaatcaccaacatttgcaacaactaaacggtcaccaacaagaatagctgtagacgcagtagaaccagcgtctctattgtgactattttctgacttgagaagttcggagtctgtatggttataagcatcagctggaaaacattgaagaaaatggaatgtaaattagagtcctgctgcatctacaacaaattgttttaaaaaagctttgctcatgatttttttacagtacttatagctgatttggtgtcagagataaactttgggtgggtgatcagattactgaaaagatggcgcttcacgtactcagctgctctggctccaccatggcctggcaaaacagtaagtaacattattaatttcttgttttctaatgtcaatactaagatataagctacgttacagcgagaacacgaagttaattagcaccaagaccaatcttaatgtcatgactcctggcacaaatgaactatcaggattcataaaccaggctaagtttctcaagagtaatgtataagttcttgttaagaacagagagggaagataccatcaaaaactccaaatagaccaactatttctccattgataccgtcgatcctagtttcaaaaaagtcttccatagatgatctcttgccagcggagcttgcatatccatagctaaattttccattctggctgcaatagaatcatatcatgtacaaagcacaataaacatttaacacaccaaaaatcacactttatgataggaaaacagaatgaaccagtgagataaatcgaatcgaacaaggtgagaaagaaactacaatcacaggatcaaaatcaaatccaacataattagttattggttcaagtaatttcatactcacaagtcacaacaaagaaattaaattcgagattgagattaatgacctgagacctcctccgctcgctggagcttcaacagtctgcggctggttggaatacgacaaggccaagtccaagtatcccataattcttcagaaatttcaaacgcgtattcggtattcttcgaatcaacagataatctgcccggaatcttcttctaacctaaaattgaatcaaaaacgggatcgatatcaacaatcacgatttcggaaactcagaatcgagctaaacattttcaaaaatgaaaaaaaaaagttttaaaaatagtacctgaaaattccatgaaagaattagaagagagaagtgagaatgatgggagattcatggttgattcctagttgagaaaaatagagagagagggaaagagaaaaacaggtgatcgacgttaagagaagggagcatattccggcgaacaaatggatttatttgctaaaaatagaaaaaaaaaaaaaaaagtagaaagaatcacaagtcaaccaaatttggaggatgtaccgaagctgacacgtgtcacgtaaagcaagtggagtagtatcacgtgggtccttcacaagtccacatgtacctttataattattggcaattgggctaatgggcctattgttttcagcttgactggagtagggataagtctactcctagtgccaaacagcagctaaaaacttgcaatcggagaaagagtgtgagctgctgtacacattgatactcccatagttactgcttctcgtcgccggaggaaacccaacggatccgttttgagatcaagaagaagttcattttatcgtctttcatggcgaaggagcagcacttacgaccttggtttctggatctagtaccggctttggttgttttgctcgccgcagctcatgtcatcgccttggtacttctcgtgatcttataattttttttctctttctctttttatatgttctgatctttcgaatggtttatatcttggggctcgcagggttactggatttacagattggccactgatcgtcgagctcagagtcagagaggcaaattccactgaagaaacattcgaataggttcgtgatctgaactacggtggtccagaaatttcaacagttggtggattttgcttccgatctgatatttgcgattaggtgggggttttgtgatcattgatttagtcgcttatgaggatttcggaaatgtttgcttggaattccgcctaactagaagtgattttgaagatactggttagatggatcatatcagctcacgagttcgttttcacctatgttttagcttctttttttgtcaaccacacctatgttctagcttatattgacttttatgcagctttcaggttcttctagatagattttgtagaagtttcaatcatcgtttcaatacactagtgtaaattgaaacaataccaagagggtttttgtgtgcctaatggttgaattgcgttcttgagaggaggccagtgttctttgttcttgactcctctcaataacacctttgagtatcattcagtgtcaaagagtattgctgtcctgtgataaatctttataaagagttcagagactgccgaatgcgatttcaacttaacaagattgtccgtgtgttaacacttaacatattagttggtctttgatcgagtacttaagtataggattgaaagattcgagggagtctttggtattgggtttgcttgggagctttagggcatgggagagtaaatgatgctctggaattcatctgtaggttttggtttgttcttttgcttctgagtttcttgtttgttcattttttctctgtggaaaaagaaagcagaatcagttttggttcttatccccctgctttctcgttctatgttttcgtttgagtttcttactatcgtcacagacagattattcataggtgcttttcatatggcaagtaactacccttcactggtgtttcacacattgtctgatggtaaggccaaatttcaatgtttatccatttgtgttcaccaagacagagttttagtctttctatattaaaactaagtatatatgatctctaaccaagagcctactactgcagggcccaagagaaccgaccagaagatgtaaccaagagtagaaaattgtcttcggaaaccattttatttagctggaaatggttgtcagcttttaaaacaaagttcacaatgtggatttgtataggttgtaagttttgcttgattagaaaacggggataaacaaaaggataatcccttttcatggcaggtttagaagctctaaatatgacttaaatcacacaatcaagcattttcctttgcttattagtttttctcatttcatgtttccttaaccagttcattgattttgcctgtccattcttgacttgtggaatgtagtttttttgttttgttttacttttgcttggtattatgtgacaattcttataaaagcttgtatttactggcatagattcatcccttaaactcgtagtggcttagtctttaaaaaaccgcgtatccaatgtttgattataacctctcgtgtcttatgtgcaactgttttcatcagtattaatccaaaattttccgaaaaaccttcccaggtgaaacagatatttattctttttaacgcttttcttacgcggaacgctgtttgtacttgcatcatccctgactttggaatcggcagatcagaagcatcgcgctttcgaccccctctcttgtacctttaccggcaacttttatgatgaaaagcaaccaaagtagagagagagagagagagagaaatataccttaataattcgtaatcgtaattgtatattttattgataaccagctacaaatgcgaatgcatgccatttccaccaactaattagcttgtacttttcctgtatacaaaaattaatgataatgtgtcgacaaaaagttgttcgtgcctactgccaaaaatgcaataatcatgattggttggtttaacacgtggtcttccagttctatgcaaattatttaccaatcagaaatacaagaaaacctgaaattgtcaaaaatgtaaaagaagaaaaaatcttcatttcttttgaaagaaaatattaagaattaaaatttattagaagtaaaatatctcacataattatcgtcattaattgagaaaaaacacacatgaaatatacagataagccaagcttagggagggatactaatggatggagttttctataaaactacaaaagccatttcctccgtcccttatttttgtcacaccacacaaagtcgtctttggagagagagaagggccaacgaccacacatacacacacagaccaataaaccatgagcccttccaagcagcgacatcgtagctctaccggagaaaacaagtcaaagccggtcagatccgcttcatcctccgccataccggaatggattaccgaatcaaccaacggcggatctctccgtcgcgtagatcccgatacaggtaccgacggctgggcttctcctcccggcgatgttttctctctccgctccgattcttacttgtccaaaaaacaaaaaactcccgccggtgattacctcctttctcccgccggcatggactggctcaaatcaagtaccaaactcgagaacgcgctcgctcgtcccgataaccgtgtagctcacgcgcttagaaaagctcaatctcgcggtcaatctctcaagagcttcatcttcgccgtgaatctccagattccaggtaaggatcatcacagcgccgtgttctacttcgcgacggaagaaccgattccttccggttcgcttctccaccggttcatcaacggcgacgatgccttccggaaccagagattcaaaatcgtgaatcggattgtgaaaggtccttgggtagttaaagccgcggtggggaactatagcgcttgtcttctaggtaaagccttgacgtgcaattaccacagaggtcctaactactttgaaattgacgtcgacattagcagctcagcgatcgcaacggcgattctacggctggctttagggtacgtgacgagcgtgacaatcgatatggggttcttagcagaggcacaaacggaagaggagctgccggagagattaatcggagctgttagagtttgccaaatggagatgtcgtcagcgtttgttgtcgacgcgccaccaccgcagcaactgccgtcacaaccgtgtagaacattaagttcggcgaaagttaaccatgacgaggacgaggattgagattaaaccacaacatgtcaatgaagtatttttctctttactgtctctcaaagaatctgaaacaattttcattaatctcaatcaaatttatattaattatttttttgttaatggattttgtaattaatcaagaggtttcatgatatatttaatggaattaaattgaagttcgacggattattctttgttcttttgttagctggaaccagaatatagagaaattaatagtccactttcgccggaataaataagcgtgtgatgatcatttaagagtcgtgtgacagatgagtcattaataggaaaagcgaaaatgttgaatcttgggggagattttatacctctaaaaactcataaaagtgtgtaatgaatttatgctttttcgagtaaaaaaggttacactcaaggaaaaagatgattctggtagcttaaatcggacttgtacattaagcaaatgttgaagcatgtttgacgttactaaaaaacttacttccaagtcaggattgaagtatataagaaagcaaatctacatgtcgtatatatataagaaagcaattgccgcgcacacacaaaattatttttggggcaatttacttagcacacgtactatatataaataggagctaaatttacgagccaaacccttactcaaattacaaaaccctctcctcttctttttgttcaagtagctaattaacaaccattgggagcaaaaccgactcgtccaccagccacgtcgtacacaacatctagcgtcgtctgctgaacgtttccaaagatggcgggaaggtcatcattccctgcaaacgccaaacaaacctgtgatatcttgatcggcaacgaaatccctgatccatcaagttctacgacagtgctaccggcgaaggagaatgcaatcgtcgggtatgtcaccgtatccaagccagtgaaatcgtaacatgtgtcaaaaagcccgtatcccgacgtactcttgtaactcgacatcttttccttaaaaacactgcggagttccgcgtagactttggtagggaggcgagtaaacactgtgcctgagtcgattatagcaccttcggtcgagaatgagtttggagtaatcgctaattccttgtcgcctacactgatacctatgatatcgatgccataattgaatgcgcttgggaaggaagaaatcggtgtgaatttaacggattcagagattccagcggatccaaaggtaagatggccagtactgttacttgtgaaagaaggtagacagtaggagaagatattgttgtaggtcgttgttgtttgcgccggtagtgagagtttgccagggccaaggccgagaagcccagcaacaccgtcgaaaagtccttggttgttttcaccgcaaccaaagtaaacatcctccaaaacatcagagttcgttagggtaaatttctcctttgcaagaaatccttgggtaaacgacttatcgccgtaaacgatactgtatacgcagttggaagccgaacaactctcagcgtcttcacacattggagatgagcacgagacgttttggtaagtagaagacgaagaagggttaaattttggttccttttgtgaatagcaacttcctagacatggctcacattgagtccatgtcaggtcacttccggtgtcgaagaccagcgatagatcgtgcttcggtgtcccgattccgattgttacgatgtagtttcctgatccgagtgtgattccacttttagccggtagctccgttgacttggcttcgctgacttcatttgcgctattctttgacaattttgagtagatggactccacacgtgcttgatcgcgtctgatgatttcgtcatggtcgactctcgcatcgctgctaagatgcgagcacgcaccatgcatgtgcaccacgcgcagcgacgacttggtattagatgctgtgaagaaaatagcatgttaaaatataacaaaagagacccaaaaaaagaactctaaacacaatgaatcatcggtgagtaaataggctaagataatcaccttttgaagaagggacacaagatgatgatgaagggaacagagagctgacttgaatggtgtaagaatcaagtacctttccactatcgcttttctcagctccttcagcaaaacaccaattgagacatacgcaaagcataattatcatactcaagaaattcctcattatgctcattttaacctccctcttactctcacaacaagaaaagtgttactcaattacatgaatttggttggtccttttataaccattctctttgctgtagataagtgtctagtggctgttgttaaagtctaagatatcatacatacattcacattattaagtagggactccaacctgtttgtgtttgatatttctgtctctcgagacgactgactccaagtctcaagtctccatgtcccgcgtactaaaggggttgtaacattttcctctagatattattgttaacgtgtaatttggtcctctaggctccaaatttggcgtttaatcgtcagctagatgttgatgtcattctgttctttttgtcttcactccagtctccagtctccaagtctagcgtactcaatgggttgtaatattccactaaagtctaagcgcgattgattgagcagtgaactaattttttttttttttgtagcgtcatttcattagagattaaatggatatacattgttcctgatttaggctttacaaaaagagatcaaaaaaaaaaaaaaggtagaagcggatttgtgaactcgcttaacgattagtgcatcaaacgaagaagtttgattgaatagtagaggaaagtaactccatttttaagtgccacggaactagttttgccgcaggttcgaagctaaatctggcctgttgtgcctgtaatctgaggctttgttccttatagtagcatcgatggttctgaagtttggaaaagcagtttgtcttgagttggtgaactagtctgttgcaaagtatgcatggtatatataagtcgacgcacttcgattgctaacacaaaagcaaaaattatataaattttttgcatgcttaaggggattgtaattaataggggattgaaaccagctagtctttgcgtgggctcttatggggctttttaccaacacactctgtatttttttcatcttgtatagttgtattggaataaaattttacaataaacagtttgttcttgtaattgttgtatcatgcacacttattactatacaattacttcaaagaccatcacgaattccgatctttacccaaattacacacttgattaaggataaagctaatttgtgccaaatccataaatttaaaatttaccccgttctgtttttcattaactaacttaactacacccgtttggagcaaacccgacccgcccacccgcaccatcatacacaacttctagcgtttgctgctgaacgtttccaaagatggcagcgttactgtcatcgctattccctgcaaacgccagacaaacctgagatatcttaaacacgtaaaatatccctttcgaaccaagctccacgacggcgccaccgctgaaagagaacgccactttcgggatagtcaccgtcttaaacccgctgagatcgaaacacgtgtccaagatcgagacgcccgacgtggtcggatactttgacatcttcgccttgaacgagcttcttaacgccgcgtaggctttcggcgggagacgagtgataacggtgccggaatcgattaaagctcccggagtagagaatacagttgaaggaatcggcaatttctgaccgccgacggtgattgcgacgatattaaggccgtagaaggaagttccatcagtgatggttgaaattggtgtgaatttaacggatctggagattccggcggatccgaatgtgagatgtccggtgtagctagcggaggaagggaggcagtaagagaagatcttattgtaagccgttgccgtctgcgacggaaacgaaagcttgtcacgaccaagaccgagaagtccggcgacaccggtgaaaagtccttggttgttctcgccgcaaccgaaataaacgccgtcaaatacgtcggagttcgttagtgtaaacttctccttggcgagaaatccgacggagaacgattgatcgccgtattgaataccgtagatgcaattcgaagccgaacagcttccggcgtttcctaataaaaaattaaaaaccggttaacaaaagcggatacggttataatggttgtaataaccggaactacaaaaactgaaattgaacctgtagcagaagagagagaaccacacgcagccgatgagcaggatacgttgtagtaagaagtagacttagaagggttaaagattggttccttctggtcatagcaagttcgaacacatggctgacactgagtccacgttaaatcgcttccagtgtcgaagattagtgatagatcgttctttggtgtcccgaggccgaccgtcacgatgtagttacctgaaccgagtgtgcttccgtctttagccggtagatccgttgacttgctttcactgacgtgatctgttgcgagtttcttcgatagttttgagtggattgagtttacgcgagcctggtcgagtcttaggatctcgacatggtctggactcgtggccttgccattgtttagacgcgaacacgtgccgtgtctatgcgtcacgtgcagtgaagactttgtagtagacgctgaataggaatgagataaaaagttcacgttagaaagaaaacgaatatgcccactgcccacagattctttaagttatcaccaaaaaaaaaccaaaaccttatattttgtggtcgttgatgtattactatctaaggaaatgataaagaaaattttcaacttatgtggagtcatacagagttgtacttatataattaactcacaaaagagtataaattgttgcaatttttgttaactcactcaactagctaacaaaattttgattacaactactaattattgtcgtttcccccattaaacatatactactaaagacatatttactatcgctttcttagtcctgtgaatctgtgatggtaatagtatcaactacttggaagcaagatttataacctaagtttcctaattgagagtctctattcatctaccttgtctataaagctaaaagacaatgaatcatatcagaaaatgaattggctaagaaatcatcacctctgggagaaagaacacaagatgatgatgatgaagggaggagagagctgacttggatagtatgagaatcagtctctctttcttgagctccatcgttacaacccaaattgagacatatacaaaggattattatgatattcaacagattcctatttatgctcattttgctctcttaattctctccctcacaaaaatgacactcaataacatgacaatggttggtcctttataaccaatcttttttgctcaagaaagtctctagtggaggttgttaagctttagaagcaatccagtcatccacatatcacacaagtaggggcaccctattccattggtttcactaaccagttagatagtgacacatcatctggcaatggagcattattgttattttctgttgtctatgcacacttcaatttcagcacaatgaacgggataatattccaccaaatgattcattgatcagtagtaaactgattaggtaggtgtcgaatcatgcatggatgtgtgtgatgctcattcgttaatttgcgaaacaaaattatattttcaattattcaaatgtgcaatgaacccatttataaacgtataattatagtttattcgttaacaaaaacattaatgtactctccataatgatattttcgcctaataatggaagagtcaattcataagcctcatattagaacgccaataattgaataccagcaagcaataatgttgcttaaaattaagagaatccaaagtgatcatagtattgaagtaacacaaaaagaatgaaagcaacatctttaggaaattaatctacatgatcatgtctcttgattcatgcttacttacgcgtatacattttaagtcacatatcatatgtttgcatcaatttggaaatagtgttgcttcacgaaatcactctccttcgaaaattaaatgtacgtagtttagttagcatttggtagctagatttaataattgtttacatgaacgtgttgaacatcaacatgtgatctcacatcttagcatcctacagtgaaagctttaagaaaattatacttaaaagaaagttctgaagttgaacgaaagttataggtaaaaataacaaataatacactagatataagtaaatggagtgattgtaaagtaatttggaccaaatacatgtaagtgtgaatgagataacatataaaatccacaagaaaatcaattaattggatgtgtgtgggcctcaatatatagtttccggaaaacaaaatttgacaaaaagtaatgagtacaagtgggaacaaaagataaagattctaataaagaatcttaatgtagtggaagtgggagaaagctggaatctgtaccctaatttctagaaacttagaaaattcaacaacagtcgtccaaattcacaatttacattgacttaatcactactatctctcttaaaaaacatatactatttattactgtttggttactttactaactaaacactcataattgattatttgactcatcaataatgcaggttgttggttttaaatatgaaactctgtatatataattaaaaggggagtgatattcattatgaatttggttttattatatcgaatccgtagacggtggatgaaatataatttatttttgataaacaaattaaattgagtgatgacctaactttccatttttatcagacattatattcctgataaaaacaaatatattttctataccagtttttgacacatggacagttagtttagggcattcaaatatgatttccatttataaaatccccaaataagttttataaaaccttcatatatattttatataaaaaggttaactcaacataaaatgcaaagttggatatatatgacgtctgctaataaaaaaccaccgagccaattgaaaaggcaataatattttcaaattctgtaaacaacataaagcttgttcgatgcatcctttttttttttttgctaaagtcgatgcatcgcttttcttacaggcgttattaattattgtcaagataatgcttatacaaggcaaatgtgttaacgtcgataaatcagcataaagacaaagatactgaagtgtttgaaaaagatgaggaggcaataacactcgtttagtctaaattattcagatactttataatggtcccggcctcccgggtgttttacgtttgtatgaaaacaaaattcttgttttctttaattttgtttcggaaaccctcgttattcgtctgtggcgactatcaacgtctatctctatgcatagtgtcgagatatatacgatcgagaatgttgtggtaggatagaaaagaaagaaaatgacaatctaacaaagaataatggtggttttgtaactgaatatcaatcaattatatggaatatgtaataaaaaaactaaaattaaaatttatggaatatgtagttatagaaattataaagctggtgaattgtagcagtgtgggaattcgttagttgtcacatcccacaatggattttgttttatcatccgataagtttccactaataaaaagattgaaatgaaatattatatcaactcataatttatagtgggtagatggaatggcttaaacgaagggagtatcttatgtaaatcaattccattttaggtttgtatattaacaatattaagaacaataatagtggatggtctttcgtcttgcgtgtgttatcgttcacgagctttataacttatatatggtaccaattccaataacaataaaaaagtgatatatcaataatggtagctgcagaaccaaatttagagatgcaaagtatcaacacatctagatttgccactacaatttaacaatgacacatcgcatgcttcaagaagatataccaaaatacatcgtgtgtaaacctccgaattcgaacatcattattacatgaacatctaaattcgtttcatattagtagtagactctttaatcgaacctgtaccggtttggaagcaatagaagtaatatagactatatgggttcgtaaaggcccattaaacaatttgccaagttgctgaaaagcctaatagaataaaggaaactgagatccagttaaaatatctggatttggacccgacctgaagaaacgggtttggagtgaagattttttttagctttccttgtcaattattcgaattgggaaaacatctaaagctgaggagaagataaatccgatctaggtctcttcttccccaatctctctgtgtctctctcgatcgaagaaagaagacaatggacaaaggcaaagcagtgatgggtactggtcggagatgggccgtcgaattctccgatcaatctactgttccatcttcccgtgacatcctcgatccacctggcttctctcgtgcctctcaggaacaggttaatttctttctttttaggccgttccggtattggattcttatatttcctgttgttctcgattggattcgaggtttcaatttggaattttgactgagaattgagttgttttgctactgggatttgatgtgttatcgtttgatgagttcaggatgattcagcaaacagccgccaaaagaaagacgctgaagctacttggaaacttcaggtatacacttatgtcaaatctgaaagtcgtatcttactctatgtagatcttaaaagccattgacttccatgtattggattgtcacagagcttacgttagactgtatttcgctgtccaaatctgattgggtttgaagtgaggatgaagtttataaaactgatatgttttttttggggaatgagcagaaagcgtgggaagtagcgcaatctccatttaagaatttgatgatgatgggtttcatgatgtggatggctggaaacacagttcatctttttagtattggtattactttctctgctctttggcagcctatcagtgctcttcagagtgttggaaagagtaagtttccttcactacatcttattcgtctttgcctaacatgcaatttggtatcctattaattagcttgtcagcccacaattatatgtagtttatcgaactgtgatgacttcttgattggaaaatataaaagttaaatgaaatggtgtttgaacttgcaagtagtatccatcattccttatattttacctttacaccttgtctgcagtttttgagccattcaaggataacaaagtggaactacttatgccgaaattagtgttccttgccctaaaccttggagggctagctttgggtgtctggaaggtaagaaacttttttttcgtttcctcattgtatcctctttcctttttccgtatggcaacactggcttagattacaagtgtaaagaactgtttccttatacaaacgattttcactttctcagcttaacactttggggcttcttccaacacatgcatcagattgggtttcatctctaccccctcctcaggttggtaatttctgtctgaagctaaatcttaggcctatgtgttttaaatacatccgtgaaagcaagaatctggcattttgacgaatcatctctaagctgcacatcttgtttcctcctcttactttttcaggaagttgaacactcgggcggaggatttgttttccactgatgaatcagcgtctcttgtattttaaaataatccgctaaaaccgcgcgacaacgacaacacttttgtgagataactgcaacagttacttaagtgatatgaacctccctcatcttatgatattcttgtagcattttcaaaactcagaaaccatagtttttacactttttagtatgatgctcattgttcatcataactatgaatgtattattggcactgaagggaccttatctcccagctttttgtttctcatctttttagacaggaatggataaaatatttcagataaaagctttactctctttattgcttccactcaatgattctgagttaacaatcaatcaatgcttgatatcattttgccatgactgagaccttctagttgattcagaagttacaagagagtggactagtaaggcgcaatgagaaactaggtcaagtttgggaagcagaagacgacgtggaacaaagtgcagtcttttagaatcatgtaagtcggtctactctaaaaaatctctggacgacaaaaatgtttactttaatgattataagatttgcaagaaataaaagatttacaggaaagaaaaaaacacccaaaaaagaaagtagaaaaaaagagaaatagatatttccccattaatcttgtaaaattttcctttgcataatcctccgatcttttagtaaaaatttgataaaaacgaacagagagatgatgactcttaacacgctaacctgatccgaaattttctttcttttttgtttttcatcacagaaaaaaagaggattgattctttgatctcaaacaaaaactcttactttggtcactgtgatttttgattccatttattcttctttttgaagcgaatctgagttttgttttcatgtccgcgaggatttcatttctgaaaaatcccgatccgtgcaatcacttatctgattataagcttagatatggtactgatggttacaaatctttcaataacttgttcagatgcttcaacgatgcaaggattaagatcaaacttcaaggaatcgacatacccagatgcagttattgttctgtttatcaaaagagactctacatctgtttgatctgtcgttccatttcttgttcaagtcatatccttttgcatacccagttgaataaaggccatgatatcgccattgatgtcgaaagatctgagctttattgctgtgcttgcatcgatcaagtgtatgattctgagttcgacgaggttgttgtgtctaagcagctttttggtttgggtatgtctgttaaatcaggggctgatgttgttgcggttagatcgaacaagaagaggagattggactcgcaattgatcatagggtcgaattttttggtctcacctcgagatcgaagggagaaatggacgtttcctttggggttgagaggtttgaacaatctgggaagcacttgttttatgaatgctgtgttgcaagcacttgttcatgctcctcctttgagaaacttttggttgagtggtcaacataatcgtgatctttgtcctagaagaacaatgggtttgttgtgtttgccttgtgatcttgatgttatcttctctgctatgttttctggtgatcggactccatatagccctgctcatttgctttacaggtttgatctctgagttcttcatttgtgtctatacaagcttttctagaatttatatgatatcttcgtagacattatgtgatggtgattttgatattttttcggcttttattttggtgcatgaagttggtggcagcactcaacgaatctagctacatatgagcagcaagattctcacgagttcttcatttcgctattggaccgtatccatgagaacgaagggaagtcgaaatgtttgtatcaaggtaaatctaatttggaagaagagatcatttctgtgttgttttttgtttgaaggccttagatttctgttgagtgatgaaactttcaagatagaatttgatttgatgtttgttggtttactatgcagataatgaggagtgtcagtgtatcacccacaaggcattctctggtcttttaagatcagatgtcacctgtacaacatgtggatccacatcaacaacatatgacccgtttatcgacatttcacttactttagattcaatgaatggattctctcccgctgattgcagaaagaacagatacagtggtggaccaagtgtgaacgcaatcatgccaactctctcgggttgcttagatttcttcacacggtcagagaaactcggtccagaccagaaactaaactgccaaagctgtggagaaaagagagaatcttcgaaacaaatgtctataagaagacttcctctgcttctttgcttgcacgtaaagcgtttcgaacattctcttacccgtaaaacctcgagaaaaattgatagctacttgcagtatccgttccgcctaaacatgtctccttacctctcttcctccatcatcggaaagcggtttgggaacagaatatttgcctttgatggagaaggtgagtatgacagttcgtcatcatcatctccatcagcggagtttgagatatttgcggttgtgacacacaaggggatgttggaatcaggtcactatgtgacgtatctgaggcttaaagggttgtggtatagatgtgatgatgcatggatcaatgaggttgaagaagaagtggtgagaggatgtgagtgttacatgttgttctatgcacaagagacagtgattcaaaaagctcataaggagttgagttatcaagttatctccatggctgatgcatttccctttgctgattgctgactcttaacttggccaaagattttgacgcattttcccttactactttttttaattgatttaaggtttatgccaaatatttgaaagccaagtttaatgattaaatttctttcactatatcagtgttcaagtttacgacatcagactctcacgtcagcgtcagctagaaaatacgacttatgcttctcacatgttaacttctgcagtaaactatgaaaatgggacagtaatacacaaaatttcttacatatttttttaagagtcaacgagacaaaagaggttaataatcttcagagaaaaacattccacgtgtaccgcagagaccaaaacaaacaatcatctcatctcatgcctcgtctgcgccaatctctatctcgctctctgcttctatcatgatcgtctctctcgcgacttgagctctttgctcttcgttttcggtccttgtccaaatcatgttgttgcctatctctgtctctgtgtctgtctttgtccaagtcatgatctctcaccctttctctggttaatgatttctgtggtggactctggcttcgattctggctctcacttcggtttctctttctagatgaatctctagaatcttcacgcttctcccttttctcgggcaatactctctctgcagttgataaaagcaatgttcatttcgtttgaacacaaactaaagaatttgcagcagaggcttataataccggacaagctttagttatggatgtggaacaattgtctgtctccaatgtattttcattcagaagatagtaacttttgagtgtgttagtaagaacttacgatttcctgataagccatcagcttcaagcctctttcggtggatagcaacttttctttctatctcctcagagtttttcatcccttgttcctcaagagattctcgatactctatcaaagcaatctctatgtgtctaagcttttgtctgcagcaataaaaaaaaagtataagtaaggcacatctcataatggagcagctactgatacctacatttgcaaaagctagaaatccaccttcagctataaccaaataccccaccgttttattggttttgaaactctagcatcaacatgaaggattagagctaatattttggtgtattttactccagaagttccccatttacctctttaattattagtgctgaggaacatagttcatcatgcagatcatacctttgctccacgtcgatttcattttcaggctggacacgaacacttggatcagctttgagatcctcttcatcggtcttgaaagttattccaccagcattgtcgctaccagaggagtagctctttttttgttcatcatcagtttcatcatcttctctcgcccatctggaagttggtagaatgaggtcaattttctccttctttacaaaggcttttagctccggctgtgggattggtattgtcgaggccagatccacaggctcttcagtttccactttatcatagctggttttcatccgcttaggctcaatgttaacttcttcccaagttgaatgtccctgtcgatactttgcattttcatctactacttcatagccacgttgtttctctgcatctttcagacataccagccgagcaaccatcatctctctaccccctaaaagtgatagaccgttgtgtctgcagcgcctttcaagctctgaaattggtcgattcattagctcttgccttgcagctccttcacccattgccagtgcagcgtcttgattgatcttatcagcatcgttcatattgcctatcagacctttcttctctatatcaggcgcatcaccacagatagaatgaaacgaggtaacaccaaagtttcttgaccggagaaatgtggcccgtagcccatttatatatgcatctgagaagagaaaccagtctgcccatacctgcagtacttttagtactcgttcctgcacaaagtaagaatgagaacagaacttgagagggtaaagaacaacataagaagaatatttgctttctgggattactctaagagcctccgcggtaatccttccatgtacgctgtggtatagatcgttgaagctttccattatatcaggtaatgttgcttcgaattttgtccggtatgcagaggcatttttaacccgagcgctgctattatgaataatgtcagacacaagcatgagtcttgcaactttagtgggaattgatgtctctttcagggtcaacgactcagtcagaacttcaacaacctgtgaaacaaccaaatctttagtaaaaaaaaaacaaattggagattttggtccagtgacatgtagtctgaaaacatgacataatgagttattttgcttagagactctatgaggtgtatatataatccattgcaaatgagacaattgatggatgattattttataagaaagggaattcaaaacacatgttgagctttctgagagattcaacagagggtgtatgttatccaaggcagaacaaattttacctcaccagctgcctctgcgttatccaaagcaaaccccatagcttctctgatttgactcctttctaaagttagagcgcgcaacatgtcctcaaattcatccctttgggaatcggttagagtttgctcagcttccgtgcactattatttataagtgataaggtatcagctatcaataaacaaacttctccaaaaacatgcaaaaaagaagaagatatgatatgttagattgtaaggagattaccctgcttttccctgctgcgtatgtgcctctagactcttttccatgctctgggctcctagttgcaggcagcggtggcggaatccatctataataaatgaaaaccaacagtgttaatgcattagtgctaaggtaaacacaatccagcacctgactcagtttcaaagctggctagattaaataccttccacttccagctatcatgatatacggctctgttctccacctttgaagggtatcaccctaaatgacggcgagaaaaatcatcagggtattacaaaaatgaacgagaacctcatatattcctaataatgaaacaattaaaatgtacctgagcaaaggaatagagcctccagacatagtaggtatgctccttcgagcccagctcaaacaagaagttaaaaagtggattaccacgccccctctccataatagcttgttcaaaagcgcatccaccgtccagtacattaagggccattgtatctataatctgtttgaggtgctcgtcctcaggagaaataacagtgatatccggaacatttggggtaagaacctgaagatgaaattcaagttaacaaagaaatgcttgtgctaaagattaacatatatgaaggataacatataagcagtatccggtaactgaagcgcttatcatatggaacttttaaataaaaagttaagtcatatggaccaagtttgaagtttgcataccagctcagaattttgatttggaacggaattcattggtggacccgatgtaacagaaaaaattaaattgcagccctgccaattaaaacaaatgaaagcttttagagttgcatataaacaaaagcagccgtcatgaactaaatctaaatgtattgaaatgaaacgacgcaacagtcacattcagggataaaatgaatctcaaaggagcaactaactgccacagacctccttactccggattgccatatgcccaggaggtggagctggtagtgcttgtgatggcagaaaaactactttaccccatccaattttcagctcatactcatacacaatgatccctgtgaaatggagtaaaaaatatttagtgtcttgcaaatcatagcacatgcatcaaggaagcacatttattatcaaatcagatagtcaaatattaataaatttctatattgttaggaggcagtagttttcaacattgtataaatgaagaaagaaaaaatggaagcaccaaacaaaagcagtaacactgaccaaacaatgaactctttacgtatgccttcaactgaacacgttaaagcaatttcttataagaaaagtcaggctttgcactaaagaacctactaaaatatgctgatctgaagttttagttaaaatgctatcgctatgcaggaacctgagaaaacaaatctagaaataatcttcatcttttgctcttttatcatattgtacactgcgaacgtatttaagttgagaacctcgcatgaacatacacagttccatactgaacggtatagctaaccttgcattttctcttttgcagcttctccgtcggctctattcatgaaagcaacaaagccacaatgcctttctcgccttttctcctcctctgttcttggccacataattttaacactagctattggcccaaatcttccaaaagtccgcagaagaaaattttcatcaacctaaaaaaagacaataccacaaaagttttaggcaagggaagaaaattatgatatatagctatggaaaacaacgcaggtatttaagttggatgagaacaaaccttagatgaaagattcacaacatatagatttgtagtttgtgggtcaccatcgtccaatgaccctaaccttccactgggatcaaaataatcaggtagctcatcaaagcggctagatgactgagagaagtacagccttaataccagaaagcagtacgtatctctaaataaacaacagtacgtatttggttaaaagtaaagactatgacgacataccgtgttatcactattatggtcacgggaattctcgcgatcctggtttcgcctttctcttatttcttgttcacgcttgagctcctccacaaaatgatctatgtttcgagtctttcccttttccatctcctttgatctctcttcatccctctagaaagaggaaaaattgtactaataatcagttaaaccattactttaaatcaggaaccagaataatataaaatactgatatggtctctaactactgaccttattctctggtcctttacccttagatgccaatggtggggggagaaaggagggaacatacctgtagaaattacatggaagacaatcttctatatcacaagagcatggacattggttttaacttatcaagccatacgcatggacaacatctcaaaacccacagtttatactgatgaagtaggaaacctcagctaactgctatgtgcagatgacagaagtttattgtactccaaaacatcacaaacacaagagaaatggaattaactctagcattgtaacaaacacatcaaagaggcctacactagaaattagatatgacagagattgattaatcaaaagcaatcacagttatacctactccccttctttgaaatggaatccccatctctggacttttcacctgtgatccgtgaatgcatagaagaaaacgtccatactttttttaattaacatgtttctcaatgtaatagaaacataattctaccaatctacatgatcaaaacaattcaatgaaacacagaaaaactagcctccagttctactagatgaagcaatgtcgggtttccaagagactaaccttgagaatcaggcttgagcttattatcattgggattgattgtcacctctaacaaaagtcttagctgcagcattatccccttgaaacgattccacggactcttgatacagacgagctgtttcatcctccgctctctgcatttaccataaatttattcaaaccaatagaggctattgaggattttggtagctaagaaaagaagaaacaaaccttcttcttggcttcttcttcttctctgtgtttctggaacggtgttttcttccagggtgatcgagaaagaactcatctttcaccatccaacttttctcagaatcggaaatttgtcaatcgataatagcacggcaccaaaatggtctctagtctcaacgcagattgagagataaaggttaaaatgctccagaaaataccttcttcagagttcagtcttaacccagtttttttcttggtaaagagaataatacacactctttttttgttcacttaaaatttacaaatcttatatcatcagattacttattaacaaaaagattactttatacgaagtatgatataatttctagtcgaggacgattcaaaatatctcatcaatttgagaagaagaatttgatatagaaactagaaatgagcttaaaatttggatagcaaagatacttttagtggctaacacatccaagagaaccacaactctttctatgcatattaattaatgttacattggcaaatatatataataacgagtgatgatgctttaaatggcctctctcaacatatgtttcttcaggtaagacaatttcatatgatgcttcttcttcatctgcctccattggcaattctcttcagatggtgaaatgccttctgcttaatccattgcctgtcatatggcagatatgcacttatcgagtggtcatagctgcaaaatgaccagaggattttgttagaaaatcataagaacattgacaaatcccttcacgattcacacgcaataaccatctttttaggaaaatcatgatactaataatgattctttacttgtttaattagcaccaagctatcaatgaacttagtagcaaactagcaattaaatgatcattgacagttttgttatacaacatgggaatcctactaatctctataaacattactagcaagagatttctataatatctactgtgaacttgcaagtggagaactagttaagaacaagatatatgcagtttatcgaatattaagagagaatttctgaagaaagtttctttgcaaaagaacaactgtgcatgtgcctgttgcagctttgagtttaaacattcctaaatgtttttaacgactaccaaaacatccaggaattcaaaagaatggtatgagtgggaacagaatactattatttagagggaaagagtaagaataaacacaattcatgctctttatagatgatgcaatgtggatcctccttttagtttatgtaaaaatgtgaaagggtgatgtgaatttgacagtacctggaaggacctaaagcatttaagagaagagaaaggggcaagacttacaccaaagcgctcaagtcagcaagaccatcaataaaattgtaaaggtcagcaatgtcatagctaatatttctgagagaagggttaatttccttcaacttcctttcatataagccgcaaatacctgtttacgaccagaaaaaaatcagcgttgcaagctaaaaacttattgcttctacaaaaccaaaaacaaaaaaacagcttccttaattcacttaaacactcggaagagaggtaatgaacttaagaaacctacatttcttctacattgctaattcctccactttattgagcaaacaagttagtaatcaaaatacaaaccactttattaccactttattaccgagcagactcatcacacactatatatcaatcagcttatagcactggtactaaaatctgaacttcctaataagtcacagaaatagctacagaattatataatatacatgtcgtaattcaaaatcatccatcttgttgccacaaagataaacctcaacataatcataaccaaagtcaacaatgagtagactagttagagaatgatgattcgaaattaataattaccatccatagcttggcctatagagtcatagtccatgaaagtcctcgtagctctgctcggagaattctgcaacaagatgattgtgtgcctactactgttgtgattagcctacacaacaaagaagaaagttgataatagtcagcttataagaactgagacaatcaaaacaagtttgaatttccttctctatgttccgtaaactaacgagaaatcatcagaaactgagattcaaactgcgtaaggaacgatattcgaaaacctaacacgatctaaccaaaaggatttgctcaaatttcttcgcgattgactaaggaatcactaaaactacacaaaaggaacgttaggagaagaaatcgattaccatcttcgagtgatattgtgacttcgctagcagagtttgaggtttagacgacgaagacgagaagaagaagaagaagtttcactgtttgagagagaaaaacgaatactgtataacccaacaagagggcaaaatcgtaaaataacatagggtctctgtcgcttaacatgtgacatcagatatagtacgacaaaacggcatgtatttcctttaaaatatgaaaaaactacaagctgtttccatctgattagtagattttgtttctttgaaattgttcatgttaggcatttactgttcgaaatgtttcatgttatacaaaatagctttacagaagcaaaagtttaatgtcgtcatcatcatcatcttctgattgtttctttggcaacacatcagaaggtacaagatcatccaaatgatcggaatctggaacgaggaaaacgaaacacacagtgacgagtctcaaaatattccttatcagaatcacgagccagagatttccgaaatcgtgtctcgtgacaccaaaagcgtgaagaacaaaccctccaccccatttagaagcaagctgtccaaaactatcaatgcacatgaggaaagcaaagaaggtgccttcgattcccagaggacaaagccttgtactgagaaccaccatggggatccacctgatcttacttatcatcttcgtgaaagattcttcggttatcacaaacaaggaatctggtatcccgagagttaagttccagcgtttgatgaagactagatcaagcattcctgagaagacgtatagaagttgtgcaaagaagagtatgttcctaaaggaatagcctttgagcttcttgtgatatatgagaactccaaacatagatgccaatgccccgactgcatagattattcccacaaactcctgcatttagaccaaaataagcaagtttgaatctagctcataattacattattggataaagaattttattagcttgttcagaaactccatagctttatatgtcaatgtgacactaccacacaatcataatttcaacaccatttcataaggcatgcagatattcacaaacctaaagacaagatttttcctagctaaaataggctttcaagagaagtgactccatggagattaatataaaccagcgaaacagtctgaaatatgattcacataatatcatgacatactaccacagtgtcaatcttgagcttgcgatccatgggaacctgtttttgctagcttcccatgtcgtttagtaactatactggttcctatgaactcaatctatataagacccaaactgtttaaccactatctttattctttaaatcaagatctttaaaaagagcttcttcaggattgtacaaccaacctgggaaaaggcgggcccagctgtaggatcagtgtaccagtagaagtggccttcatgagtgctgatgttgagagctaaggatatgaacatgtaaagagatggcttccacacttcagggtactttactgttttgcacattcccttcaccgctactcctaagccatctgtgtcctgaagaaaattcaaacgattgctcaagagttcgatcaagattccaagtcatgagataaagtcaagaggcatgaattttcaataatccggcagaaacaaataaagacaaggaaaatttctgtttggattattctgctgcgacgccaattctggtcacttgtgagagagatcaaaggagttgagattacaggctaaggcctcacctttttggtcttttgtgtaggaacagtagaagatcttttctcgtagatgaaaaacccaagtatgacgatagttgcaggcgaaaatgctaatacccctaatgctccctatatcagaaaaaacaaaacagaaaaacgagatttcaagtttctaatctcgatatctaaagggaacacgtcctgaaaacgtgactaaaaaggtgtaaaggctcaacctgaggtccaagctggtgaacgaagactccactagttgcgtatccaaccaaagcgccagcagatgaacaaaccatacaaaggctctgtatatcaggagccaaagatcggatattgatgctgtttgttgctatacacgcatcaatcaccacatctgcaatggccatagctgcagagacacctaagaggcagctcaaagccaaagcagcgggcaacttaccaagaacaacaatagcaatcgcagataccaaaccaagaacaccagaaactacaaaatacggctttcttttgtaacctttgatagggaacacatcggtgaagagaccccaaatgggtctcatgacccatggaatgtaatataaccccatgtaaagctgcacaaccgatggctgcacttgctggacatctttccagtaatagtctgtgacgactttgaatatcgaaccagagaacccttggtttacaccgtacacaaggaccacacctagcacgaagctcaggtttagcctagaactcagcatttgtaaccattggaagggctgaattagaactgagacgacagcgtttcttcttgcttttgtcttgatctcagaatgatctgaaattggttttaggagaggtttatcgtctgagaagaatttctcagtttctagtgtttccatggtgttgactgtttaggagatgaacattggatctgaaatcaaaatatcgagagcaagagcctttaatcgttattttcaatgtaaaggaaatgccttttagactttcaaaaaggtttagacattcacacacgaggaaaaacaaaagatatattataaagtttcccacttgacaatgacatttaccttgttgactttgtaagcaatgacgtctttcttcaactaccagtctgaaattctacaaaaacgaaaccaaatcgctttattagccaaaattcacaaactcgatagtatgattgacagatcttgaaagcaaaaagagaaagtcaaatgtttcatcttcccaccgaaactcaaaaatcctaatcaacatcaacaaacacctaaacaattacttcaaaatccaattaaaaaatagagaaggaaagcgatatgctgcttcgttggaggtcattatctttgagattcccacaagctaaaaagactactatatatgactagagagtcatggctagacactaatcagaaaaaagagagaaagaaaagaagaagcaaaacagagagaaaatggcaggattgtttgataaacaagccgatctataccttgacgccagacctaattacccctctgagtggttctcgaagctcgctgatctcaccgatcaccacggtttagcctgggatgctgccaccggaaatggccaagcagctctcgccgtcagtatttgatgctcataaatttttatagagcttcaaacttagatttaacagatttagcttcttgctcgtaaatgatcacaacaacatgcatcagatcttggatttgacaaatttcgcctccattttgcaggttgcagagcattacgagagtgtcgtagcaacggacgtgagtgaatcgcagctgaagctagcaacgccacatccgaaaatcaattatcgccatacgccgacgtcaatgaccgacgacgagctagtggaattaatcggaggagaaaactcagtggatctaatcacggtcgcccaaggcgtacactggttcgatctccctaggttctactcagtggccacacgactcctccgtaaaccaggcggaatcatcgctgtctggggatacaacgacgtcatagtgagtccagagttcgacgccgtccagtatcggctccacgccacaacgctgccgttttggaagtatccgtacattcagcacatcttcgattcgtacgaagcattgccgtttcctttcgaaaatgttgggatgggatcagaaggggagccattaaagctggagatgcctaaaacgacgtcgtttgaagggatcataaggatgtttaaatcatggtcggccatcgtcacggcgagagagaaaggcgtcgagttgttaccggagagtttggtgagagagcttgaaaccgcttggggaggttctgatctggttcgttccgtcgtttacaaagcttttatgattgcaggaaaagttagagtttgatatcaccaaaccatgattgattgttgttctcatttgagtttatttataaaaattggttatattgcaaaaattctcagaaagtgttgttatttgacaaatcaaacaaaatacactctattacatatattaaaatctcttttggtatgcaacaaaatagaacctaaaatgcaacaaaaccgattttaaaaagaaaaataagataaactatgatcaccttttcttctttgtttccttaatcgccatgatgatcatcatatcctctaatcgatcttaacagaggaatagatgagccttgtgaaccagagacaagcatagaaccctattgttcctgtgagcacaaaaaatgcgtaggaggcgatgagcatgtacccaaagtaaagcatcgcagagaccagtttggtgatctgaagctttgtgaagaagtagaacgtggcatagaggaagaggtagagagctgatgagcctgatgtgaggtatgatctccaccaccaaaggtagtcctcactgcaaagctggaagtagcagagtactacggttatctcggcgcaagtcacaatgaggattacaaagacgaggaagaggaacccaaagatgtagtagaactggttgagccagatggatgtgaggatgaagaagagctcgatgaagactgcaccaaacggtaagattcctccaatgaggattgagaaaaccgggttcatgtaccaagcttgctctgggatttgcctcgggattttgttggttttcactgggtcatcagccgctggcttcttgaacccaatgtaacccccaacaaagacgagaggaactgagatgccaaaccagaggaagatcaaggcgaacattgttccaaaggggacagccccagatgacttctgtccccagatgagagcgtttaggacaaagaagattgctgacacaactgcaggaaacaagaaggctgttctgaaagcgattctcttccactctgttcctttgaacattttgtagagacgtgaagaggcgtaaccagcaaagagtcccatgaagacccagagcaagagcattgcagtcatcagaccaccccgattggaaggggagagaaatccgagcatggcgaagatcattgtgacaaataccatgcctagacactggacccctgttccaacatagacgcagagcagatcagaattggtaggaagtctgaaaacatcaccatggacaagcttccatcctgtctcttcttgagcttcttcttgagtctcgagctcgttgtatcgtgaaatgtcacggtaaagggtcctcagcattatcattgccaccataccagataggaataggacgatcatcagagaattgacgatagagaaccagtggatttggttatcactcatcagaagataagtatcccatctagatgcccacttcacttcactttcctggacagaaacagaagaggaaatcagaaaaactattgaaaacaagaattcatgaaatttttttaagacacaaaccgcagattacttaagaaaaaacttgcctggaaatcgacgtcatatgtgaagataatctccttcttttgttcaacttcttgaggggtagccgagctaacgaccaggcgtttcgtgtgaggatcacaagtcgtcagacgggtcttctcactccactctccctcatactcatgcttcacactacaaatcaacggagggaatatcagttctgaatgacaggggatcccaagagacattcaaattatgaacaagaactgcacctgtaaggtttaacctcaaatcccacgattcttgcagcatcagtttggatatctctgtgatagcggactgtaaatgccaagtgattgtgcataaagaacttctgctctttgctctgcgtatgcaaaaacaaaattagaaaatcgaacgatctagcatgaattccatttagtgtcttaacaattaaaacctacttaccccctcgtactggcctttaagaccaacatgataaccaagctgataaacaacagagggagaaccctggtcgactctttcaattggaacaaccagaggaaggttgtcgaggatcctaacacagaccagaaacacttataataaaactgacagagaaaagcatgttcttcatacaaataatcaaagaaaagtgcctgtatttggtcttacatgttgacccggtactcatcatcgatcttttctttaaacgctttagctgtcttggcatcaagagtgacccggccgagaatattgcacatttgtgcctcccgcattttaaactgcaattgtttcagccccgcaagggttagagttaaatcacagacataatatttttgacagcctgatgaattacaaaattaaaaattgaatacgagactaaccgagtatggggcattctcaatccggtcaccccgaagcacttctccaagattctcagtactgtccacaatcttgctagggcgacaaaaaggaagggagtaatacgagtatggaagctgagtctttatggaagttaatttattcactttcaccttcagctcatcaccctgcaacatacaagaaaacaagactcaaaatttgaatatgattttgaagtgaaacatgcaagtctactttgattgagactcgtcatataacatgcaggaccgacattgcccttgtacccataacttggatttcgtagtaatggcaagcgaatcaagagcgagagatcactaagaacctaacaaaggtaatcaaaattacagcgaataaggctaatccagaagaataaatatcgatatagctcgcctaagacgctacattgttcagatcgagagattagtgaagcggaaatgaagtgaaatcaccaattctattagaaaaatagctaaaccaaaagtcggtgcatcagcactccaactctcactatctctagctttctcgggaatcaagaacggattaatcctagcggaaatcgaaacgcagatccaggagatccaaatcagatctaaaagcctagaagcacaaattcgaaacgtttttaccttctcgaaatcctgaggagcaacacctgggagatagaatgagtgagctccatggatgaagagcagaaaaatcaaagcgatcgcgcatccagaagattccaatattcttctactgctcctcagaaactccatagccatggctgttccacacgaaggaagaaaataaccagatctgaagctacgctacagttgtatttgactcttatacgcttcgagactcgagaccaagacccgcctctaattgtgatttaatacttcccggtttatttttccggtttggctcgtttatgtttgatccttatcaaccattaataattcaccacgtcactacgcatgaagtctttctacgagctataagcctacataaccaatgggcctaactcgataagcccaccctaggataaaccaatccgataaaccatcattaattaaagtcaatcaagatttttaagcatttgctatacatttttaagattgtgttaaaatgtggtctcaatataatcgatagagagaaaatgggcgacgccgccggaggcttgagatctgaaacgcaagatgtgaccatgacggacctaggagagaaaggtcattctccgggagaccctcctgatgcaccgggttcgtgggtgaagaaagtggtggggggacatttaggtggtatcctaaatccgaatgatatcttagatgatgagtttgtgtctgagcaaatgacactggagttccctgatggtgaggatggagaaccagtgataacaattggcagtgaggtattggcggcgatgaatggtttgttgaagaacagcttgatcgtgaaagtgcccgggcgtaacatgacaatatcagcattaagtagaaagcttcgagagatgtggaaaccacgaggagcaatgtctgttgtggatctccctcgtaagtttttcatgattcggttcgaagcggaggaggaatacatggcagcgttgacaggaggtccatggagggcgtttgatcgctatctcatggtgcaagcttggtcaccggagtttgatcccttgagagacgatattgtgaccacaccataatcgatttgatttgaagaaaatctatcgttttatattttgccttggtttacttgtttgtattcaaagaattggtttacttgttaagatatttttcatggtccaaagacacggaaactttgtaccgaaatcaaattttcaaagtaattctattatttcataacacacatggatacttgacgcaagatttgataacaaaaacaaacatcatatctttcataaagagatcagagtttttggttttattctcttgctaagtaagcgcaagaagagaagcagcacaaggccttagttttgacaagttaaacaacgaaacaacacaaaacatcaaacacaacaacaacaacaataacaacgaggactgcatatttacactgatctggaagcttttcagattcagcagcacaagaccagacgacacaacagggaactcttttctttccattattcaagatctagtaacctccctgaatatacgcatttaggcgttgaagctcctctctatgctcatgaaccactgcacggacaacatctcctatggacaccattccaatcatgcccttgtctttgattaccggaatatgcctgattcggttatctgtacattacaaaaacacaaacccgcatttttatttgcttcagtaggttttaaacccaaaagcttgtatctttagtggaaaaatatcaagttgtctgcttacctgtcatcagttgcatagcacgcaagaccttggtctccggtgtcacagtgataagcttattctgcaattgccagttcacagatccagtcagtttcaatccacaaaagcaaaaaaaaaatcgtacaatcgtgcatttacatacctcttcagtcataatgtctccaacttttgttgatttggatgatctcccttgcacaatgatcttccgtagataatctagagaaatcacaatgccgaaaagtgaatcacacataccacaagacacaacaaaaaaattattaatgattagatctaattttacctctctctgtaatgataccagcaagagcttgttgctcaccaggtttcacaaccaccaaggcaccaacattgtgttgtgtcatctaaacaaaatcaaacacaatcaattccaaatccacatcgagatatctaaaaaaggaaaaagagagtagtataagcatacggatttaacagcatcataaacagtgtcatcagtagtacaccaaagccaagatccatcagcacttttgcctttggatttcatgacatcggaaatagttgtgctctcgaatccagattcctccatacgtgcaggttgagttgattcagagcgtgaacaaaacacagaaggctgaatcgccgggttaatcacacggagatgttgcagcacagagcctttcacaacatttccaccggagacgaaggatcgaatcacaccttgcatctttcaactgtcaacaaccaaataatcagttcctcaaaacgagatctataaaatcaagagctaaaagaacgagtctaatgaaactagatcgaaaagagaatgatcctaattcttaaaccgagtgtatttgatcaacaaatcctaaaatggaaagtttcctcaatcagattcagtaaaaagcatcagagatagtgaagaaggagagattcagacctgagattagagaagaagaagagatcgtagtggagcttgaggttgagcttgaaaaccctagagaatggggaagagacagctgaccagagagagttgagtggagagttttttgaagggttctctaatggataatcatcaaatatataaataaacgattttcgatagcgaaatactggcgacttttttcttttccttaaaatatcttacaaaatttaaaatagtgatgactgtgttgcttcattcaattattctatcatatcctgacaaatatcaacaggcccacttaaaaacttaaggcccactttaacagggccagatttggatacaaataatattcaatcgagacgacgtagaagatactcaacctcaacgagcttagtgagagggataagccattccccgtagatgcgagaggcaagcaatggatccactttatacttcttcttactctcatcgccatagccagagttgaattttacttcttgtccaaacgtttctgctttcttctgcactctcttcttaaccatttcttctactttctcaaacgtcaacagcttcatcaaagcctctctatcctacagtcgaaaatcaaacgattatggtgtgaatcatatcattttaaaaccacagtgaaacagaatccacaatgtgacactaagtttacctgagcgcgaatcgcaggctcgtaatcttgtggagcatctctgaatttgacctcagctacaaatttaccgtagtgaatccttctcgaaagagccttacacaagatcaaacatatcagatcagacatcattagccaaaagtagagctgattttgttatgtatactcaatcatctccttacttgtaaacaggcgagatcactagcagcagttgatggatagttgccatcatcgccaggtttgacaaacaaaggaagcaattctttaaagtaaatatcccagatttgtttgttaatgttaacagatagagccttagggtgcaaagcctaatcaagagaaagaaaagtactgttagactaaagcattcagagttctaagaaaaatgctcaagactttactacatacataccgatggatatttgtgcgtaggaaaaaccgagtgaggaatgttctcaaggaagaaaggattctcttccgggtattcatatcttcctacctatataatatacacatacacataaggttttcaagtaaaccaatgaacaaacatataggctcaatatccagaaacttaagaatatatataaaccaatgagatgaatatattaatgaaataagactttcagacattataaaaatagaaaacaatagtcctccatttccaatctccacatataatgaggttttcataaggaaatctcgtatacatatgataaagtcggagccttttattggcagattcgcactcaaatcaaaacaagaagttatcacacaatgagattatacaggcaaagccaagttatcatcttttgcaatggaggagacacatagcaaacaaaaggcatgctaattcaagaatccaggcttattaaaacctcaatcaagttgacttgtagcttactttctgctaatttcatggaacaatctaaaacaatgctataccaaaaccgaatcaaacgaagcattgatatctctgtatctaattttagcaaaaggatcagtttttaaaatgggaagcaaaccttagcttggatgatttctgtctctctgacgaaaaactcagtgagagaagagaaacttccagaatctagacaacgagattcctcgaaagcaggagaattgagtggaaacttagctctctcgatcaagctgaagacgatggtgtcttcttgcctaatcaacgattctctgattaagtcaagactcagtacattggaacaaccagaacccgaatccgattcgaagactcttgccatgccgcttcaactgtatcccctgcttgatggtgtataagtaagcaaacaattcattcatagaaactatagagatgagcaattgtgaatgacgaaagtcaaaggacttattacctggaaatatgaagctttcttcttcttcttcctcaatgctaaagtgttttggacctttttgcatagattgcttcctcaatcaaggaaaacagaaacaaaaaaaaacgaaagcgttgaaatcaaaacaagatccacatccgatgatttgggcccaactatattcaccgactggcccataaagaattattatatcttctcacaatagctggggtttatttgtattgttctgaattatttttctggcttacgctctaaggttgtgtgacaagtcaagcaattcctcgagaagcctctaggaaagtgaaagagatggtgaaagaaactcgtcttggaatcactgcaaagaaagatgaagattttgggaagtggtattccgaggcttgtagatttggtgaattggttgaatactacgagtctgtaaagggatgctacattctcaagccatcaggcatcagcgatgaatatttggaacgttatacgaacgttcttcaacgctgagattgagaagatgaaagtggatgaatactatttcccgatgtttgtaacacgtgattctcttgagaaggagaaagaccacactcaagggtttgctccagaggttgcttgggttacaagagctggtggataagaggacacagggacctccctttgaaggttaaccagtgggctaatgttacgttgttagatgggagtttagcgaccctaccccatttatcaggagccgtgagttcctttggcaagaaggacacactgattttgctaccaaagaagaggctgatgaggaggtgcttgatgtttgaacatctacagccgcgtgtatgactcatggagatgacaaaggtttagtattccctcctaaagtggcacctgttcaagttgttgtaatccatgttcccatcaaaggcgctgctgattatcaagaactttgtgatgcttgtgaagctgttgaatccaccttgcttggggctggaatccgtgctgaagcagatatacgcgacaactattcttgcggatggaagtatgcggatcaagaactaacgggtgttcctttgagaattgaaactggacctagagatttggccaatgatcaggtgaggatagtgacgcgtgacaatggagctaagatggatgtcaagagaggggatttgattgaacaagttaaggacttgctagagaaaatccagagtaacctctatgatgtggcaaagagaaaggttgaagaatgtactcaaaaggttgaaacttgggatgaatttgtggaagctttgagccaaaagaaactgattttagctccatggtgtgataaggttgaagtggagaaggatgtgaagaggcgtaccagaggtgatgaaacaggaggaggaggaggaggagctaagactctatgtactcctcttgagcagcctgaactaggagaagagactctatgctttgcatcaggaaagccagccaagaagtggagctactggggaagaagttactaagctctatgcttttatgatgtcatgaccaaattggtactcatatctctctactgattacattggaatgaattgagaaaatccattaataaacatgttgcattttcacaaaagttacatactctgttttttacattttgtaatgaaatatgaaacaccaaattctcaccttgagagagggtaaggatgagttcgagagctgtgagtgattctagaaggttctggaatacgttcagagactatataagcagtgtctttccaccaagaagcttctgtctctttcaaatgaagtctttgtttagcatcatccaatgcaatctctaactcctttatctcctcttgttgtcttgtctccatgagctcgtatagtcttctctccagctcatacggacacactccttgttgttcctccactagtcctggacacacatgtcccaatcttaatccttctgcatcttcactaacctcctggttatgaccaatctgaagaagctcaaactcagcttcaagttcagcttcaagctgatccatctcacctccagaatcattctctagcttatatacgtaatgtgacaacgacccttcacctccaacactcatagatgtctgtatgatctgtggagagtaatagtgatcagtagacgattcagggccatcaacaacatcacttgtggcggaatacgcagaggtttcagttttctctagctgttttcgcctcaattcattgttgtgaaactctaaaaacttgtgtatatcgttacgtaactcgacaaactcttgctgtttttgcctcagttcttcgtttcgacattccaaaaacttgtctaaatcgttacgtagctcaacgatcttgtgaatctcttgtctaccagtagcaatcaaatgtatcaaataacaactcatgccaatgctgaacaaaaattcccttctttgcaattctacaagaccaaaagttataattaggagacaattagattaatgaaactgatctattacaattcagttcacacataaaacaatcttagttcttcaaattggaatctactatgatcgttttcgaattcgacgagaccaaacaaaattgttaccggaagggatcgttggtggcggcgaatctgaaaattggccaactctatgatgatcatcctccgaggaagttctgatcctcaccgtgtcagagtctctcacccttggttccgccataggtgtcttttttcctttgaccttcccctgtggggagagccatcgagacacgattctccgtggcgacggacatctgatccggatgcatcctgctctcactcctacaccgtcatccatcggaggattcaaaattcgatcgttaaggagaagagaatcgaaggaaagagaaaggtatttaaatgagagatcagaatcgggattgaagaaagagagagagagagagagagacaggaatgttattaatgagaatcacgagaaacagagtgttctttcgacttcgatctccaaataaaaacaaaacaaaaaaagcgtttggagggaaacttttgaatttttggaaagtctttaaatgccaatcacctctccttttcccaatttataacaaaatctttagttattggtatgtgactaaaatctatgtataataattggtataattcattcactctttttttcttttctcttgacaagtaattcattttttacttaaatttagtgattttaggtcaaaagtatgtttagagatcaaaataaagcatattgagagttcttttagccataaatggtaaacgcgtaacgttgaccaaatgaaatggcaatgaagtaatatattcactttttttaacggccagtcagtattgtagaccatttatgaattttaccaaaaatatcgttgggaaaagaccataataaattcgagacaagtgtagtggtactactcatttgtttgaataagaatcttcagtttgaatttgccttttcccaagttaattctcgatgtagtaagcagctggtcattacctttttgacagagagcaatttgtaaaaacaatgcaattctgattgataaagttacaaaaaaaaatctcaacaatacgatcagcacaaggtagttttcattctcaaagcaaatgtatgtttttttttttcttttcttgttttgagaaaaaaatgaattgatattaataaataataacgaaaagctaaaccaacaagtattacagtgtacagttgatttctacagtagtaaagtaaattggagaacaaaagaaaaatacaaactacgagcaaaatatttgggtttgggtctcagtaggtcagagcgaagatgacatttggcttatgacctccaatgtagctttcgtcttcgttaaatgatccatctacgtttgttcaaaacactctttattaattcatcttacaatcctttttaaagataaaaatatgtttaaaagcttgttggcttaccaattctttctcgcgattgtcctacgaaaacacacaaatctaagggtcagtcttttacacgtgtttgtcaagatacgaaaaaagggtttatatgtatttatacccttgtttgaatctcctgttttagagcgcttatgagtctaaacaagtagtcgtagttggatttgtgaggctcctgcaatcatcagtcatacaaaaatcatcataaaccatcaatataatcatacaataatcacaattatcagcataaaccatcaatgatgtttatataatgttattacctggatgttgtcgggaagaggaagaccttcaaagacttgaggaggctctcgaagttgaaggatctgactcgggtcatttggcaaaggaacggtccatgaaggcggattagaaatccccattgatgcaaaaccgtgtcctgttctattttcccacatttgctgttgttgagttgaagatccatcacttatgatttgatgttgtaactatgaaagaaaacacaagaataagcctaagagcaatgctaaaaaagtcacaagtttccagtttcttacccttgggacattttcgactgtgtaagaaacaaatacgggctctgtgaagttgggaggctcaagaaccgcatatgcgccttcattttcatagtttcttgaaccctgatagcaaaaataacaagaaaaaccagttggaaaagtaacagaatatgtagcatttggactctgtttgttgtaaaagtgccaagggaaatgacctgtgagaacattgaagcactgaagactgtgcaaagctttccagattctacttcatgatctattgagtaaccgcttagcatgtttcccatgtcttctcgatctgctcgtgcatcggggccttcatgcgatctaataatcatctaagatggaaaacaaaccgattaagtttgtaaataaacaactggaatatcagtcaatttggagagcagtttttacccaagttatacacttacctttaagtttgattgttgtagaaaagtctcggtgcaatcggctccccaaagaagtcccttgtaattgctttcgctcagaccatcagccatccatggacatgaccataaaacatggttaagagttatattctcgtcatcgttctcaccagcttgtctcctctcaatcttgtcaagttcctctaaagaacctaacaacaaagatggattcgggctctcttcgtggaccccacaactttgaaagagacctccatgagttgtgtagacgctatttgatatgactgatgccaaaggtaacattttaaaacaatcgatacacttggagtataacattggaccgtgctcaccgtatctatcacatatatctttcaggaaatcaagctcttctgcagaaactcttgtttcagagcttcctcgaagtaaaattacattctcaggcatcataatctgtagttagaaacagcaactatcgatcagatgggaacaaggtgtcatactgtcatgaattaagacagtaaaacagatagaatgaaagaaaacatatcaagggccttaatcctaatgctttcatgctaatattaagcaaactcatgttgattattctatttgtgatacacagaaaacaaatttgatgccgtcaacttcaacaatccagagtttagctctaagaccaatgcttcagcacgataaagcttctttacaatttaaaagacaaagcatgggagactccaaacacttcaagttaacgttgtatcacaaaaaaaatctaaaaaaaaagaagggaaacaagtaatgaagctatatatgtaccttccaagctaagagaaccaggaacacttctaggctccaagaacctcgaccaatgtaattaccgttgaatacaaagcattgattctgtgaaggccttcctgattgatcaaagattttgaggagatcgtgtaactgaccgtggagatctccaaccacaatcactctagaatcctcactacagccattgattttaacacaattggcttctttttctagaatctgcgaagcacaatccaccagagaaacagccacagaatgtggcaatatcaacgagaactcggaaaccgagttcttccatgtggactggtttagcaaacccatcaaagtctcaacccattcaagagttagctgtgactctaaaggccaagagattggctccaaaacaatgtcaccaaaatccccaccatctccgtttcccaaataaatctccatttcgattggctcagtcatgtcctctagatgatcaacagtttctggttcgtattttctactacccattccttgtacgcttgctatcatcctggtcacttgttgcttctcttgatcatccaatgtctcatattgaaacccacgaagagactttaaagaacggtctgagttactcacctgcacaaaattcaaacttttaatcgatttgtggttcacatttaatgcttcaccaaataaagatgtgtacttaccacttgctttagaaccgaacacagtattcgagttacactattctccggatcctgaaacaaagattgtaaatttgacgttaagggtaataagcaaaacagtgagagatgctaaaaaacatggagactgaattgtttactttaagaaagtctcgatcagcaccacgtcgagatatttctttcaacataagcagagtacgcagttgcttatagttcttcattctcgtcgttttaaccgcacttagcttcaagaatgcgaatttgcaagcttcaagcttcgagtctaaaacccttttcgaaatttctacagaaaaaccagtcaaatgttattacattactggtttttgcacggacacagagaaatttgtcatggagatgagccaaatcaaattgactttataatatcaatcgaagaaacagttacctggaggcggcatatcgaaagatttgaaatttacacggtgagattgacagttcggtgcggtcgtcggcacagttccggcgtcgatgtcgattacaaccgccgcttcaccaccgagaaacgagcgttttcgtgttaacttcttgccggttctagggcaaagaaaccacgcgcatttcgctgcttagaaagcgaaaaggatgttgtttcattaatattgggccggcccatatttaaaaggcccaaactgaaaaacaaacacagtcttctcagttctctctggagtctctgagatttgtgattgaccaaaccggtataatcagtacttccgataaacccacaacaatggcgaaagagaaggcatgagaagaagaagcttttaatggcgggagtgattagggctaagcagctgtttctatgctcgtcgattctctcgagcaacaacaataaggttctatcacgccttcctcggcgtagtatcaatgtaattgcgggaaatctcaattcgagcgagactaagaagaaggagaaagagaagaggaagaggaggaaagagattgaggtggaaaaagctactgcggaagcagtggtcaataaggaaaagagaaggacacggtcgagcagagggtatgaactcgccgacggtgacgaagttccgtcctcacatgtgcctgtgatgctcggagaggttcttgacattttctcttccgttcgcttgcgaagtttcgttgattgtactcttggcgcagctggtcactcttcttctgtaagtttcttcttcattgttgattaattagctcaaattaggatgaacacattcttgtgctttagatgtttctttgctattgaagaatttttgtcgacgttaggatatgtaaatggattgtgaatctgtaatttgtgtttcagatcattcaaagccactctgaattgaagaattttgttggaatggatgttgatcctgtggcaaggaaactgggacactttcatattgattcgctcatgcatccaactttgaaggcttctatagtgttgaagaacttcaaatacatcaaatctgtgattgctgatacgcaaccggagttgttagatgtaggtgttgatggtattcttatggacctgggaatgtcatctatgcaggtacattttgtgattttcacatgcaactgtttctttttccttgtattgtttgcatcactcacctatgcttgtatccccacaggtaaacaatcctgaaagagggtttagtgttcttcaagagggacctcttgatatgcgtatggatcctcaggtgagggtacttatatctccttgtagtataatgaacctgagggtttttgaatctcttggaatttctgctgaaattttgttataacctatccactgacatgtgacaggcgactctaacagcagaagatatagtgaattcgtggccagaatctgaactgggaagagttctacgggattatggcgaagaaagcaattggtatttacttcaaaatagaattgttaaggctcgacttaatggcgggttacattctactggtgaactggtggatctcattcggggtacgtcaccagcaagcagaggtatgtctatctatctttcgattctcttttcttctttttgcttctgtgctagtaatttatattgggatttcttgatttgcatttgcatctcaatgcgagttttagttagtgttcctagttaaagatttggttgccaggtacaaaacacagaagagtaagcaactattaatgagtgatccgaaacaagatcatgaaaacattagacatttttgagttttcacagttgacagcaaagttgaagaagataatcctttttaatctttaatacttcgactttcgtttgaaatgttgtaggaggcagacaaggctggataaagacagcaacacgtgtgtttcaaggcctaaggattgcagtgaacgacgaactcaagacactacaaaactcactctactcatcattcgatgttctcgctccaggtgggagactagcagttatctcctttcacagtctggaggatcgggttgtaaaacaaacgttcctcgacatcttagggtttcaaagagaagagatcaacggagagggaagtagtgtaaaaccggaaaggcaaatcgaagaaagagtagagaaggaattaaaagagaaagaagagtggatcaaacagacagtaatagcgtcgaaaggagtaatactgacaaagagaccaataacaccttcagaggaagaggaaagactgaatcgcagagcaagaagtgctaagttaagagtgattcagaagttgtgattactttatgaaatgtttttttagttgacaatcaaaatttcaaagctctaactaagctttcattcaaaatagtcgaggtttttagaaaagaaagttaggaacagggaaacagaagaggattgatccaataatagttgaaccaaaaccaattaaaccaaacggaatagtgttcaattttcgaaccagaccggttaaaatgcataagtaagtgtgtgtcgtcgtcgccgcaaaaacccagttggagctcgaaacccttcttcatcttcttcttctcctccacctaaccaatgggagcaattgatctctctttctcacagagtcttctcttctcttcgtcgcgttccaatctttcctcctccacacaccgttccgtctcttttttgccgccgggaagcaagtcacggtgtctgccgccgttgcgttcaatgagtcatgacgacgacacggcctcaaaggaggtgaagctatggggtggaaggttcgaagagagtgtcactgagaaagtggagaagttcactgagtcaatttcatttgataaggttctctacaagcaggacattatgggtagcaaagctcatgcttcaatgcttgctcaccaggttttacatttgcttttactttatgcattttcttaatttcttaattcagttgtgattctatgtcttctaagtaatgcaaatttgtaaagtcaggacatttttggttatttgttcttacaggggctaataactgatagcgataaagatagcattttgagaggtcttgatgatattgagagacaaattgaagcaaataagtttgaatggaggactgatcgagaagatgtgcatatgaacattgaagcagctcttactgatcttattggtgaacctgcaaagaaacttcatactgcaaggagcagaaatgaccaagttgctactgacttcaggctttggtgtcgtgatgctatcgatacaattattgtcaaaatcagaaatcttcagagagcacttgttgaactggctttgaagaatgaggctttgattgttcctggttatactcatcttcaaagagctcagcctgttttactcccacacgttctcttaacttttgtagagcaggtttggaatttctactttgtttaatttttggttttctgttacatcgttttgtttagtttctggttatgttataaaattgagcagcactctaatttgctttatgaggttcatcttttagatactatgtcctccttttcctgcctcagaacattgtagggttcttacatttacttaggattttactttcttagctggtattttggttcatgtatggcagctcgaacgtgatgctggtcgttatgtggactgtcgagcaaggctaaatttctcccccctgggagcttgtgctttggctggaactggtctgcctattgataggtttatgactgcaaatgctcttggatttaccgaaccaatgagaaacaggtatgttcctagttcttatattggttgcatcaactctctctaattatatgtctttctcttttgttttatggtttctcatttattaactcttttctcctctgtttcaactagtatcgatgcagtctcagaccgagacttcgtgctggagttcttatatacaaatgccaacaccggtattcatttatcacggcttggagaagagtgggtactgtgggcttccgaggagtttgggttcatgactccaagtgattctgtgtcaaccggaagtagtataatgccacagaagaaaaatccagacccaatggaacttgtcagaggaaaatccgcaagagtcataggcgatctggtcactgtcttaacactgtgcaaaggacttccccttgcttacaacagagattttcaagaagacaaagagccgatgttcgatagtaccaagacaataatgggaatgatcgatgtatctgcagaatttgctcagaatgttacattcaacgaagacagaatcaagaaaagtcttcccgcaggacatcttgatgcgactactctcgctgattatcttgtgaagaaggtaatgtggtttttatttatcatatcttccatttttgtaactgaagtcagaaagataaatactgttttggttttttgatttcccaggggatgccttttaggtcatctcatgacatagttggaaaactagttggagtttgcgtctcaaaaggctgtgaacttcagaacttaagtcttgaagagatgaaaaagctgagccctgtgtttgaagaagatgtgtttggatttttgggggttgaaaattcagtcaataagttcagttcctatgggtcaacaggatcaaactgtgttgctgagcaacttggctactgggtcaacaagctcaacattacttccacctgatccggaccaaaccattagcaaaagatttgatgacgtttgtgtaattttcatatttattgaggatttttgtcgttaataccaggaagatttcaagcaacatgttgcagcggtttgagaagacccacaaacaaaataagttttgtaatatttgaaatcgagataatgtggaagagtttggtattcttctcatttcaatgctctctacaatatcaatctttttatattctacaatgagaagaagattaactccaaacttgtggatatttgcccaaagcttaagaagttggatcaagggaagtgcattggagttaggttgtgatttgaacatgtctttaaatttcaagaatactttgtcaatgcagacttcaattttcatttgagttttttgaatttttgttttcttctttttcaaacccaattattgttcagaaatacaacaacaaaaactagtggattgcatttggatgtgattttttttgaacatgggggaggaccacacatgacatgacacaccctcttccttaggaggtgcaacatctgttacaacttacaatatcctttttatgttccaaacaaaatgtcatcctccattttattatgaccaaacataaagtgacacaaatacgtaccagtaataacctcattggtgtttctcttctcctaaaatagttaaatctaatcttaacaaaaaacactcgatttaatactatccatttgatgttggtggagtcactttctgactgtgacacaacccttgtcctaaaatcccatgttagccactgattgatcctttttttagattattggtcggatattaattatggtgaaagctccatttctttcttaatggattgagtttactggtgaacctcattactcttgttatcttttaatccttgtttttgtctgtatccattttaactttttgggggatttttctttcacttagtataacttatacgccattaattcttacaggattgggtttcttcgaaacttcttgcatgatgtagtcgatattttttgttctttaggttattacattattatgcttctaaaaaaattacaaaatatgatagtaaacatatggtatgaaatgggtaattttgatagactgaatacacataaacatactcatttatgcagaaaattcagattagcattatcttcatcccatcaatcacatctaatcttctatcttacgatcatgcccagctacaattcaaagttggacatgtagaagaaaactaatgaaaaaaagtcgtcggatcccataaataaattaatttgttgtgactttgtcctctccactaactatttgaacttcaaaattcaaatgatttgacttcataacagaaggtgaatcttttcgaagtctctgagaaaccacacgtgtcggtcttctaaaccacaacccgactcatagtcattttcgttttcgacttaacatacccttaattgtcgattaatttaatctgaacccaaattatttattcatttgtacctaaaaacaacacaattaggttcaattagaagcaaaatcaaaatccttaccaaagaaaaagaagtaaaaccaaaattttattaaaccaaagaaaatttgggttcaatgtaacagttcttagttatactacgttaaccgataaccggttaaatcagaaccaaaaactactgattcaacaatcctcggaagaagtgttattattatcaccgtgccatgaccagacgatgtcgtttaacgccggccgtacttcttcttcgtataacctatcgtactccaaagtatctcccgccgatttgcaaaactccaccaccgatatctccggcgctacttcaaacacttccgccgtcatcgacaaccgtccttttctcccttccgttttcccttccatcttcactttaaaatccttcgttctcttcactttcatgttcatctccttcgtaaccgtttctatcttctccattacctccgtcgccgacgaccgtgacgtaaacaccgattgcactttcctcttgctctcgaacaagctcgataagtcaaatccggaagacatcgaggatatgaattcgaaagcgttgaagaatttcggcgatatcggctctgtttgattttcacaatctccgtcttcttcttcttcttcgttgtttttgctgctttgagaacaaatcggttcgtcgattttgaaagctaacggcggagtgaagtttttccggagccaaggcgttctcataatcgccggaatcgagatccgtcgatctggatctacaacgaggagtttcgaaatcaacctcctcgcttccggagaaaaccacggcggaaattcaaaatccgctctgaaaatcttccgatacatattcatcagattctcatcttgaaacggcaaacatccggcgagaagaacatacaaaacgacgccgcacgaccagatatcagctttcgcgccgtcgtatcctttcttctttaatacctccggcgcaacatacgccggagttccacactgcgtatgaagcaatccgtcttgaagaatctgttccggtaacgcagataatccgaaatcggagattttcaaatctccattctcatctaaaagaagattctcaggtttcagatcgcgatgagaaacgcctctactatggcaataatcaacggctgagatcaattgctggaaatatctacgagcagcgtcttcgtgtaacttacctttagagattttgcagaaaagctcgccgcctttaacgaactccatgacgaagaagatcttggtcttcgtagccatgacttctttcaattcaactatgttgggatgacgaacgagcttcatgattgaaatctcgcgtttgatttgttccatcattccaggtctcttcattacttgatccttgttgatgactttgattgcgacgcactcgccgccgatgatctctttgccgtaatagactttggcgaaggttcctttgcctaataaccttcccatctcgtactttccgaacagaactcgccgttcttcctccatttgatatttacaccgactagggaaaatgaaatagtggaagaagaagatgaagaaggaggattaagaaaaggtggtgttgaagcatgaagtttgattagtattttgagtacatgaggatatattactctcataggtgaagaagtagagcaattccatggaatatgggagaggaagagaaatgaggaagaagaagaagaagtgtgcaaatgaatcacaaacgcagctacgtggtgtcctcttattatatactgaacactctttgaatttatagacaaggtgataagccactcacaaagtcacacatgtcacactgcaataactttactttttctttggaatttgttttttatatggaaaataagttttttttacaaaaaaaaaaaaaaaaaaaaaatggtcatcatttaaaacatattgtttgcagttaaaaaaattatgggtactagattttgtttttgttttgttatagtgttgtacataaagaattttgtataaccttctatatttctacacacggcatattgtttgctagattttattcttaagaacaacattcagaacaatgtctcttgtgttttttcctttcttaatttgttaattacttggacaaaactagatgctaacaattatttctaagactttgggggtcatatgtatgttttttttttttttaatattctctattaccttataatgttaaatcatttttgtataacgtaacacttaaaattttctattattttacaatacaccaatttctagaagaaaataaaacagtgtcaaaataataatcaacgtcaaaggaaataggcaatttaaataggtaaatataacacagtatgtgtaaataacataacctaaactttagattatgttatcatcaaataagattatgctgtttgaatgctatgattttctataattctattaaattttactttttcacgaataaatatcgtcggagaaaaaggaataggtaatcaattattgacagaacttccttaaaataatgtcaataattctctccaacggtctaatgctttttgtcccccttatcttatgtggtggttccacccaacctttcgtataaaaaatttaaattattttaaaatcatttcataaactagcatacaaatcaagtttctggtgagtagaccatgaaaattctaattaacatatccatttttttttaaaaacaaaaattcaaaatcatttacaatattaatttgtttctaaatcatatagctcaattccatttttatcatcaaaagataaaagattattagccaaaacttaatgcacggctagctaatcgttatttagggatgtcatgtcactatcttcaaagtagggagatctattgtgttccaccaaggaatgttttaggatctagtctactgatcaggaattagactactttactaaccattaataacaccataaaaatataactaataattgtatacaaaaaaacacgtatgcgggattagtccaaatagaagcataccttgtccaaatacatactaaagtcaggggcagacccacgttatggcttgtggaggcaagtgcccccagcagcaatatataaataggtaaaaaagtttacactagacaagattaattaaagcagcaaagtggttagagcttcctccacaagtctatattaaaataacgagattggacacataacacatacagccttatgctgtctactaaacgcgacagaaatgaaaaaacaatgtaaaataacgatgaatattcacattcaaaagaagaagccaatatcaaactgtacaacaacaacaacaacaacaaaaaaagcttttagaaggaagctatgcatgagttttacagagagaaagcttttgctacatatgaaacctaatcaaaccttattattcattattcatattcaaaaccattgttattccaccatcaccttcacaaagcaagcttattatacctctacagttccctcctgctttagctctgagtacattcaaatgggtgaaagtttccttctgcaaattcttgcatcctaaacctttgcattagctccacagacctgcaaatgaatcatcaatgtaccaaatcatcaaacccattttgtgtactctgaaaccgccttggagcttttatattaactcaaaccacctatcccagaaaacttacagaggattctctcgattgcggcttagcttctgttgattactctccattacttccactacattggcggttgctggtccagctgatcctcctgctacaattgatgggactgatgcggttgggctccatatctgtacacatatttttacatgcaaatgttagttttagagatcttacacgaaatgaaaaccaaaccctgaagacagctttgtgtgcctgcttacctttattgtgttatcaattccactcgttgctacaacactatcaaacggatggcattgaatgcagttcaaaactagagacgaaagatgattcttttagccaactcgaaattcaatgaaaaaaaaagatacttatgtaatggataaaatgtgaaaggaaaaaagatcacctgattcatcgccaacgagcactttcataagccttccagtctgtttctcccatataaaccaccgaccgtcatcgcttccacttgcaatatattcacctgaaatttggtaataaaatgttcacagaaagtcgataccgtattgaatttcaaattttataaaccgctttttctactagaatggaaaattgcactcagataacatgaaagttgcaaccccaagaaacttacctctctgaccaagaaaactggcctgcttaatatcagttcctacgttacagtggccaacatatctacgtttcatatcaatggctccctctggctataatcaccaaaaaaccattggtgtaaaaggtatccatcaaattaggtaaaagtatgacgcagcataaaagaagtcaagtactaacttaaaacgtattcaatgtgttaaatttgttttgctttaaaataaataacaataccataatcttagaactaacctgataagacgtcctatcattttgagatgacgatgcagttcctgaggaggcattgtcaactgtattttccatcggtttatcatcacctactctatgaattcgtaagttgagactgccacgcatagaatttgagtctgtatctcgtccttcatcatcagacaacgaagtttgaatatccaactccaattcctcatcataatcagaatcttctctttcggatctcgacatatcatgtgaactgtcactgttggcctctgatctatatagtatgtcgcttaaagaaagtactctagtagttccagctcctgtctcttcgtttttctcagctccagctgatttgtcaaacaaaagacaagtacaagaatattaaaatgtgaatataaattcccttgcctgttgaatcatgaaagcttctaagcacattaatactccttgggaatgaaagaatccaccaaatctaaaagaatagctctacatctgttactttgatacacttttgaatcaaaagaaatatcagacatattaaccaacaaaattagatgtagaaagagaagccagatggacttaaagatgatactacgaatctatgcttaagattttctctcatgtgtccacattgattactagaaacgagtggttataactcattgaagagcctaaaaaaacaaaaaacaaaaacatctaagcagaaacatcttgaacctctatcctagctcatagaggaaaacagaaacagcaggaaagtagataacatctgttactaagcaaacctgcaggaaaagacatacatcagttggcacaaacctgcttgaagatcccttttaatgctctccacttttgccactatatcggcatctgatgggttcatatgttgtgcagcagtcgcaaaatctagagcttctttacattttcccaactgcgtgaaagcacatatgtatatgaaatggaagggtgactaaaataaatgcttattgcagaaccatctctatgtcaaatagtaaacttaaaattaactgtgatcagagctatgaatttacttgctgcagcgcttcagacatgtagtaatgagctttaaaggatgaagcatcaattctccgagcattatggcaatctcttacggccatatgagcatcattcttccacttcctctgaaaaataaacaaatcagctgattatggttattagagaggagtaatgtagggattcaagctagttatagacaccagttctaaaggaccttgagtaacaatgcggcacgagtacaaaggcattcatgccttagcgcagactcaatatcattagaatgagcatccagaacttcattagctgcctcaattgcatagaaaacatctgtaccctcttctaaagaccatttagcaatttctaccaattccgtacacttcttaacctgaaaagaacggcgtcagatgcactaagaatatggaatgacaaggtcaccatatggaacaattacagagggaggtgcgaaccgttgcagcattgctacttctgtgaaagccattttgaggagtggtggaaacctgaggtggagattctacatcgtggaggttgttactgaaagaaaacaagttatctacatctcctggtgtgtattgcatgattccagtgcctacaagtcacaaacaaaggaatgaatcatcatatattgagcttaagtcaaagtaccaaaatgttaggaaaactgacattttcaatgcgaaaaggtgcctaaaacaagataactagcaaagaaaaatatttctaaactaagtggtgaagtacagattggcagtacaaatgtaaataacaaaaggtaagcaaaaaactggtgggctaacacatccatcatccttaatccaatttttaaaagggccacataatagcatatccatttgaaatctcagaggatatcaataactttccaaatgttccatcgaaatttttcatgcaggattacaatgtctttagcagaactgaaaggggcatgaacaggaaaaaaaaaagaaaacaaagcgacataaatcaaaatatttcaatatgaagttcaattatttttcttaacaaattcaagttcatactgcacgattaactattcacggaatttaagctttaagcagcaaacaactcaactgcaaataccattatttacattcatcaggtagacatgctccccactgtaactgagcaaaacttcttcgccattaggactgaaagtaacatgtgttaggtgcaaatttgttcgcccctgaaataatttaagatgtagcagacagtgagcttgggaaacactttgaccaagaaaacagcaatgcagaactaagaactagtagagtatcttaatatcaatcaggctaaactaacacgttcagaaagatgcatgggacagaagtaattgacacacggaggtggaggcatccttttccgacttgatgccaacggtgggagcatccttctatcgtataaacgagcaaatgcatcactgccaaagatgaaaaaagagagtagcaagttagttaagaaataaggagagaactctgatccaaaaacatggaagcaaataccttccaccaacaagaagtaggtgcggtcttgtggcacttatatcacaagacttcagggagagagtttgctttggaggatcagctagtgctcttttggcaccactgcgcagatcaagctgcaaaattcagagctatcaacaactttcatttgcagaagaaagttttcataagagccacacctataactatacgtctacaaagtatccagatagggctcatatgatattcaaacatccacaaaaaaactctgattatagacaagtatcaaaatactgtttttgagaaagttaaagccaagatggaagtactagagaaatacaaacgtaattgaaaacaatgtaaccacagtttggatatcaccagaacactgcggcattcttggtgagcggttccagcaggaggacaagaggtagattcccggaaatcatgctgccttaaagtcccatcttcactagcactccatacaacattggggttaccaggttcgacctacatggtggtaaaaacatctgttaagcaaacagctcaaaatgctagacccaaataatgattaagagggtcttacagctagttttttcactcttcgtgtgtgacattggtacaatgctgatggaataatagcattgtcatcttctgctctaccgcttaaccgggatgtattgaatagcctaacctacacgataggaaaaatatatgcacacacctcaaaagaaaagtaaaagtcacctgaataccatgcaaagccaaatgaatgcaaaacccaaaaggtgtagttttatatacctcagcatctccagcaccagataccacaagctcgtcagaggtttcagggacaaacttcgtacagaagatgttggcagtatgccctgtatctatagaatgcaaaagcttccgactggagtaattccaaatattgatctacaaattaaaagaagatataaatgtcaagacaaggcaacgatacagcaccaggcgagagaaattagatgcttaaatggacttctttaacaatcccatccaaaattagatacaagtgatacacgttcgttcccaaaccaaacaagctcaactaactgacacaaagacttgaaatcaacaaaaaaaaattgcatatacccttaaatcatctgatccagatatcaaaagtgaaccattagagttccacgctaaagcattaacacagccttgatgtccctgccacacacaacaaaaacatcttaaggaaagagcaacaagcagaatgaagatagtcaaagattgagtaataacctccaattcttgctcctgagaaagtctccgaaccaaggaagagtgaaactgcattctttgatcaacctcctacacatacaacagtcgacaaacattgccagagagagtaaaatttcaattggaagcaagaattgacaaaagttgattcaaggattcaactataaattaaacacctccatagatcaaactcgagcactgtagctaaaaaccctagcaatgagggaaaaaaaacgaattccaatgggacgcagaggagaagaaagattggggggagacgtacatgacttgggtcctgggaccttgtgtggaggagattgaagatgttaccatcgtgaaaactgagattatccatggagaaatcgatcagcaccgatcacaaattggaagaagaagccctccttctttggctctttgtaatctgacgctatttctcgtgcccggttctacattctcggtgagatcctctgcggcgcatgtgttgggttatctatgttctctaattacatctcagccgttcgttttttttgttttgctgcgttggtaaaatcaagtaaaaatccttatcgggataacaatttaacatatggtgactgactggtgaaccaccatttgctgtcgataaatcggtagcaacttatttaatttcttccacatttaaaagttagatataaaatttgtacaaaattgtttctcaatattcgtaaacatatgtattttttcccacgtaacaatttgtaacaaaaatgtcacatatataagttgtcgcccttagttttgcttacagattaattagggacaatcgttaacttttttattgctatgtgtatcgaaagactctgtcacttttttcaccatttttctactactaggtctaggttcttctacattctagggcatgagttttatgcgtgtgtgggctatctttgtgttccaaacacatcagaacctttctttcttttggcaatttaattatcatagcctagacagctagactcgtttcgttcctggtttaatttctaaagaagtgaattggcttagtgatacatcttcgcactaatggtatatgtttatgtgtttcttgcgatagtgattgtctgattgatgagacaaattcatggttatcacttagtacctacggaaccaaccaaaaaaagactcaattctcataattatcgacaatgttctttttgaagtcatgtgcacgcgcggcgtttctaattaacagtgccgttttgtgacgcatccaaagatgatttattactgtataactgatctgcggatacaaaaattttagtaatactaattaatgaacaaaagaagttggtttatataattaacgagcaacctaaagtgacaagacgagttgaataacgtatgtaataataaatctctttgataatcgaatactccaaaacttgcaatttccactatacctattaagactaatcttgacattaaatgcctaaatgggttactacgtaacgagtttgcaataagctgacacagaaagagtaaatatacgagattaaatgaaggagatgaaaacagaaattaaatgaaacgagacgaagaaatggtaagtggcagggcttatgggtttgtgtagtgtatcacaatgtacacaattggagacaaagacagacaatacttttttcataacatgacattccaaaaggtacatagtgttctagtttcagtcctttgaacaattatacaagaatacaaaatatacatccatatccttttaacaaatacgtgagtcatcatatcaataaaaaacgtcaacaactatacatgcatacagattacaggacacacatacgcatagagggagggagaattctcaatttgtataatcttattccaacaacatagtacatagataccaaagtgaaaaaaatactcaaatcttcacattttctaaaattgattaccgcaatgaatgaactaatattataactagataaaacgaagcattataaactaactacaaccagttcttgaacgtttaatgtctattttacaaaactcagacatcccttattcgatcatttgactatttcaaaattccattattcaattattcatctaacatattagtcaagaatcaagacccaactagaatttagtggtagaataactttctatgctacagactaatcattttcttcaccacaacaatcggagataacctatacttagtcatgtgtcaaaccacataacataagtttcaatcgcttccaattatctctaactctagactctaagtgattatccctctctgattgcacacatctataaaagaccttagaatcatacatatccacataacttacataggagctacaatgcccaaaattttgagcacatcaactccaaacttttcgccattatcttattccatggattcaagtgcaatctgcataactttgactcatcttttgaagctaggagttggggccaattcatgtgtgctagagtctgcaaaataaaagagtttatttcaattacataatatataatttacttataatacaaacatcctattactaactagtctaaccacgatgggtcaacaaaatataacccaaatggagatagacaataaattcgatgagagatataacaaatatcttattcataatagtctatgtgtacaccttcacatacatgtgtaaagatattataagacaaaatctaagattcatcactatgaatgtacaaagttttgaaactacataaactgaaattatataaaaatatatagatgcaacatatgtatgcatagagaatttggtatgcagagacagataagaacacaaaatcataactagaacaatggaataaggaagattcatgaaggagaagttatgacaaaaagagagtgagcacgcaaaagcaaccatatacaaaacttttatacaacttcccctttgtgtgctcactctcttctgtcaacttcttttcccccatcaacatatatttatctagttatgacactaaataatatgttagaaaaacgaaacagaaaaaacaaggatatgtgtatatgtgtagataggaaattccaattagtccagaaaccgatgaaaaaataaaagataaaacatgacacaagtacagatcgaaggtacttgagatcaaatctgggaaaaaacagcaactaacaaagacttgatcgatggatccataaaaggaaagtatgaatctaagtacggacactgcaagttagggtttcttctctaattcccagttttagaatttttctttttttaaagaaacaaaggttaaggagataaactcagaattgctgccgaaaaacaaacttttttttccttaatcactcactcactctctctttcatgcaaagcatacatgtgtcggctgctttacttctctctctatatagcgaaagtgagaagtgattaaatagagaaaaccctagaatgaagaatgaatccaacaacattttacattttagattaaatgaaagaagaagaagaagaagaaaaaaggtgaaacagagatgatggagagaagaaagtacggatgtcaaaacgcttggttatggtttgtcggagagagaaacgtgtcgcaatcaaaggccaggatttgacttgagagacgttatgagccgttggatgtgtctttttgttcagttccgtctctttgccgtcttatctgcttctgtcctttatttttatttcactcagtgcgtcattagagacacaaacacacacgcatcatccttgtctattctcttctcttatcttcttctctactttaaaacaggattagtgctggttaattcttgatttgtgccacggtttagttgtttgtctttcagagtcggctttgtttaaagctgctttttcattaagttaaccaatgattacaaatagttaaacggatgtagttaatgcggtataaataatatttactgttgtagctttgaatgggtgagtggcgtggcagggtttggtgcccaataaattaataaacacgttttgtttccattcatccaaaaaatgggaccgtatatacagtggcatgttcattttgggtaacgagccgggtaatgcgataagggtcggaaatatataaaaagtactatcgaaacatacacgataatttatgagatgaaactttcagttcatatattgggttagttagtttctatacgtaaaatcattaccctcactcttattttcaaatttagaaaataagtacttgtggaaatttaaaaaagattcaaatttactaaatatgcgagtaggattttattttttcctattgttaatatatttttgcgctataataaacgaaattgtcctaattgtagatagtaaatttagcaaagaccattgcagcaatgtgtgcaaccttatgtagaactatttagtgatgcggtaagaagatgacaataaaaagaggtgtcaatagttggtggtacaaaacacaaacactagtgacagaaagagtattgtactgccatcattttgaaatttcaatattaatttttctaattaaactctttcaagtgaaactaataaccatgtgttgcatgaaaattcttttcaacgtccgttttcgtttctaaaacgcaggtataaactattttttttcctttatcctttaattaaactatttgatatttatgtttccgatttgtgttgtttcaaaaaaattcattaatttgtaagtataatataatatacatgttttcaaaatgtatacattttataattttagaaaaagtaattatttcccatgtccgaaatgtaaagcttctacgtatctgtttttgtttccctgcaacataggttgtgccatctcttaccaatcaaaactaatggaatcaccattttttttatgtcaaatcacaaatctgttttttattaatataaattattagcagtaaattttctcatttcaaaaattaataatagcagctgttaaaaataaataaaaatacattctacttttgtagaaataatagataattatttccttatatttatttttcgacattttttcgaacactaaataatttaaacataacatccaaagaaaagccatttggtattggctctgatgctttaccttgaagcattctacggtacagtgcataacatcctctaattaagcgcatttattggtactctaaatacacatctagactctagtcctgttcgtttccactattctattttcatactgtactgcattctcttttcccgtttgtagttataaaaaatatagagatcgtacacaagtctttttattaacagcttcgctgatttcccaccctgacccctgagaatccatagtgaatttagtgtttaggttcgattctgtttgaatattatctgtgaatcaatagatagtcgtaaaacacaatttgcttgcgaattcaatgaacacacaattcatatgagaactaccatttaattctttgtctgcaaacatcagggagagagagagagagagagagttaattaatggaaagcattcattcatattcatagttcaaaagactttccactgccctttggctacatattttcgttaagcatcatatatagcctacgacactacaaccctaacttaaacgaaacaagaattctctgtgtaaataaaaatgaaccacaccgtttaacaatggcttcctaacactgtaactgtctcctacggtacctgcacatagaaacagaccgcgacactattacttatttcttaattctgttttttaagggttttttctttctggcgagactacggctacgacgacgcttcttccgctttcgtatcttttccagcattttcttctccttcctcttcctcttcctccttcttccccttcatttttttcctcttcgcatcaattccctctggtgacttcttcaagaagctcaccaacggctctccatcagacatttcatcaacagctttttccccatcttcattgtcaccattttcttcatcagcggtattactcttaatcttttttgaggtgatcttcgatattgttatctctttctcatcatcagatgaattgttttcaccattatcagagttggagttgctcaatttcagggccttgggctcagcctcatcatcagatgtttcattctcctcttcatcttcatctttatcagccttagagttgttggtttttagaaccttgggctcatcttcatcagaagaattttcagcaacttcatcagcattggagttgcaggattttaacaccttaggcttcgcctcttcgctagaagtatcaatatcatcaccagcttcttcatcttcatcttggtcatcagtgtgtttcctcttggtcaactttgaagacatctttggttttttcgaggcctttgatgtctctttttgatccacattccccttgctccgaaacctttcactcatgcgtgatgccgctgctacaatcttcccaccaatatcacccattttgccatttttctcagtttcgggctttgaggccttcttctccacctctttggccttgctgtaaaaacaattggggtaattagattttcagaatcaaagcatcacaataatactgtgttgaactcgcacgtgagcgtggaagtgtgcatatatacgtttgtttatttaagaatgcatagtataacataaccaacctctttgatgaagaatctatcttctgtttctttttgggcatagcttcatccgtccttccttttaaagatgccttccctttccctttaggcctgtagagagtttagacaacaaagatcattcagaattacttactcctaaatctttagattcagggacacaatccacagccatgaatatatgtgtatctgacacactcatgttcgtaaatcatgactgttagtgatattaaaacaatcggtactatacgatacaacacacgatctaaatcataaccctagttaagtataaagagaaactcaaggttgcgatgtctaaaacaggtaggaagataagggcaaacttacggttctggagtgccttcagaactctcaccagcagattcctcctgtagggagatctggaaaaaaaagaatgctgaaccattaaaagctagtgatacacaggataaaatcgacaataaatgattaaacaaacactgtctaatatctacctcatcagattcagattcagcatcatcttcttcaatcaactcccatctctccttcttcagatccaaggtctctttatcaccatcttcatagaaaacctaataacaatgaagagtaactcattaaatgacacattatctaagcaacttaaattcctctgataaagtaaatcatccaccaaactcattcaattcagattagatatcaatagatcttaaaatccaagagataaaccctaattcattcatttaatgaatgtgcaattcaaaatccaatctagattcaagcagacccatagaaacaagtaacaagatacatgatatgaattacccgatgtttcttcttggaagagacataggaatccaccacacccttatagaatctgcaaaaccaagagatctgtaagattgaccacaagtaactgatagtaaaaaagccctaattttttcaataagattggaacactcacttgctgtccatcggccaccaaactcgtatccttgaacccaccaaggcttcaccatatttacgagcatcagaaacctagtaaagttcaatactttagagcaaattcgcatagaaaaactagtaattcaaaccaaagaagaagaagcgatagttgcaaaaccttatccttcccagaagaacgagttgaagaagaaacaagtctgttcttggctgatgaacgcttcctagaaccaaccatcttcgaaagcaatcaaaggaagaagaagaacaagaaggaatctgtgttttgtgtttgtgtttggtgtaagatatttttcttacagcgcagagagagatttataggaagagagcgaagaagaaagaagcggtgaaattgggggttttatttaggttaccaaggggtgtcatttgggggatttgagagatttctttcccctgaactaaccaacgacacgtgactttactagttaagaattacctctcacgtgtttgacgacgaccacatcttttctttgctttacttctattggtctcttccactcttctttttttcatctttttcttgttaaaggtcttctttttttttatctttagccagttgttatttacctattaatgttttctgccagtaattggaccttcaatatccagtgttatcaagttagaggaaaagatatttatcctagtatagtgctttacgatgactagatgatgatcctcaaattaatattagatcaccggagttggtccaaaataaaatgatagaaaatatggtcatattattatgaacgatatatcttcagatttacggtcttggtttttaatggttttctaataagattattttctctgaaacgtgatcaagaactaaatactcgtttttacgagtgaacttaacgtttagtaacttaacagctatgagccttcttatctttaagtgtatcttataatagatcatatcgaaatgttacctagagttcatgtagaatatgacatttgttttatcaagctgttcgaacatttgtaggaacgatctaaacatctctaaacaatccaaaacccataaaattaaacaaatatttggtactagatgatttacctaatctaaattatatgtgcacgtgatattaaagaatttatctacgttaaatacatgcaactgtttaaataattctttctaatttaagtaacaaaaatttcaattttagtttctattttcgtttttttcgattttgattttaaatatagaattctatttagattttagatgagcaagcaattacacggtgagacatatttttggagggtaacaattaagtaaattttgttatatatataagaacaattatgcagaaactttcatgtttggtatgtgttggattccagaagaaatttcctaaaaatggtcggatgatgaaaccaccatctaatatttcgtgacttgacattacttgtttattttttttaatttatagaaaaaggtacacaattatttgatataaaacaagctaatacattagtttatataaaaacgaattaattattacaaaacaatggattatgcttgagggtaagtgggaagcacgatgatgccttgactccgtaataataattagaattaaaattcctttatcccctttcttcctaatagttgtctttttttgtaaaaaaaaaaagaactttggtcctcgtttgagttggagaatcttttcatgtaataattttaagaagaaaaactgattacgctggtgaaacttgaaagtttttttctaaaataaataaatctaaaatgattctattcatgaacgaagatgattgtaacaagtgatgcatgtatctctatcaaacgtcttcccattcgttgtatgattgcattaatattggccacttgtaacttgtaaggtagaaatcccaaagtcaattctattataattaaaattactttgttttgtttaacaattatgctaacaaatccttcttaataacaagataacataaatctaaaatcctttttttgagttgaaaaaaaacaagataccatattttcaattaattggcagaactacataggaaacaaatccgaaattgaagagtttacatagaagaaaaaaaaacagaaataaaagagtttacctggaaaataatcaaatattatgttctttcaaattttcgacaaaaaaaaaaattgatattctttcaattttgtgagataatcagtacagaaattattaaaatgtgatataaaattgcgagacaatccgtaggaatattattaccaaatgatataaaactgagttaaaattgtaagaaaaagaagttttaaggttcttcaaatcatctagctgactagctccatagcaaaaataaataattttgattgtttattagcacaatctgtttcttaaccatataaatttagacttgtacaaaaatcaaaatgcagtttagtttatacaacttttcctataactataaagttcgatcgtcataataaggtataacaatttaactctagtaccaaatgctataaaatacataaaatttaagaataatggaggtaggtctacaaagcaaaagaaaaaaaaaagatcatggaagttacaaacgaacggaatttccgtgatacacataaataaaaattggtcatcatatcacacaattcgcatcattaaaataattagaaaacggacaatacggataaaataattggtaactggccaaaacgtaatgattgatgtaagaagacgcacggcaaaacgtcgtcgtataagcttttcatcgtcaaacaaaacggcttcgtttcaaggctcacacttgtctttatttatcacttcatcttctccaaagccataccacttgaaacctctctctctggttgacccgataatttctctctcgcagacgcacagatctctcttcgaatctgctagatctgttccttttcttacatctgtattgcgaaacctctggtaatttcatactttcatgtctctccgtttcatttcgattttcgtttcacagctagggtttgctttttgttacatcgatttctgattttcctggtgttgttgcctcttcctcagatcggaaggtttcgtttacagatctaccgatacgagtttcgcagtatttccgagttccgacgtatgctttgttttcagatctgggtttgttgtatatctagaaatggcggagactttgaaagaagattcgattatgattcgagaggtttgggattacaatttggttgaagaattcgcgttgatccgtgagattgttgacaaattcagctatatcgctatggatactgagtttccaggtgtggttttgaagcctgttgctactttcaagtacaataacgatcttaactacaggactctcaaggaaaatgtcgatttgttgaaattgattcaagttgggttaactttttctgatgagaatgggaatcttccgacttgtgggacggataagttctgcatctggcaattcaatttccgtgagttcaacatcggtgaggatatctacgcgagtgagtctattgagctgttgcgtcagtgtgggattgatttcaagaagaacattgagaaaggtattgatgtggttaggtttggtgagcttatgatgtcgtctgggattgttttgaacgatgctatctcgtgggttacgttccatggtggatatgatttcgggtatttggttaagttgttgacttgtaaggaattgcctctcaagcaagctgatttcttcaagcttctgtatgtgtatttccctacggtttacgatatcaagcacttgatgacgttctgcaacggactgtttggtggattgaacagacttgcggagcttatgggagtggagagagttgggatttgtcatcaagctgggtcggatagcttgctcaccttagggtcgtttaggaagctcaaggaacgttatttcccgggatcaactgagaaatacactggagtcttgtatggtctaggtgtggaagatggtactactactactgttgctaattaagaagaaaggaatgaaagatactttgaaaattccagggaagtgcgattagatatatttctttagtctttgtgagtgtgagaagaccaaaatagaatcgtcgttgtgtaaattggcaaattggtgttagtaagtgacttgttgtgtctttgttgctttgttttcaggaaaaccccttgtgatcaaaatttgaggggtttttgttttagcttgagtttctgaatgtatatcaattcagctacccgtttatttaataaataatctccaattttaatttttcttctcttttctttttgtgtgtgttttcttcttactagtgaccaatgtaacttgacagtggcttcttgtagtagcgtttgcatgtctcagcttgcagttactgtgtaattctttgtaaccataccagtttgaagatgcaaactggtaagttttatgcttaagagaatgttgaatcttcctgtgttcttctttccctcttcgttgatacaagttgataaggagaacaatgaactgcttatgctagaggttatatgtgttacattgtttaaaaaacagagctatggtaatcgattgatgtatagatttgttatttaggtgtttatgatgtaagtggtatcatgtcatggttaatgtggaggagaatcacatatgtatgctgttgcattcgccaatcacctcaatagccaatttattatcatattgtcaatgagtagcattctaatgcaatcaatgttttgttgggcaagtattcagacgtcatctgagtcgcaagtggtacagaagattacgagatttgactgattgagacgtcgtagctcattcaattgccgaagaaaaaaaaaaaagtatcagcctgttggaagtattatgtcaaaatgtggatttgtgtatgaactcagtttccatcaagataattaaatctaagtttctcaaaaccttaaatatttcattacacgaacttgtttgatgatcgaaaacatatgatccaatagcaacacgacacgagaaataaagtaaaaagaagaaaacaacagcaatacggcaaaagtccgagtcactattatgtaggtgtggcagagaatcaaatctacttcttattacagaagaaacagtgtacttgctagtcctgtctttaacggcttctctgagtctcttcacgtgtgtttgtgtgttgggaattgggattctgatttgggcctttgttgtgtgggctttgatcagaggtgggagaacgtttttaccaaggttgaattgggattctgatttgggcatgtttgttgttttagggtttagttattatcaaatgaccactattggctattgctttgctttaggtaaccaaaaaaacgttacatatttaaataaaaatgtgtaacacagtgcggacgaaatagcatcaaaattatttatatacatatcagatatgaattgagttaattagtgtctaattattatcttgtggctgccatatgtcttttttgaacttgttctcgttgaggaaaatttggtatgcctaaacatagtatgtttatcaatttggttgagaccagcaaaatatcagtgccaaccctaattataacgattactcatcaacttatgatatacatatccttgtgaatccaaaagaagctgtcaagcacccacttttattttattagtttttttttctgttgatgtatagtacttgattgcggaaaaaatggtaagtaactaagtatgattagggctatttgttattttattcttcaaaaatgaagagtaaggttcagatgtagttttgaaatatactttttgcctaattttggatgagacagacaaatctaatcaaaaagattcagctgatttgtgattactggtaacacaaatagtgtttatatttgtaatcatccatgtgggggtggtttctcctgcaccacttgtctcagttccccttacgcaatcatgtttcttgtttttaaatgctaatgtgatacctatacagtcttaagttattataaagttcatattagtgtacatgtaagagacttataaaataatttgtagtcaatcaaatttttaattgatactaacaattgatccaccgaatcagctttcacaatttctttaattgtagatcgtttgtaacattggacccacgaattatatataggtcgcattcgacaaaatactcaacatacttaaactagttgtcctaacaattagttctttggattttacttgcctatttttatattttccggcttccaccacatattaatttatgctaaagttttcgagaaatcaaatactgaagattcgtatcccgagcaagcatagatgagacgctttgtcgtttcactttgttttcccacccaaaccagaacaaaatttattggccttcgaatatttcggaaaaaacaaacaatattcatttaatggacttgtgaaagaagggtgatattaatctttaatcatgtcacttaattgatatgataaatattcaagtgaatcatgtaaagtggaaatcactgtgaagtagaatgtgtcctaagggagtttcgtacctttcaaccataaaatccggcaaactattaaggattccaatggatataaagatgaaggagagtgtgaatgtgaagcaaacttcaaaaggaagaagtgaaaagaggacaaaagagagttaaacagtggaaagctaaaaggaaacagagatgaccactttcatctcgaagtttcaaaagtacacaaaaacatcaaacatacctgaatagtttcacttggtccactctctccttatctctctctcttgtcattgagcatccttttcaatttcattgtcacttgttgtcatcttcatctactccgtgaatattacaacaagttgtcgtttcatccaaacaaataaaaccggtcccagtttcagaagatcttttgaactgccaagctttcttttgtcttgttcccccctccaaatccttttttcctcatacaaaagagtctataaagtctccattagtttagaactagtgactactactgtacatattctatgtaagatttgtaggttgggctaaggtgggtttagtaatttccttacacatatccgcggctgcatacaaaactataccaaatgaagacgagttggggcctattagaatctgtccacagaaaaacaatgaatccatcaatcagagtggatttagcaagcaaatatcaagcatagttcaaaagttcatgaactcaccaggagtccaagacaaaaagtaaatattcattgggatggctttcttgaattaagcccaactctacatgtcattggcatcaacctgggtataagaaaaagaaatgacatgtatacttgtttgttgaagaacttttaagcacataaaggcaatagactgagagaacaggaaaaaaaaagttaaagaagattatgcatgatagggaatagagattggtgtattgaaggagaaagcagcccaaaaaaaggttgatgtgaagtgaaagttgctcctacaaagggataaacacaggtattaattggtggagttccaatcagcttcaagtgttttgttgtgtctttgtgtgtgtgtgtgtgtggtgtgtcagcaaacaagacctacccatctctctttctctatctctctcatcttcttactacttttctccacttattacaaactccaaaagcatttgtactgagtctatactttccttatatagcatcaacttctgctcccacttctgtgaaaaaactagacttttatgcttctttttttcttaggctatatagctattaatccataaggtgagagagagagacaattgaagtgaacaaaaccatcacctggaaaattatataccctctttgcccctcatggattcttccagcggaaaaccaagatcatctgattcctcatgcatcatttctgcatccaccagtcttcaattttcagattccccaaagctgagcctagaaaattacaacatagacacagtagcagcacaagaagaagatgatcatgaccaaaaagaaggagtggaaggtataaagcttgaccttatgctagcaggatatgattctagtcaaccacagctcaatcaagaactcaatctcctcgactgcttagagacaggtgtagtcactccgagttttaacgggtcaacttccactgaacagaagctcttctcatgcaactactgtcaaagaacattctacagctcacaggcgcttggtggtcaccaaaacgcccacaaaagagaaaggactttggcaaagcgagggcaacggatggcatctgccgcagctttcgggcatccatatggttttgctccggtcccgttccatggacagtacagcaacagaaccttgggtattcaggcacactcaatgagtcataagccaagttcatataacgtttacggtggtgagtatggtcagatcaactggtcaaggataccactagttcagcaaccagcaatagcaaaactaacttcaacagagaatcattataatcatcatcagatgatgattgctccaccgttgacttccacatgtgaaaacatcggtaggttcgatgtaggaaggattccagtagagtttccaacttctgaactatggcagagaggcgaggaattgttgaagccagctgaagaagagaagcagaagaaccttgacttgtcccttaaactttgagagtcttttcttttcatttttttgggttttgctctgaaattgttttcctcgagccaagcctttcctcaagctttcttttctttgtgctggttttttgttgtcattgatgtctacaccagtattattaaagggttagtaatcttgtgagtatattttctaccatagatttatgatgtacaactttcacacttctacaagtttgaggttttaaggtagacatcaatggatttctgtatacacccaacaaccataaaagagatagtgaagttcctagaaacgaagtgaaactttttagtgtatgaaagaaagagattatcttgagatatatgggaagatttgttgtcatggaaaccagaaaaaagacttattgtaaagtcagagttgcgaaacctaaaagtaagaaaaacattcttttattgaaaagtagttaagaagacacacaaagaaagcaaaacaaatataaaataagaacttgttagttgtgatgatgacaagaaacaaagagtccagaagaaaaaacataattaatacatcatatgatcctaataatgcagctaataacaaatcatgaaataatcaagaatccaatgaaatctttgtgagacccgaaatttgtgtacactagacaaagagtgactagtctttggcctttagaatgaatctatatgcactacctaaatatacataaatagaatgtacaaacaaccatgtgcgtatgatgcacaaaaggtgggacaagagtcaagacttataagactaagacacaaatttaaaaggacttcacataattctaatggacttgactccaactctacacatcttgagatgacaaacatcaaaactgtttcatgagctttcacagagaacgaagtttcagtgtttcaaatatttaagaaaacacatgattgtgaacaggtttatgaatactagcaggcaaagatattatggccaacctgaatttaccattgtgctctatcactaaagggcaacatagaagccaaaataactcatagattgataaagaaatataaatatttgacacagttacactcaacaccaaacgttggacaataccaaatgttggcatatgaatctgaatatacagattatcaaactcctcacctagaatcaaagtagaagtatgtacactttcttcccagtaaacatataaggcacaagacagatcatcatgtttgttttcagatacaaaattggccacaagcaaccaaaaaaggaatgaaaacacaccttaatgaataaaacaaagaagaaacaccaaggcagacaataacacatgtggaataaaaatctaatgaacccaaacctcattgattagctcttgggtccatttttcatctacttgtatgtataccacaattctgaccccatcaatactcttcaatctcagtcacactttcctgaaacacacagcaagaaaaaaacgatattgatggatcagtatcaggttgctaccaaattacatccacatgtcagcagattaatagaattaatcaatgcaagtgaaaacgtatcctttatgatgcactgttttctcctacaacgcaatgaccataagaaaaaagacatcttttcattgcaatgagaaattttacagtgttctcttattttgcaattgacaccattgctaaacgatacgaatatttaaagctaaagttaagtaaagcatttttcatttgctcggagattcaagcattttgataatccgattaattctacggcaaacacttaaaaagctgaaccaacaatcaacttgaattcgcaatgattggcacagtaaaatttcaatgaaattaagaaatacattggacttgtgaacagaaaccaggcattattaaagaaacgcccaccttcaatacacgtagaagacggagcagtaccggaatttcgccggcgctgacgtgaggactccgagtttttcgaacatgaccaagttaacgaaaatgtaatctacaattttaaaaggcccaataactggcccatataaataaatttaaaacaaaatgtagcccatattgtctccaagtaatttgttttgttaaaacagaaaaacgcttttttatgtctctttcttatctgtttttcagaccaaagttacgaagctcatattgacatcgacaagccttttaaattcaaaaaaagagaagagcataattctgaattttgcggcaacatttaaactttatcgcaagttggttttatccaatcgttcatacacactatccaatcaaattcatatgcatcttcgtatcaaaattgtcagttttttctgggttatgtgcaacttgtgaatgaattttgcaaagaaatcaacaagaaccaataacggaaaggaaagatttcataactgtttgcttaaaagagctgtaagttcaacaattaacaccatgtacttggtaagcaaataaaagagcgataggaaacaagaatccagaatactaatacatcatcgtaaaaatctaaacttgaattaggtaaataaaagcttaagcacgttctccacgaattcttctagccaattgaatgtccttaggcatgatcgtaaccctcttggcgtgaatagcgcagagattagtatcctcgaaaagtccaactaggtatgcctcagccgcctcttgaagagctaacaccgcgtgactctgaaacctcagatccgtctgcaaaatttaacctaattagtatacctaattccataacataacctaattgataagttttaatccgccgctaatgagtataaattttaccttgaagtcctgagctatttcccgaacgagacgctggaagggaagcttgcggatcaacaattcagtactcttctggtacttacgaatctcacgaagagcgacggttcctggacggtaacggtgaggcttcttgactcctccggtggttggtgctgatttcctcgccgcctgtattgaagaattcgttagagacgcaatcgaatactcaaattagataaaccctagatccccttccaaccaatttcatcataaacaaaatcaaaaccgcaagattcatactaaattagatcataaactaaaaattcaacacaatatagaaaacctagatcatatttttcagatttcgtccacaaaaactcgttattcaacccaaatttgaaccctagatctactatttcggtatgaatgaaagatagaaggacaaaccttggtggcaagctgcttcctgggagctttacctccggtggatttcctagcggtttgcttggtacgagccattgtttcttccaaaagatgtgacttttcgataagcttgatagagaagcttttgatttgattatcaggaagcgagttttgttttcttgatgattgtgtgggaatagtaaaaggtgattatgattatataggtgaatgttttagtcggttaatattaggaaatacagaagtggtccaatcttcacattttcgacggtcaagattcgacttatgagagcgaatactgacgttggcgatctgcgtcctcgcttctgattggtttaatcttgggaggatcgatgacgtggctagttttgtgtttcttttctacgtttgtcgtttgaagtaatcacgattttagttgggttagaaaaaaggtaatgacgatttgatctacatgtttggtaattagcgatgatgggccgagtcgtatcccttggtaggagtactgcgttgggttcaggcccaactgataaggcattgagagttcgtcagctgtgttctgaatatcgatccgaaccaaatttggtacggccgctccgatccgagatttcaagttggttgggttaaaaccatcacatatatgacatggacatggttgaattataagtttataacctcatcataattaaaattcggtttggtattagaacatgaaaacattccagcccaactcttaactaaaatccgatcgaccaaaaagttgctcatgcatgatatcgtgttgagttaaatctattcttaattggcttttataacgtgaaaatgcaagtttttaacagaacatatgttttcctgctccacatgtatcatagatctttacaaaaggtttcttttaaaaagaattggagtgtaagtgtggaacgttaacgaattcacgtactatacaaaagttgtacggaaaaagctatatatatttaatacccaacattattcaagtttatcacttctgcttatggccattgaagcctaaatttgaatgcacaaaatacagttttaagttttacgtgttttaaaataagaattaagaacgacataaagtaatttaatctctctgatgaaatgtaattaggtaacaaagtttttctcttttcctaagggggtgagcaaattctagtacagacctataataatctgtctagttaatattatgtgtatatttactagatggatattgttggttcagaaaaaggcattacacaaaagatagtaatcgatgagatagttgagtattttgtaagaacaagagttagtgattgatcccaattaaacctcacagtttcagtcactacgtatgaacatggtgcaagagggcggaaacagactgcccgatgccgattcattaaatggattcgatctctagtactttttatattagtttaccaaaatatatacttaaaagaattcacaggacataacaattatactgtaaactcattgctgcatagcagcattaatgaaaatatatatgcttaagaagagaaaatcaaacgagaagatccttagaactcaacaagtaagtgttagtaagtaacccatggccatggggaatgtatccaagcttccacatgcacttggattgacccaagtttatttgttttaatacatactatattttattacctttgcatttaattcatatttcctttgatatattaacttgactgcaatatacaaaaacgatgtaaattgatattaagcaaatattataaccaaatcacgtcacatgcagactatgtgatatgtaggatggataagtggtcgaggtttggaactttggattattgatcaaccattgtttttgatatttgtctggatcactcccacactttattttaaggtgagagtggataattgttttttttagttactggaatattgtgggttctatgtaattggccatattttatcccataaaaatgtacgagttaagtataatttgagagacgatcagattcaagtctattgagagacaatcatcaagtttatattttctccaaacattaaacgagaaatattttgggttctttgttggagatgaaacgttagcgcacatggcggcgtggacacattcgtaaactacaaaaactagtgttttggtacgccgcattacattattgttcgtctcttataatatacttttgttttgatagcaataaacttacttatttgtaaaaaataaattaaactgatttgcctctggtgacaaaatctttaaaacagacgattatgttttgactatatagtataaaattaaaattacatttgtttaagtacatttcctccaattcctgctacgcatgcatgtggtgggtttcatttattttattaactaaccagaaacctcacacttccgtgcgctgaaattatactaatcttataatgatataatttagtattcattcaaaatttgtatattaactttttctcgaacattttttttttgtgtttagtttgaagaattgaaaactttgacccaagagcggcggttgtagctagccactccttcgcatgtacgaccacgaactaactgataacacttttttacatcttgaaagttgaaacattaaacatttatatctttaaattaaattgtatatacaaatatttgtttgcgatcttttgttcgacgtgatatgtccggcttatatgaagttcccaattatggaatcgtttagggcttttaaatttgacgtcgcctcctataaacccaatgttttgctgctcaatatgagatctgcaggaatagaaacttgcatattttggtacgagaaatagctacacataatttaaagatataagactttgatatcatataatgaataataaagagaggaatgcctcttttatgtgtctctaaatcccaatgtggtgttaaagtatttccaatgactgctctttttgtccaacactctttagtttacattagcacatgctattattttcctaccacatactacaaattacttctccttttttcaatacgtgacaacttttttctaaccattataagtttattacattactaatcattgacaatttcattcaattatttctaagcaaattcttttgtctctaatgactgccagtttatcatgtttttccatgatagtctctcattagcatattataaaaaacctacctacgattttatattaaccaataatcaaccactaaatttcacatgtcgaatccatcataaatcagacatatccaatgcatcaagaagaaaaaaacacacaagatctttaatgtttcctcatctaagaatcgtatctaatatctctgttaacataataattaaaactaatctcccgaataaaattaatctaattcataatcacacactattcctgtttcatccgtcgcaagaagccaaaagtaagaaccaatgtggtaatctcgtaattatcacaaaatcctaagggcattatgttactctctttactatatatacctcccccctcccaaaaactctctacctcacattttctctgtttctcacactttctcgtctaacgaaataccaacacgttaaagcttctgtaatcggaaaaaatggctggaggtatcggaaaatgtagcaagatccgacacattgtgaagctaaggcaaatgcttcggcaatggcgtaacaaggcgcgaatgtcgtctgtcagacgatctgtgccgtcagatgtaccgtcaggacacgtggcggtttacgttgggagaagttgcaggagattcgtggtgcttgcgacgtatctgaaccaccccattcttatgaatctcttggttaaggctgaagaggagttcggttttgctaaccagggaccgttggttatcccgtgtgaagaatcggttttcgaggaatcgattcggtttataactcggtcaagtcggtttacttgtaccgatgatttaaagaagaatcgccacggtggtattaggagcaagctggatctattgatggaatctcggccgttgcttcacggcgtctccgagaaggctatcatctggtgaccggagagacaatcgtcatttaattccgacccggtttgattcggtacaaatttactcgtaattgcagagttttgaataatcggctgattcaatcgggttcgggttagtaattcgagtacacggtgggggatacgcaggagatggccgtgaaatgtgggatgattcgttccacctgagtcgtcccgagttcgaatccacaatttccattaaatttatttatttattgtattttctcataaaattcatttaattattttattttatgttcctttggatcaaaattatttttctgattgactacgtttgtagcctagcatttgtgttgtagtcaccatccgaacacaaaacaacaaaagagagatttatttctgaaacacttatgacttatcttcatcatcaatacacacaaatcgttaatattaatgtttatcgctgcgtgacctatcaaggtttagttttaaacccatataatacaagtggtcaaaatttgttgttagtatgttactaccgtcctcaaatttgggtttcgcaagcaacttatgacgaacccaaagccaagccacctaaacttcaaaaacaccctaacctaaatgggcttagtccagaggatatgattggtttttggacttaaatatatagacccttaactctaactttttgcaggatacagctgaaccggacttccaagatttggtcagaattgacatgtctgtttagtagcaactagaattgaggatttatgtgaatcaagtaattcggcgtatggacaatctagcccaaagataactcgtgtcatctgacaatctatctcaggaaatgaaatctggactagaaatacactgggccaagatgtgccggcccatctttactgccaactattctgaaaaaaaatgacaaatcaaaatatctagaaatttaagtccgtagattatgtcgatctggaattgtctgcgtatctaaaagcgcataaaaatcagtaactaaacatgtccttattttacattctctgcaacttgtagttctagttacaaacgaatgatgaagtaaagtggttagtaacgtaaattcgtaatcagagtagggaaaattagaggcaaaaggagaagaatagggagacagtgggacccactgttcacatgttaaaatggcactttgtcggaaaacatgaaatatttcccaaaaggtgccctctctcttttccctatcttaagcatcacctcacgccacactgcaaatgataaatcgcatatttcactattacccccttaacgttttattttattaaattacacactcttacatgctacagagatgacagaaatctcggattccttgtgtatgttttcccataacgttacaaaaatatacatctcattatgagtggaaccgttataaagtatttaaaagggaccaccaaaaaaagaaagaaaaataataggaccaaactctaataatagtctaaagatcgtactaaatccaaagcttaataaggactaaattatccaaagccaccgagagtcaacatttgacaactaatcttctcaactaatacaacaagacaccgccatcaaataccaaccatttcctacataatattgtactaagaatttcttttaagttttaactaacgatagaatcatactggaaattagtcaccagagatattacgaaaattgaaatctttgtaaaaaaaaatttactccaatatttttatatcttctcgtccgtacgtgatttcagagggaaaattaatataaaaaagaaagaagaacatattaaaaaaaaaaaattaaccgaaaacagtaacttcttatttccctcgaaaaagaatattttcacttaatccaagcgtaaaccagtaatgagaatccaagaccattgccggaaccggaaccagaacaacctcctccgccgtactccgcctcatcagcactactagcccattccataaccgacgagctacacgccgaagaagccgacgacatcgaaatcgaagacgacgaagaacttctcttactcttaacaaatctcttcctcatcttcctccactcaacaatccctttaatcccaaaactatttccacattgcttcttcggcttccataaaacgataccgtttcgatttttctcatcttcttcttctttcctcttcgtttcacaaacctcctctgcttctggatcactctcgaatctaaacataaacacggcgtgtcctcctcctcctccgccgtcaccggaacttttactctgaaacaaccaattgtatacatcccaagagatctgaacatgaactccatcgatttcaactttctcatttcctctaaatttccatctaagtctcttgatctgcagaacctgtttcgaatcaacgctaaaacagagcttagcgtcttcatcaacacgacaatcaatagaaatctctctgttcttccctccaaatctcgctttcgttgtgaaaaccctagctccaaacacgtgctctttcctcaacagaagagcttgcggattcgtcggaggtttcgccgatttagcacgagcgtaagcttctttgactgaatctccgactaatagtcccatctctccgtcaacaactacagcgatgtagaatccggatctaggttcggatccagagtcgaatttggctttgcttaagtcccagaagacttggattttgggagaaacgaatctggatccacgttttttccagaaagctaatgtgtttaagttgagatggaaagagacggcggaggaaagagagagatcagcggaggagaaagagagtggcgaagagtggttgtagtaatcttgtgaatggaggaagagattcacagagtggcctcctaagaaagttcgggaccatgttagatagaagacgccgtgatctgtttggtagagacatgttgtgagattcggatcaccggaagatagaggggacggtgattgcgacggcggttgcggtggaggatgattgtgatcggcggttgggcggagccaagacggagacattttcgtgtttacttttttttttcaagttggggaagaagaagaagaaagaaagaataaaagagagagattttcgggagttttgtatttgggaggtttttattatttggttaaagagggatttgtatatttatataaaaagattgttaaattttcagaaaatggaaaggttataataatgattggctcgaatcatacgtaaaacaagaatgtggatgaggattgatagcgatatgagattataattatgcgaaaattttgatcttgtgggcttgcaacttgtaaacttgggcataaaatctgactttttcaacttgactttcttcttatatatggaggatggatttaaacaagaactattcacattaggttgaatattacgagatattcagggttaacagtaaaaaggcgttattaactgttcgagtatgaggaacacgttatgattaacaagcctgcacacttgaaggtttattggagaacataatcaattggtataagttgggtcaattatttcacattatacaaccttttttttttgtcacattatataatggatttagaattaatacacacccattaattacatttatagtaacacatgtaggaatagttttagcttttgacatacccattgatagtctacatgtagtaataaaaattacatttatagtaacacacaccaactatttgttattttaacgcctaatggacagttaaaaaacaaaaatactataattagtgtgaattataatctgatactataattagtgtgacaattgaaaaatgtatccccctgtgctgcctgaaaaaaaagacaaattaatagtaattggttcggtcgaattaatatgatttgaacttttcggtttatttaattatgttttcataagttatattttattgatttcttgagttattcggatacgttggcagacagctaaaaggaggtggataagtacttattgagtcatatccgtattattaattaatttgatatttttgttagatctgtattttcttatactataaatcaaggtgggttttgaatctttaatcgaaagaaattaaaactgtaagacaggtaaactgttttttcattatttatatagttagctacgtgtataacaacccattcaaaatttataagctatggtttatacaccaaacatttaacttattcgaacatgtattatgatataatattcttaaacacttaagtaatcacaagtttaagtttagcaagttcccaatttatcattttaacattgtttaactttttttgccgttaaaatttgggtgaaaataattttgttagccatgagtaaattgtgaattcaattggcaattatcgttttaataagactaaaatattatttttgacggtaaaaaagaagacagtaaaaataattctttcccgatctaaaatcagcataattttgaacttaataaaaaaatcatattactaaaacaatgttctcccgagtaagttggtatagctaatgcaaaaagagtccttgttgtctcatcccatgccataatctttggatcatatccacatgttttttgattgtacaagtgagatctttgatagcaataaacaatttcatgtaataattacacttacttgtagctagcaatatggtttgcttcaaaattactctgtctcctatcttttcgagtactttcaaatcaaaggaggatatttgtttcatttattgacaaaaactcgtacttccaaacttagtctggacaatactttaacaagaagaaagaaagtatatatatatatagaacataaagttatctaaagttaattttgaagaaatggtggttaagagagtatgtatacttgattttgtttaatgaaattataagaaaaacgaaacgattttgagagcaatggttgactgaattttctcatgtggaagactaagaccaggtcagattgaaacgacaacacgcttttagtaattcaacttaataacccctcctctctcgagtctcgtcgaccttcattttcttatactgtctgtccacttcttagattctcttttcaacttttcaaatacctttcttttctttgagcacctacttcaacttcattaatatcttttgactaaacggcagttttttttatataattgatttggtgaaactgtgtgtatgattggtataatcttctaccagaatgacaataatttggccgctcacaaaaatcctattaagaaggtaaccaaaaagtagaaatataggctgtgtgtaaaagaaagaaaaaaaactgtgtagagataaattctacatgctactgctaaagatttaattgtttttttacaacctctgatttcatatcttggtactaatagctgttttactttaggagaaatagtaatttatgtatttaccagttaatcatcagatccgagaaccttgtaatgggcaaataaattgtgaagataattataaggacacaacaaatatatgttaatacaaacaatgttgttccatgtgggggttttcactaacttgtgaaaaactttgaatttatttgtatttcagaaaagtgtatattatatgacgaaaaaaaataaagtatatattatatatgcattttgaaaatatatggttaataatgaattcatcggcggaatattagctgctacgaagtaattgagatctcgaaatatatatatatgattggtgggaaagagcaggttcatgtctccaagttcattattttaacgaaataatattacgtacaaaatttgctggagatgaggagctaggtaccaaattaaatcttataaacaatggctctagagttgtcactcttacgtttgcatgtgtattgtttgatactaatcttttgacaatccaacttgatattcttattttgattattaagcccaattgaactgagtctaatgactaatgagtattacctatatagaagctcatgattgatttaattttagttggttgttctaagccttttcttgtgtaagtggaactcaaaccacgtgttcataggtttcacttgtgtatgcactcctgaaaggaggattagactagtagtcttccgtacgcagttctacttctgccattgccactgctacactggctgtcgtttcttctagcggacatagctcccagttcgaactcattcactcgttttttggtttatgttcaaactttctaggtacataatcttaaattttgatccacattcgaatagacacattagacaaggtcgttctcgagtaattcctattttttttccggttcgctaacactttgttctgggtttaaccataccggtttttatttgaaacgaattctattaattgtggtttaagttccggttcggtttcgaaagcactaggagaaactaaaatccctaaattttcatcgttccctctgcttctccgacggctcgataccttctcctctggtcgacgactcaaaaatcgccggttatagttttttcttccgaccgttttctagtttcgtcattttccgtgttatttaacaagtatgtttacgttgagcttcattctctattacgatgtcttacctcgtagagactttacctagattaatcggggcatatcgagcttgatgtgatgttttaggttagtagaatcgagcttagatacatcaaatttgagcagagtctctaatactcgtgttttaggtagaaaaagatgaattttgttctttgttatgtacattagcttaaacccttgttaaaacacagttaagaacttgttggttgtttataaaatggtcttttattgaactcttttacatgatttctctcagagaaagataaggtgtggctgcaatgtctgaagcagaaaataaattgcctttcataccagaggaatggtcaaatgcagcaagttctgtttcctgcagttcgttgcaaccggttatagctttggtctgtggccctaaaaacagtggcaaaagcacattttcacgcaatcttgttgaagttcttctccaaaggttattactttccgttagcctctctttattgttcccggtcttttaatgagtgttcgtgagtctgattattggggaaaactgtcttttttttttttttttttttttccgatcaggggaaaactgtcttgaccttctacttcttataatttgaatggaaccagatttagtttgaatggatgcaattttcttaagtggcttatgatggttgctttgtttcgataagttttgctgacaattgacctttgtggttcttacagatacaaaagggttgcttatttggatactgatgttggccagcctgaatttactgcacctggtttcctttctctcacaattgttgataaatcaattctaggtaaccctcatacttattgctttcacgattcttgttgtttgcattccgaaaacttgttttcataatgctgtttcagtcacttatgtttctggttatattttctactttgtagaatcggattggacagttccatgtgtaaagacaccagagaggttagtttggatcaagcaaattttgtgatgttaagaatttaagcgacttattcccctttctcttttgtttgatgattcagatgcttcttctatggtgatgtttcttcaaagagggatccaaaggcatatttaagatatgtatataccttattcgattactatcagctacacttctgcaagtctagcgagaacaaaactgaattgccgcttgtcattaatacaccaggatgggttaaaggtaactcactctctttatcctttcaaaacaaaaggaacagattttttctttcactaatagaaatgattcacaacctttaggaattggctatgagttattggtggacgtgctgagatatgtttccccttcccacgttgtgaaaattaacatctctgcttacaacaagaacctaccagctgggttgttctggttagacggtaatgatgatgagacagctcatttgatagagatccaatctgcttaccaagacagatataatcaatcgtaagtcctgtacaatgctagttatcgaataatctcaccgatacgctttgttcgagtagttacaagtttttgtatcctgtttgtacagcattttaatacataaggatgctcgtttgatgagggacatgcgtataatcgcctactttaggcaatgctttaaaggaaaagaagtaaacacgatcaaagaactaacacatgaactcgcttcccatattccttatgaagttccaatatcgagtttaacaatcaaccatctccattgtcaggtaaaaagaaaacagtataaaggtcatatctttctaatccatatgattgatgatgccaataatggggttctcttctttttagatcccaagttctgaagtgtattatagtttgaatgcttccattgttggtttgggcattagcaccgaggtgtttgaggatttgccatcatgcgtaggtcttggtaagtttctatttatccattgcaatcagtgatcgaacatgggtttatgattatgtattgaagttggttttggatgttgaatgtaggaatcgtgaggggtattgacacagagagaggaatattatatgtgatcactccagtaccagaaaacttagttgagaaagttgatcttctattgcaaggctatattcagttacctacttgcctcttagaggtgaaggattacaggtcgccatatttatctgccaacgtcttagcttccacctgatttcttttaagacatttttgctcagttcttcgtttttactatgtgtcagtttatctacaaagtttcatgtttttttatagttcaacttactatgcaaccagggttagatcatcttggagacgcagttagttatgtgtcttgtccacacctactactaatgtcaccatttacaacttataataattttcatttgttttcgtaaatagaaatcacatgagaaaagagttcatcaacagtgcgcaagtaagcatttcaaaaggatactgtaatgttccggttacaacttctaacccaatatacacatcaaaaccacctaccggtcaatattaaaccgaatttctataaaaaaaaacaccggttttctatggtgtttaacagtgatccattgaagcacatttgatggtttttaaggttccaccaagttccattggaaccaaaggtataagagaatgcaagacgtctgtaatcaacggtctataactcggttctggctgcacgcacaaaatcgccactgccgctacctacacattcacatgctcgcatcaaaactcttgatactatctcatcaaaaccaactatatactttgcacaatcaactaaatccttctcaaacgtacctggtaaaggtgtttcaagtccatcgtatctttaatcgcaggatctatgacgcttggtaacttggttctatcagtgagataaggcattgcctgagaagaataaaaaaacacaattcaaagttggttccaagtctaagagttttagagaaacataagtatgagtttattatatatgtacccaagtgatgatggattggcattcaccgggagctagtttctccacaggttttttcccgagtaaaagctctaataacactactccaaaagcatacacgtcgctcttttctgtcaattggcctatagaaccaaacacatgcagtatggtgatgagtaagaaatgcttctcataaaaacacaacaagtttctttaaggatgatttttttttaaagtaagacttgacagattgttatttcagggtgttaccgttgagaagatactctggtgcaacgtagccaactgtcccggaaagtttatggttcttgttctttggcccatcaacaacagctagaccaaaatctgaaatctacatttcatagaaagctagagctttagacaaaaaaaacaaaggaatatgatattgaaacattatgactttaatcactgatttgtttaccttagcattgaaattgctatctaataagatgttggatgatttcaagtccctgtgaatgattgctggatgacaatgttcatgcaaatattctaatcccctaatttgaaacaaacacaaaaatagtagttgttttagtcctctagattgtgaattattgcaagttgaaacacgaaaaagtcacaggctcaccttgttacatcaagagcaatcttcatcctcataggccatgtgatcgccgaaccctgagaagatcctgagaacaagtagttgaacaaaaagtttcagtttctctcatgttcacaacttttacaagaatatgtaaataggtttatgtaccgtgtaaatgagattccagagaaacgtttggcatcagctcatagacaatgaatctcgcagtatcattcgtgctataacccaaaagggatattatattcgggtgctggagcttactcaatatctcaacctcactctgcaaaccccagagaatataacaaactcaggaagatgaaaacatggaagagttatcataaaaagaaagattggtatagcaccttaaattcctttgctgcatcttcattggcacagtctagcttcttaaccgcagctgaaatgttgttctctaatgtggcagaatatacacatccaaatccaccttgacccaaaatgttactctccttgaaaccactagttccttcttctagtatattgtaatcgatcaatgacactgttccctgctttgtagttctcttgtctaatgtttttgagcgactaaaccgattcaagaatgtgattccactacacccacaaccttcaaaacccaaattgacacattgagagtcactttctcagctttatcgaattcatcatgaatttcaagattaaggccataaaaacgtgaaaacgagatgtgactaagagaatttacctgagctcttgaggtttcttctcctatggcaaaaccaataaagcagagagcaaagtaagattataccaactaaggaaaatgtagctgctagtgaaataaccagtctcatgttgttactctcttgtttatgcaattccttctctctctgttgataatctgaacaatcaaccaaaagcattagcttttcctatcgtttcaggttcaagaaaatttggccgacctccaaaacaaattcagattcaagaaataattacattgaattttacgaaggaaaatggtctctttttcttaaaaacaaatcgaaaatgtgagtgaaaggttggaactttacggcaagtgatataagcggttacaatgaaggacatgaaaagagtgactacacagaaaatttcttgtgacccagaagacaaaatccccacaaagctaaaaccttttcaaacttttctaccaaaaagatgcaagctataataacgaacaaaaaacatcataatcattaaatgcacatgtgacaaccagcaagagtaaccagaatttgtttcttcttcatcttctaaatttctttaattttcataccgaagtaacatgcggaagtgaacaagtaaccctaaaattgaagcaatttaccaggagataaggcgggagtgaaagcattaggttgaggagaggagattcttgtgtagtaagggacataacacatgtggattgatgaagaacataagcttgtagtaaaacaagagctgttataacaatttgcttcatttctttttttcaacaaagttttttactttcaagaaccccaccaagagttgggaagatttagacagatttttgaatttgggttttttagagaagaagagagaagaaaattctgagtaattcaagaaagaccaagaatgtgtttttgaaagagaaagagagatttgagaaaaatattcactttactatttaaccattgttgaagagagctctgagcaagaaatggtaaaaagaaagagacagagaggattcagacgaaatacttgaggtggagcagttaccataaagaatatcggaaatttcctccggatagggaatataatttcggtattaagggaaatatatcatatcaatattaatgtatgggtcgacaaaatatttacatgccatggatgtatacatatgtcaatcaatattgtgataaggttaaatatgtttttttaattatgtctcttatgtaaatcttctggtagaattagttcacgttagttcaatttaaacaggtatcatacaataaaatctctggttcataaacattgataaaccaaaaatttacatctttgtttttcaaaatgaaagtagatttatagaatctaaatttatagaatctaaattttaaacattgataaaccaaaaatttaagtctaagaaaaagtgtagggatactttagacttgactttctaagttctccatccaaaattttaaagtaaaaaaagtaagagaaaagaaaaaaagactttttgttatagaatctaaaaaagctggtttatatgttttccacacttttaaactagcaggatatgactggggcaaacacgaaccatcgatgtgtagaccatgaacttaacaagctccgtctaattactgcggttagatcatattatatagggattagcaacgcttgactttatattcaacatgacgacttcatttctgttttatcaatccatttagcaaattatgtattgcttttttttactataattaaatctattaggtattgaatgaattctgttcaggtaaaaagaattcgaatatggataaggttgggtggtccattctgaaatacatatgcatgaactgaaatatttcatgttatgaaactatagattagatagttagttgatatgtaactataattcaaattttaagaaactactatcacatgttaggtgaccaatgggtttgtctcgagacattaaaatatattttcttccaacacccaagaaaggccactattagctattatctttctaattatgcatattgatttgtcctgaagtatctaccagaaatcatgttctttagtcttttcatttcaaattaaattacagaatcttaaatacgagatgtgtttcttcagtacttgaaacatttgtaggtgaaagatttaagaattgtgtagaattgaagttacagaaaatgccgttgaattaaacggcttaagattgaggtggaaaatagtaagggaccttgaacgtgtggtgctgtgagtagtctacataactatcagctctgcggatgcttatagctcccttctccagccattgggtcgacataagcgtaggaacttaattaggtgaaccaagactttgtatgcaagtattatgatcaagtcatgatcaccagctgataaacacttgtctgagttacttttgaaagattctataagccaaaaaacacgctttggtgatcaagactttgtatgcaagtattatgattggctgatcctaagccaaaccaatcactgagcctgctaaatagaaatctttggcttgtggtcttggcaatacacaacacaacactcttttgcaaaaatgaaagttggaaagaaagtagaagcaggagcaggttcacaagtgaa

SEQ ID NO: 1420 - DNA, 96379 bp, Arabidopsis thaliana
ttattatacctctacagttccctcctgctttagctctgagtacattcaaatgggtgaaagtttccttctgcaaattcttgcatcctaaacctttgcattagctccacagacctgcaaatgaatcatcaatgtaccaaatcatcaaacccattttgtgtactctgaaaccgccttggagcttttatattaactcaaaccacctatcccagaaaacttacagaggattctctcgattgcggcttagcttctgttgattactctccattacttccactacattggcggttgctggtccagctgatcctcctgctacaattgatgggactgatgcggttgggctccatatctgtacacatatttttacatgcaaatgttagttttagagatcttacacgaaatgaaaaccaaaccctgaagacagctttgtgtgcctgcttacctttattgtgttatcaattccactcgttgctacaacactatcaaacggatggcattgaatgcagttcaaaactagagacgaaagatgattcttttagccaactcgaaattcaatgaaaaaaaaagatacttatgtaatggataaaatgtgaaaggaaaaaagatcacctgattcatcgccaacgagcactttcataagccttccagtctgtttctcccatataaaccaccgaccgtcatcgcttccacttgcaatatattcacctgaaatttggtaataaaatgttcacagaaagtcgataccgtattgaatttcaaattttataaaccgctttttctactagaatggaaaattgcactcagataacatgaaagttgcaaccccaagaaacttacctctctgaccaagaaaactggcctgcttaatatcagttcctacgttacagtggccaacatatctacgtttcatatcaatggctccctctggctataatcaccaaaaaaccattggtgtaaaaggtatccatcaaattaggtaaaagtatgacgcagcataaaagaagtcaagtactaacttaaaacgtattcaatgtgttaaatttgttttgctttaaaataaataacaataccataatcttagaactaacctgataagacgtcctatcattttgagatgacgatgcagttcctgaggaggcattgtcaactgtattttccatcggtttatcatcacctactctatgaattcgtaagttgagactgccacgcatagaatttgagtctgtatctcgtccttcatcatcagacaacgaagtttgaatatccaactccaattcctcatcataatcagaatcttctctttcggatctcgacatatcatgtgaactgtcactgttggcctctgatctatatagtatgtcgcttaaagaaagtactctagtagttccagctcctgtctcttcgtttttctcagctccagctgatttgtcaaacaaaagacaagtacaagaatattaaaatgtgaatataaattcccttgcctgttgaatcatgaaagcttctaagcacattaatactccttgggaatgaaagaatccaccaaatctaaaagaatagctctacatctgttactttgatacacttttgaatcaaaagaaatatcagacatattaaccaacaaaattagatgtagaaagagaagccagatggacttaaagatgatactacgaatctatgcttaagattttctctcatgtgtccacattgattactagaaacgagtggttataactcattgaagagcctaaaaaaacaaaaaacaaaaacatctaagcagaaacatcttgaacctctatcctagctcatagaggaaaacagaaacagcaggaaagtagataacatctgttactaagcaaacctgcaggaaaagacatacatcagttggcacaaacctgcttgaagatcccttttaatgctctccacttttgccactatatcggcatctgatgggttcatatgttgtgcagcagtcgcaaaatctagagcttctttacattttcccaactgcgtgaaagcacatatgtatatgaaatggaagggtgactaaaataaatgcttattgcagaaccatctctatgtcaaatagtaaacttaaaattaactgtgatcagagctatgaatttacttgctgcagcgcttcagacatgtagtaatgagctttaaaggatgaagcatcaattctccgagcattatggcaatctcttacggccatatgagcatcattcttccacttcctctgaaaaataaacaaatcagctgattatggttattagagaggagtaatgtagggattcaagctagttatagacaccagttctaaaggaccttgagtaacaatgcggcacgagtacaaaggcattcatgccttagcgcagactcaatatcattagaatgagcatccagaacttcattagctgcctcaattgcatagaaaacatctgtaccctcttctaaagaccatttagcaatttctaccaattccgtacacttcttaacctgaaaagaacggcgtcagatgcactaagaatatggaatgacaaggtcaccatatggaacaattacagagggaggtgcgaaccgttgcagcattgctacttctgtgaaagccattttgaggagtggtggaaacctgaggtggagattctacatcgtggaggttgttactgaaagaaaacaagttatctacatctcctggtgtgtattgcatgattccagtgcctacaagtcacaaacaaaggaatgaatcatcatatattgagcttaagtcaaagtaccaaaatgttaggaaaactgacattttcaatgcgaaaaggtgcctaaaacaagataactagcaaagaaaaatatttctaaactaagtggtgaagtacagattggcagtacaaatgtaaataacaaaaggtaagcaaaaaactggtgggctaacacatccatcatccttaatccaatttttaaaagggccacataatagcatatccatttgaaatctcagaggatatcaataactttccaaatgttccatcgaaatttttcatgcaggattacaatgtctttagcagaactgaaaggggcatgaacaggaaaaaaaaaagaaaacaaagcgacataaatcaaaatatttcaatatgaagttcaattatttttcttaacaaattcaagttcatactgcacgattaactattcacggaatttaagctttaagcagcaaacaactcaactgcaaataccattatttacattcatcaggtagacatgctccccactgtaactgagcaaaacttcttcgccattaggactgaaagtaacatgtgttaggtgcaaatttgttcgcccctgaaataatttaagatgtagcagacagtgagcttgggaaacactttgaccaagaaaacagcaatgcagaactaagaactagtagagtatcttaatatcaatcaggctaaactaacacgttcagaaagatgcatgggacagaagtaattgacacacggaggtggaggcatccttttccgacttgatgccaacggtgggagcatccttctatcgtataaacgagcaaatgcatcactgccaaagatgaaaaaagagagtagcaagttagttaagaaataaggagagaactctgatccaaaaacatggaagcaaataccttccaccaacaagaagtaggtgcggtcttgtggcacttatatcacaagacttcagggagagagtttgctttggaggatcagctagtgctcttttggcaccactgcgcagatcaagctgcaaaattcagagctatcaacaactttcatttgcagaagaaagttttcataagagccacacctataactatacgtctacaaagtatccagatagggctcatatgatattcaaacatccacaaaaaaactctgattatagacaagtatcaaaatactgtttttgagaaagttaaagccaagatggaagtactagagaaatacaaacgtaattgaaaacaatgtaaccacagtttggatatcaccagaacactgcggcattcttggtgagcggttccagcaggaggacaagaggtagattcccggaaatcatgctgccttaaagtcccatcttcactagcactccatacaacattggggttaccaggttcgacctacatggtggtaaaaacatctgttaagcaaacagctcaaaatgctagacccaaataatgattaagagggtcttacagctagttttttcactcttcgtgtgtgacattggtacaatgctgatggaataatagcattgtcatcttctgctctaccgcttaaccgggatgtattgaatagcctaacctacacgataggaaaaatatatgcacacacctcaaaagaaaagtaaaagtcacctgaataccatgcaaagccaaatgaatgcaaaacccaaaaggtgtagttttatatacctcagcatctccagcaccagataccacaagctcgtcagaggtttcagggacaaacttcgtacagaagatgttggcagtatgccctgtatctatagaatgcaaaagcttccgactggagtaattccaaatattgatctacaaattaaaagaagatataaatgtcaagacaaggcaacgatacagcaccaggcgagagaaattagatgcttaaatggacttctttaacaatcccatccaaaattagatacaagtgatacacgttcgttcccaaaccaaacaagctcaactaactgacacaaagacttgaaatcaacaaaaaaaaattgcatatacccttaaatcatctgatccagatatcaaaagtgaaccattagagttccacgctaaagcattaacacagccttgatgtccctgccacacacaacaaaaacatcttaaggaaagagcaacaagcagaatgaagatagtcaaagattgagtaataacctccaattcttgctcctgagaaagtctccgaaccaaggaagagtgaaactgcattctttgatcaacctcctacacatacaacagtcgacaaacattgccagagagagtaaaatttcaattggaagcaagaattgacaaaagttgattcaaggattcaactataaattaaacacctccatagatcaaactcgagcactgtagctaaaaaccctagcaatgagggaaaaaaaacgaattccaatgggacgcagaggagaagaaagattggggggagacgtacatgacttgggtcctgggaccttgtgtggaggagattgaagatgttaccatcgtgaaaactgagattatccatggagaaatcgatcagcaccgatcacaaattggaagaagaagccctccttctttggctctttgtaatctgacgctatttctcgtgcccggttctacattctcggtgagatcctctgcggcgcatgtgttgggttatctatgttctctaattacatctcagccgttcgttttttttgttttgctgcgttggtaaaatcaagtaaaaatccttatcgggataacaatttaacatatggtgactgactggtgaaccaccatttgctgtcgataaatcggtagcaacttatttaatttcttccacatttaaaagttagatataaaatttgtacaaaattgtttctcaatattcgtaaacatatgtattttttcccacgtaacaatttgtaacaaaaatgtcacatatataagttgtcgcccttagttttgcttacagattaattagggacaatcgttaacttttttattgctatgtgtatcgaaagactctgtcacttttttcaccatttttctactactaggtctaggttcttctacattctagggcatgagttttatgcgtgtgtgggctatctttgtgttccaaacacatcagaacctttctttcttttggcaatttaattatcatagcctagacagctagactcgtttcgttcctggtttaatttctaaagaagtgaattggcttagtgatacatcttcgcactaatggtatatgtttatgtgtttcttgcgatagtgattgtctgattgatgagacaaattcatggttatcacttagtacctacggaaccaaccaaaaaaagactcaattctcataattatcgacaatgttctttttgaagtcatgtgcacgcgcggcgtttctaattaacagtgccgttttgtgacgcatccaaagatgatttattactgtataactgatctgcggatacaaaaattttagtaatactaattaatgaacaaaagaagttggtttatataattaacgagcaacctaaagtgacaagacgagttgaataacgtatgtaataataaatctctttgataatcgaatactccaaaacttgcaatttccactatacctattaagactaatcttgacattaaatgcctaaatgggttactacgtaacgagtttgcaataagctgacacagaaagagtaaatatacgagattaaatgaaggagatgaaaacagaaattaaatgaaacgagacgaagaaatggtaagtggcagggcttatgggtttgtgtagtgtatcacaatgtacacaattggagacaaagacagacaatacttttttcataacatgacattccaaaaggtacatagtgttctagtttcagtcctttgaacaattatacaagaatacaaaatatacatccatatccttttaacaaatacgtgagtcatcatatcaataaaaaacgtcaacaactatacatgcatacagattacaggacacacatacgcatagagggagggagaattctcaatttgtataatcttattccaacaacatagtacatagataccaaagtgaaaaaaatactcaaatcttcacattttctaaaattgattaccgcaatgaatgaactaatattataactagataaaacgaagcattataaactaactacaaccagttcttgaacgtttaatgtctattttacaaaactcagacatcccttattcgatcatttgactatttcaaaattccattattcaattattcatctaacatattagtcaagaatcaagacccaactagaatttagtggtagaataactttctatgctacagactaatcattttcttcaccacaacaatcggagataacctatacttagtcatgtgtcaaaccacataacataagtttcaatcgcttccaattatctctaactctagactctaagtgattatccctctctgattgcacacatctataaaagaccttagaatcatacatatccacataacttacataggagctacaatgcccaaaattttgagcacatcaactccaaacttttcgccattatcttattccatggattcaagtgcaatctgcataactttgactcatcttttgaagctaggagttggggccaattcatgtgtgctagagtctgcaaaataaaagagtttatttcaattacataatatataatttacttataatacaaacatcctattactaactagtctaaccacgatgggtcaacaaaatataacccaaatggagatagacaataaattcgatgagagatataacaaatatcttattcataatagtctatgtgtacaccttcacatacatgtgtaaagatattataagacaaaatctaagattcatcactatgaatgtacaaagttttgaaactacataaactgaaattatataaaaatatatagatgcaacatatgtatgcatagagaatttggtatgcagagacagataagaacacaaaatcataactagaacaatggaataaggaagattcatgaaggagaagttatgacaaaaagagagtgagcacgcaaaagcaaccatatacaaaacttttatacaacttcccctttgtgtgctcactctcttctgtcaacttcttttcccccatcaacatatatttatctagttatgacactaaataatatgttagaaaaacgaaacagaaaaaacaaggatatgtgtatatgtgtagataggaaattccaattagtccagaaaccgatgaaaaaataaaagataaaacatgacacaagtacagatcgaaggtacttgagatcaaatctgggaaaaaacagcaactaacaaagacttgatcgatggatccataaaaggaaagtatgaatctaagtacggacactgcaagttagggtttcttctctaattcccagttttagaatttttctttttttaaagaaacaaaggttaaggagataaactcagaattgctgccgaaaaacaaacttttttttccttaatcactcactcactctctctttcatgcaaagcatacatgtgtcggctgctttacttctctctctatatagcgaaagtgagaagtgattaaatagagaaaaccctagaatgaagaatgaatccaacaacattttacattttagattaaatgaaagaagaagaagaagaagaaaaaaggtgaaacagagatgatggagagaagaaagtacggatgtcaaaacgcttggttatggtttgtcggagagagaaacgtgtcgcaatcaaaggccaggatttgacttgagagacgttatgagccgttggatgtgtctttttgttcagttccgtctctttgccgtcttatctgcttctgtcctttatttttatttcactcagtgcgtcattagagacacaaacacacacgcatcatccttgtctattctcttctcttatcttcttctctactttaaaacaggattagtgctggttaattcttgatttgtgccacggtttagttgtttgtctttcagagtcggctttgtttaaagctgctttttcattaagttaaccaatgattacaaatagttaaacggatgtagttaatgcggtataaataatatttactgttgtagctttgaatgggtgagtggcgtggcagggtttggtgcccaataaattaataaacacgttttgtttccattcatccaaaaaatgggaccgtatatacagtggcatgttcattttgggtaacgagccgggtaatgcgataagggtcggaaatatataaaaagtactatcgaaacatacacgataatttatgagatgaaactttcagttcatatattgggttagttagtttctatacgtaaaatcattaccctcactcttattttcaaatttagaaaataagtacttgtggaaatttaaaaaagattcaaatttactaaatatgcgagtaggattttattttttcctattgttaatatatttttgcgctataataaacgaaattgtcctaattgtagatagtaaatttagcaaagaccattgcagcaatgtgtgcaaccttatgtagaactatttagtgatgcggtaagaagatgacaataaaaagaggtgtcaatagttggtggtacaaaacacaaacactagtgacagaaagagtattgtactgccatcattttgaaatttcaatattaatttttctaattaaactctttcaagtgaaactaataaccatgtgttgcatgaaaattcttttcaacgtccgttttcgtttctaaaacgcaggtataaactattttttttcctttatcctttaattaaactatttgatatttatgtttccgatttgtgttgtttcaaaaaaattcattaatttgtaagtataatataatatacatgttttcaaaatgtatacattttataattttagaaaaagtaattatttcccatgtccgaaatgtaaagcttctacgtatctgtttttgtttccctgcaacataggttgtgccatctcttaccaatcaaaactaatggaatcaccattttttttatgtcaaatcacaaatctgttttttattaatataaattattagcagtaaattttctcatttcaaaaattaataatagcagctgttaaaaataaataaaaatacattctacttttgtagaaataatagataattatttccttatatttatttttcgacattttttcgaacactaaataatttaaacataacatccaaagaaaagccatttggtattggctctgatgctttaccttgaagcattctacggtacagtgcataacatcctctaattaagcgcatttattggtactctaaatacacatctagactctagtcctgttcgtttccactattctattttcatactgtactgcattctcttttcccgtttgtagttataaaaaatatagagatcgtacacaagtctttttattaacagcttcgctgatttcccaccctgacccctgagaatccatagtgaatttagtgtttaggttcgattctgtttgaatattatctgtgaatcaatagatagtcgtaaaacacaatttgcttgcgaattcaatgaacacacaattcatatgagaactaccatttaattctttgtctgcaaacatcagggagagagagagagagagagagttaattaatggaaagcattcattcatattcatagttcaaaagactttccactgccctttggctacatattttcgttaagcatcatatatagcctacgacactacaaccctaacttaaacgaaacaagaattctctgtgtaaataaaaatgaaccacaccgtttaacaatggcttcctaacactgtaactgtctcctacggtacctgcacatagaaacagaccgcgacactattacttatttcttaattctgttttttaagggttttttctttctggcgagactacggctacgacgacgcttcttccgctttcgtatcttttccagcattttcttctccttcctcttcctcttcctccttcttccccttcatttttttcctcttcgcatcaattccctctggtgacttcttcaagaagctcaccaacggctctccatcagacatttcatcaacagctttttccccatcttcattgtcaccattttcttcatcagcggtattactcttaatcttttttgaggtgatcttcgatattgttatctctttctcatcatcagatgaattgttttcaccattatcagagttggagttgctcaatttcagggccttgggctcagcctcatcatcagatgtttcattctcctcttcatcttcatctttatcagccttagagttgttggtttttagaaccttgggctcatcttcatcagaagaattttcagcaacttcatcagcattggagttgcaggattttaacaccttaggcttcgcctcttcgctagaagtatcaatatcatcaccagcttcttcatcttcatcttggtcatcagtgtgtttcctcttggtcaactttgaagacatctttggttttttcgaggcctttgatgtctctttttgatccacattccccttgctccgaaacctttcactcatgcgtgatgccgctgctacaatcttcccaccaatatcacccattttgccatttttctcagtttcgggctttgaggccttcttctccacctctttggccttgctgtaaaaacaattggggtaattagattttcagaatcaaagcatcacaataatactgtgttgaactcgcacgtgagcgtggaagtgtgcatatatacgtttgtttatttaagaatgcatagtataacataaccaacctctttgatgaagaatctatcttctgtttctttttgggcatagcttcatccgtccttccttttaaagatgccttccctttccctttaggcctgtagagagtttagacaacaaagatcattcagaattacttactcctaaatctttagattcagggacacaatccacagccatgaatatatgtgtatctgacacactcatgttcgtaaatcatgactgttagtgatattaaaacaatcggtactatacgatacaacacacgatctaaatcataaccctagttaagtataaagagaaactcaaggttgcgatgtctaaaacaggtaggaagataagggcaaacttacggttctggagtgccttcagaactctcaccagcagattcctcctgtagggagatctggaaaaaaaagaatgctgaaccattaaaagctagtgatacacaggataaaatcgacaataaatgattaaacaaacactgtctaatatctacctcatcagattcagattcagcatcatcttcttcaatcaactcccatctctccttcttcagatccaaggtctctttatcaccatcttcatagaaaacctaataacaatgaagagtaactcattaaatgacacattatctaagcaacttaaattcctctgataaagtaaatcatccaccaaactcattcaattcagattagatatcaatagatcttaaaatccaagagataaaccctaattcattcatttaatgaatgtgcaattcaaaatccaatctagattcaagcagacccatagaaacaagtaacaagatacatgatatgaattacccgatgtttcttcttggaagagacataggaatccaccacacccttatagaatctgcaaaaccaagagatctgtaagattgaccacaagtaactgatagtaaaaaagccctaattttttcaataagattggaacactcacttgctgtccatcggccaccaaactcgtatccttgaacccaccaaggcttcaccatatttacgagcatcagaaacctagtaaagttcaatactttagagcaaattcgcatagaaaaactagtaattcaaaccaaagaagaagaagcgatagttgcaaaaccttatccttcccagaagaacgagttgaagaagaaacaagtctgttcttggctgatgaacgcttcctagaaccaaccatcttcgaaagcaatcaaaggaagaagaagaacaagaaggaatctgtgttttgtgtttgtgtttggtgtaagatatttttcttacagcgcagagagagatttataggaagagagcgaagaagaaagaagcggtgaaattgggggttttatttaggttaccaaggggtgtcatttgggggatttgagagatttctttcccctgaactaaccaacgacacgtgactttactagttaagaattacctctcacgtgtttgacgacgaccacatcttttctttgctttacttctattggtctcttccactcttctttttttcatctttttcttgttaaaggtcttctttttttttatctttagccagttgttatttacctattaatgttttctgccagtaattggaccttcaatatccagtgttatcaagttagaggaaaagatatttatcctagtatagtgctttacgatgactagatgatgatcctcaaattaatattagatcaccggagttggtccaaaataaaatgatagaaaatatggtcatattattatgaacgatatatcttcagatttacggtcttggtttttaatggttttctaataagattattttctctgaaacgtgatcaagaactaaatactcgtttttacgagtgaacttaacgtttagtaacttaacagctatgagccttcttatctttaagtgtatcttataatagatcatatcgaaatgttacctagagttcatgtagaatatgacatttgttttatcaagctgttcgaacatttgtaggaacgatctaaacatctctaaacaatccaaaacccataaaattaaacaaatatttggtactagatgatttacctaatctaaattatatgtgcacgtgatattaaagaatttatctacgttaaatacatgcaactgtttaaataattctttctaatttaagtaacaaaaatttcaattttagtttctattttcgtttttttcgattttgattttaaatatagaattctatttagattttagatgagcaagcaattacacggtgagacatatttttggagggtaacaattaagtaaattttgttatatatataagaacaattatgcagaaactttcatgtttggtatgtgttggattccagaagaaatttcctaaaaatggtcggatgatgaaaccaccatctaatatttcgtgacttgacattacttgtttattttttttaatttatagaaaaaggtacacaattatttgatataaaacaagctaatacattagtttatataaaaacgaattaattattacaaaacaatggattatgcttgagggtaagtgggaagcacgatgatgccttgactccgtaataataattagaattaaaattcctttatcccctttcttcctaatagttgtctttttttgtaaaaaaaaaaagaactttggtcctcgtttgagttggagaatcttttcatgtaataattttaagaagaaaaactgattacgctggtgaaacttgaaagtttttttctaaaataaataaatctaaaatgattctattcatgaacgaagatgattgtaacaagtgatgcatgtatctctatcaaacgtcttcccattcgttgtatgattgcattaatattggccacttgtaacttgtaaggtagaaatcccaaagtcaattctattataattaaaattactttgttttgtttaacaattatgctaacaaatccttcttaataacaagataacataaatctaaaatcctttttttgagttgaaaaaaaacaagataccatattttcaattaattggcagaactacataggaaacaaatccgaaattgaagagtttacatagaagaaaaaaaaacagaaataaaagagtttacctggaaaataatcaaatattatgttctttcaaattttcgacaaaaaaaaaaattgatattctttcaattttgtgagataatcagtacagaaattattaaaatgtgatataaaattgcgagacaatccgtaggaatattattaccaaatgatataaaactgagttaaaattgtaagaaaaagaagttttaaggttcttcaaatcatctagctgactagctccatagcaaaaataaataattttgattgtttattagcacaatctgtttcttaaccatataaatttagacttgtacaaaaatcaaaatgcagtttagtttatacaacttttcctataactataaagttcgatcgtcataataaggtataacaatttaactctagtaccaaatgctataaaatacataaaatttaagaataatggaggtaggtctacaaagcaaaagaaaaaaaaaagatcatggaagttacaaacgaacggaatttccgtgatacacataaataaaaattggtcatcatatcacacaattcgcatcattaaaataattagaaaacggacaatacggataaaataattggtaactggccaaaacgtaatgattgatgtaagaagacgcacggcaaaacgtcgtcgtataagcttttcatcgtcaaacaaaacggcttcgtttcaaggctcacacttgtctttatttatcacttcatcttctccaaagccataccacttgaaacctctctctctggttgacccgataatttctctctcgcagacgcacagatctctcttcgaatctgctagatctgttccttttcttacatctgtattgcgaaacctctggtaatttcatactttcatgtctctccgtttcatttcgattttcgtttcacagctagggtttgctttttgttacatcgatttctgattttcctggtgttgttgcctcttcctcagatcggaaggtttcgtttacagatctaccgatacgagtttcgcagtatttccgagttccgacgtatgctttgttttcagatctgggtttgttgtatatctagaaatggcggagactttgaaagaagattcgattatgattcgagaggtttgggattacaatttggttgaagaattcgcgttgatccgtgagattgttgacaaattcagctatatcgctatggatactgagtttccaggtgtggttttgaagcctgttgctactttcaagtacaataacgatcttaactacaggactctcaaggaaaatgtcgatttgttgaaattgattcaagttgggttaactttttctgatgagaatgggaatcttccgacttgtgggacggataagttctgcatctggcaattcaatttccgtgagttcaacatcggtgaggatatctacgcgagtgagtctattgagctgttgcgtcagtgtgggattgatttcaagaagaacattgagaaaggtattgatgtggttaggtttggtgagcttatgatgtcgtctgggattgttttgaacgatgctatctcgtgggttacgttccatggtggatatgatttcgggtatttggttaagttgttgacttgtaaggaattgcctctcaagcaagctgatttcttcaagcttctgtatgtgtatttccctacggtttacgatatcaagcacttgatgacgttctgcaacggactgtttggtggattgaacagacttgcggagcttatgggagtggagagagttgggatttgtcatcaagctgggtcggatagcttgctcaccttagggtcgtttaggaagctcaaggaacgttatttcccgggatcaactgagaaatacactggagtcttgtatggtctaggtgtggaagatggtactactactactgttgctaattaagaagaaaggaatgaaagatactttgaaaattccagggaagtgcgattagatatatttctttagtctttgtgagtgtgagaagaccaaaatagaatcgtcgttgtgtaaattggcaaattggtgttagtaagtgacttgttgtgtctttgttgctttgttttcaggaaaaccccttgtgatcaaaatttgaggggtttttgttttagcttgagtttctgaatgtatatcaattcagctacccgtttatttaataaataatctccaattttaatttttcttctcttttctttttgtgtgtgttttcttcttactagtgaccaatgtaacttgacagtggcttcttgtagtagcgtttgcatgtctcagcttgcagttactgtgtaattctttgtaaccataccagtttgaagatgcaaactggtaagttttatgcttaagagaatgttgaatcttcctgtgttcttctttccctcttcgttgatacaagttgataaggagaacaatgaactgcttatgctagaggttatatgtgttacattgtttaaaaaacagagctatggtaatcgattgatgtatagatttgttatttaggtgtttatgatgtaagtggtatcatgtcatggttaatgtggaggagaatcacatatgtatgctgttgcattcgccaatcacctcaatagccaatttattatcatattgtcaatgagtagcattctaatgcaatcaatgttttgttgggcaagtattcagacgtcatctgagtcgcaagtggtacagaagattacgagatttgactgattgagacgtcgtagctcattcaattgccgaagaaaaaaaaaaaagtatcagcctgttggaagtattatgtcaaaatgtggatttgtgtatgaactcagtttccatcaagataattaaatctaagtttctcaaaaccttaaatatttcattacacgaacttgtttgatgatcgaaaacatatgatccaatagcaacacgacacgagaaataaagtaaaaagaagaaaacaacagcaatacggcaaaagtccgagtcactattatgtaggtgtggcagagaatcaaatctacttcttattacagaagaaacagtgtacttgctagtcctgtctttaacggcttctctgagtctcttcacgtgtgtttgtgtgttgggaattgggattctgatttgggcctttgttgtgtgggctttgatcagaggtgggagaacgtttttaccaaggttgaattgggattctgatttgggcatgtttgttgttttagggtttagttattatcaaatgaccactattggctattgctttgctttaggtaaccaaaaaaacgttacatatttaaataaaaatgtgtaacacagtgcggacgaaatagcatcaaaattatttatatacatatcagatatgaattgagttaattagtgtctaattattatcttgtggctgccatatgtcttttttgaacttgttctcgttgaggaaaatttggtatgcctaaacatagtatgtttatcaatttggttgagaccagcaaaatatcagtgccaaccctaattataacgattactcatcaacttatgatatacatatccttgtgaatccaaaagaagctgtcaagcacccacttttattttattagtttttttttctgttgatgtatagtacttgattgcggaaaaaatggtaagtaactaagtatgattagggctatttgttattttattcttcaaaaatgaagagtaaggttcagatgtagttttgaaatatactttttgcctaattttggatgagacagacaaatctaatcaaaaagattcagctgatttgtgattactggtaacacaaatagtgtttatatttgtaatcatccatgtgggggtggtttctcctgcaccacttgtctcagttccccttacgcaatcatgtttcttgtttttaaatgctaatgtgatacctatacagtcttaagttattataaagttcatattagtgtacatgtaagagacttataaaataatttgtagtcaatcaaatttttaattgatactaacaattgatccaccgaatcagctttcacaatttctttaattgtagatcgtttgtaacattggacccacgaattatatataggtcgcattcgacaaaatactcaacatacttaaactagttgtcctaacaattagttctttggattttacttgcctatttttatattttccggcttccaccacatattaatttatgctaaagttttcgagaaatcaaatactgaagattcgtatcccgagcaagcatagatgagacgctttgtcgtttcactttgttttcccacccaaaccagaacaaaatttattggccttcgaatatttcggaaaaaacaaacaatattcatttaatggacttgtgaaagaagggtgatattaatctttaatcatgtcacttaattgatatgataaatattcaagtgaatcatgtaaagtggaaatcactgtgaagtagaatgtgtcctaagggagtttcgtacctttcaaccataaaatccggcaaactattaaggattccaatggatataaagatgaaggagagtgtgaatgtgaagcaaacttcaaaaggaagaagtgaaaagaggacaaaagagagttaaacagtggaaagctaaaaggaaacagagatgaccactttcatctcgaagtttcaaaagtacacaaaaacatcaaacatacctgaatagtttcacttggtccactctctccttatctctctctcttgtcattgagcatccttttcaatttcattgtcacttgttgtcatcttcatctactccgtgaatattacaacaagttgtcgtttcatccaaacaaataaaaccggtcccagtttcagaagatcttttgaactgccaagctttcttttgtcttgttcccccctccaaatccttttttcctcatacaaaagagtctataaagtctccattagtttagaactagtgactactactgtacatattctatgtaagatttgtaggttgggctaaggtgggtttagtaatttccttacacatatccgcggctgcatacaaaactataccaaatgaagacgagttggggcctattagaatctgtccacagaaaaacaatgaatccatcaatcagagtggatttagcaagcaaatatcaagcatagttcaaaagttcatgaactcaccaggagtccaagacaaaaagtaaatattcattgggatggctttcttgaattaagcccaactctacatgtcattggcatcaacctgggtataagaaaaagaaatgacatgtatacttgtttgttgaagaacttttaagcacataaaggcaatagactgagagaacaggaaaaaaaaagttaaagaagattatgcatgatagggaatagagattggtgtattgaaggagaaagcagcccaaaaaaaggttgatgtgaagtgaaagttgctcctacaaagggataaacacaggtattaattggtggagttccaatcagcttcaagtgttttgttgtgtctttgtgtgtgtgtgtgtgtggtgtgtcagcaaacaagacctacccatctctctttctctatctctctcatcttcttactacttttctccacttattacaaactccaaaagcatttgtactgagtctatactttccttatatagcatcaacttctgctcccacttctgtgaaaaaactagacttttatgcttctttttttcttaggctatatagctattaatccataaggtgagagagagagacaattgaagtgaacaaaaccatcacctggaaaattatataccctctttgcccctcatggattcttccagcggaaaaccaagatcatctgattcctcatgcatcatttctgcatccaccagtcttcaattttcagattccccaaagctgagcctagaaaattacaacatagacacagtagcagcacaagaagaagatgatcatgaccaaaaagaaggagtggaaggtataaagcttgaccttatgctagcaggatatgattctagtcaaccacagctcaatcaagaactcaatctcctcgactgcttagagacaggtgtagtcactccgagttttaacgggtcaacttccactgaacagaagctcttctcatgcaactactgtcaaagaacattctacagctcacaggcgcttggtggtcaccaaaacgcccacaaaagagaaaggactttggcaaagcgagggcaacggatggcatctgccgcagctttcgggcatccatatggttttgctccggtcccgttccatggacagtacagcaacagaaccttgggtattcaggcacactcaatgagtcataagccaagttcatataacgtttacggtggtgagtatggtcagatcaactggtcaaggataccactagttcagcaaccagcaatagcaaaactaacttcaacagagaatcattataatcatcatcagatgatgattgctccaccgttgacttccacatgtgaaaacatcggtaggttcgatgtaggaaggattccagtagagtttccaacttctgaactatggcagagaggcgaggaattgttgaagccagctgaagaagagaagcagaagaaccttgacttgtcccttaaactttgagagtcttttcttttcatttttttgggttttgctctgaaattgttttcctcgagccaagcctttcctcaagctttcttttctttgtgctggttttttgttgtcattgatgtctacaccagtattattaaagggttagtaatcttgtgagtatattttctaccatagatttatgatgtacaactttcacacttctacaagtttgaggttttaaggtagacatcaatggatttctgtatacacccaacaaccataaaagagatagtgaagttcctagaaacgaagtgaaactttttagtgtatgaaagaaagagattatcttgagatatatgggaagatttgttgtcatggaaaccagaaaaaagacttattgtaaagtcagagttgcgaaacctaaaagtaagaaaaacattcttttattgaaaagtagttaagaagacacacaaagaaagcaaaacaaatataaaataagaacttgttagttgtgatgatgacaagaaacaaagagtccagaagaaaaaacataattaatacatcatatgatcctaataatgcagctaataacaaatcatgaaataatcaagaatccaatgaaatctttgtgagacccgaaatttgtgtacactagacaaagagtgactagtctttggcctttagaatgaatctatatgcactacctaaatatacataaatagaatgtacaaacaaccatgtgcgtatgatgcacaaaaggtgggacaagagtcaagacttataagactaagacacaaatttaaaaggacttcacataattctaatggacttgactccaactctacacatcttgagatgacaaacatcaaaactgtttcatgagctttcacagagaacgaagtttcagtgtttcaaatatttaagaaaacacatgattgtgaacaggtttatgaatactagcaggcaaagatattatggccaacctgaatttaccattgtgctctatcactaaagggcaacatagaagccaaaataactcatagattgataaagaaatataaatatttgacacagttacactcaacaccaaacgttggacaataccaaatgttggcatatgaatctgaatatacagattatcaaactcctcacctagaatcaaagtagaagtatgtacactttcttcccagtaaacatataaggcacaagacagatcatcatgtttgttttcagatacaaaattggccacaagcaaccaaaaaaggaatgaaaacacaccttaatgaataaaacaaagaagaaacaccaaggcagacaataacacatgtggaataaaaatctaatgaacccaaacctcattgattagctcttgggtccatttttcatctacttgtatgtataccacaattctgaccccatcaatactcttcaatctcagtcacactttcctgaaacacacagcaagaaaaaaacgatattgatggatcagtatcaggttgctaccaaattacatccacatgtcagcagattaatagaattaatcaatgcaagtgaaaacgtatcctttatgatgcactgttttctcctacaacgcaatgaccataagaaaaaagacatcttttcattgcaatgagaaattttacagtgttctcttattttgcaattgacaccattgctaaacgatacgaatatttaaagctaaagttaagtaaagcatttttcatttgctcggagattcaagcattttgataatccgattaattctacggcaaacacttaaaaagctgaaccaacaatcaacttgaattcgcaatgattggcacagtaaaatttcaatgaaattaagaaatacattggacttgtgaacagaaaccaggcattattaaagaaacgcccaccttcaatacacgtagaagacggagcagtaccggaatttcgccggcgctgacgtgaggactccgagtttttcgaacatgaccaagttaacgaaaatgtaatctacaattttaaaaggcccaataactggcccatataaataaattttaaacaaaatgtagcccatattgtctccaagtaatttgttttgttaaaacagaaaaacgcttttttatgtctctttcttatctgtttttcagaccaaagttacgaagctcatattgacatcgacaagccttttaaattcaaaaaaagagaagagcataattctgaattttgcggcaacatttaaactttatcgcaagttggttttatccaatcgttcatacacactatccaatcaaattcatatgcatcttcgtatcaaaattgtcagttttttctgggttatgtgcaacttgtgaatgaattttgcaaagaaatcaacaagaaccaataacggaaaggaaagatttcataactgtttgcttaaaagagctgtaagttcaacaattaacaccatgtacttggtaagcaaataaaagagcgataggaaacaagaatccagaatactaatacatcatcgtaaaaatctaaacttgaattaggtaaataaaagcttaagcacgttctccacgaattcttctagccaattgaatgtccttaggcatgatcgtaaccctcttggcgtgaatagcgcagagattagtatcctcgaaaagtccaactaggtatgcctcagccgcctcttgaagagctaacaccgcgtgactctgaaacctcagatccgtctgcaaaatttaacctaattagtatacctaattccataacataacctaattgataagttttaatccgccgctaatgagtataaattttaccttgaagtcctgagctatttcccgaacgagacgctggaagggaagcttgcggatcaacaattcagtactcttctggtacttacgaatctcacgaagagcgacggttcctggacggtaacggtgaggcttcttgactcctccggtggttggtgctgatttcctcgccgcctgtattgaagaattcgttagagacgcaatcgaatactcaaattagataaaccctagatccccttccaaccaatttcatcataaacaaaatcaaaaccgcaagattcatactaaattagatcataaactaaaaattcaacacaatatagaaaacctagatcatatttttcagatttcgtccacaaaaactcgttattcaacccaaatttgaaccctagatctactatttcggtatgaatgaaagatagaaggacaaaccttggtggcaagctgcttcctgggagctttacctccggtggatttcctagcggtttgcttggtacgagccattgtttcttccaaaagatgtgacttttcgataagcttgatagagaagcttttgatttgattatcaggaagcgagttttgttttcttgatgattgtgtgggaatagtaaaaggtgattatgattatataggtgaatgttttagtcggttaatattaggaaatacagaagtggtccaatcttcacattttcgacggtcaagattcgacttatgagagcgaatactgacgttggcgatctgcgtcctcgcttctgattggtttaatcttgggaggatcgatgacgtggctagttttgtgtttcttttctacgtttgtcgtttgaagtaatcacgattttagttgggttagaaaaaaggtaatgacgatttgatctacatgtttggtaattagcgatgatgggccgagtcgtatcccttggtaggagtactgcgttgggttcaggcccaactgataaggcattgagagttcgtcagctgtgttctgaatatcgatccgaaccaaatttggtacggccgctccgatccgagatttcaagttggttgggttaaaaccatcacatatatgacatggacatggttgaattataagtttataacctcatcataattaaaattcggtttggtattagaacatgaaaacattccagcccaactcttaactaaaatccgatcgaccaaaaagttgctcatgcatgatatcgtgttgagttaaatctattcttaattggcttttataacgtgaaaatgcaagtttttaacagaacatatgttttcctgctccacatgtatcatagatctttacaaaaggtttcttttaaaaagaattggagtgtaagtgtggaacgttaacgaattcacgtactatacaaaagttgtacggaaaaagctatatatatttaatacccaacattattcaagtttatcacttctgcttatggccattgaagcctaaatttgaatgcacaaaatacagttttaagttttacgtgttttaaaataagaattaagaacgacataaagtaatttaatctctctgatgaaatgtaattaggtaacaaagtttttctcttttcctaagggggtgagcaaattctagtacagacctataataatctgtctagttaatattatgtgtatatttactagatggatattgttggttcagaaaaaggcattacacaaaagatagtaatcgatgagatagttgagtattttgtaagaacaagagttagtgattgatcccaattaaacctcacagtttcagtcactacgtatgaacatggtgcaagagggcggaaacagactgcccgatgccgattcattaaatggattcgatctctagtactttttatattagtttaccaaaatatatacttaaaagaattcacaggacataacaattatactgtaaactcattgctgcatagcagcattaatgaaaatatatatgcttaagaagagaaaatcaaacgagaagatccttagaactcaacaagtaagtgttagtaagtaacccatggccatggggaatgtatccaagcttccacatgcacttggattgacccaagtttatttgttttaatacatactatattttattacctttgcatttaattcatatttcctttgatatattaacttgactgcaatatacaaaaacgatgtaaattgatattaagcaaatattataaccaaatcacgtcacatgcagactatgtgatatgtaggatggataagtggtcgaggtttggaactttggattattgatcaaccattgtttttgatatttgtctggatcactcccacactttattttaaggtgagagtggataattgttttttttagttactggaatattgtgggttctatgtaattggccatattttatcccataaaaatgtacgagttaagtataatttgagagacgatcagattcaagtctattgagagacaatcatcaagtttatattttctccaaacattaaacgagaaatattttgggttctttgttggagatgaaacgttagcgcacatggcggcgtggacacattcgtaaactacaaaaactagtgttttggtacgccgcattacattattgttcgtctcttataatatacttttgttttgatagcaataaacttacttatttgtaaaaaataaattaaactgatttgcctctggtgacaaaatctttaaaacagacgattatgttttgactatatagtataaaattaaaattacatttgtttaagtacatttcctccaattcctgctacgcatgcatgtggtgggtttcatttattttattaactaaccagaaacctcacacttccgtgcgctgaaattatactaatcttataatgatataatttagtattcattcaaaatttgtatattaactttttctcgaacattttttttttgtgtttagtttgaagaattgaaaactttgacccaagagcggcggttgtagctagccactccttcgcatgtacgaccacgaactaactgataacacttttttacatcttgaaagttgaaacattaaacatttatatctttaaattaaattgtatatacaaatatttgtttgcgatcttttgttcgacgtgatatgtccggcttatatgaagttcccaattatggaatcgtttagggcttttaaatttgacgtcgcctcctataaacccaatgttttgctgctcaatatgagatctgcaggaatagaaacttgcatattttggtacgagaaatagctacacataatttaaagatataagactttgatatcatataatgaataataaagagaggaatgcctcttttatgtgtctctaaatcccaatgtggtgttaaagtatttccaatgactgctctttttgtccaacactctttagtttacattagcacatgctattattttcctaccacatactacaaattacttctccttttttcaatacgtgacaacttttttctaaccattataagtttattacattactaatcattgacaatttcattcaattatttctaagcaaattcttttgtctctaatgactgccagtttatcatgtttttccatgatagtctctcattagcatattataaaaaacctacctacgattttatattaaccaataatcaaccactaaatttcacatgtcgaatccatcataaatcagacatatccaatgcatcaagaagaaaaaaacacacaagatctttaatgtttcctcatctaagaatcgtatctaatatctctgttaacataataattaaaactaatctcccgaataaaattaatctaattcataatcacacactattcctgtttcatccgtcgcaagaagccaaaagtaagaaccaatgtggtaatctcgtaattatcacaaaatcctaagggcattatgttactctctttactatatatacctcccccctcccaaaaactctctacctcacattttctctgtttctcacactttctcgtctaacgaaataccaacacgttaaagcttctgtaatcggaaaaaatggctggaggtatcggaaaatgtagcaagatccgacacattgtgaagctaaggcaaatgcttcggcaatggcgtaacaaggcgcgaatgtcgtctgtcagacgatctgtgccgtcagatgtaccgtcaggacacgtggcggtttacgttgggagaagttgcaggagattcgtggtgcttgcgacgtatctgaaccaccccattcttatgaatctcttggttaaggctgaagaggagttcggttttgctaaccagggaccgttggttatcccgtgtgaagaatcggttttcgaggaatcgattcggtttataactcggtcaagtcggtttacttgtaccgatgatttaaagaagaatcgccacggtggtattaggagcaagctggatctattgatggaatctcggccgttgcttcacggcgtctccgagaaggctatcatctggtgaccggagagacaatcgtcatttaattccgacccggtttgattcggtacaaatttactcgtaattgcagagttttgaataatcggctgattcaatcgggttcgggttagtaattcgagtacacggtgggggatacgcaggagatggccgtgaaatgtgggatgattcgttccacctgagtcgtcccgagttcgaatccacaatttccattaaatttatttatttattgtattttctcataaaattcatttaattattttattttatgttcctttggatcaaaattatttttctgattgactacgtttgtagcctagcatttgtgttgtagtcaccatccgaacacaaaacaacaaaagagagatttatttctgaaacacttatgacttatcttcatcatcaatacacacaaatcgttaatattaatgtttatcgctgcgtgacctatcaaggtttagttttaaacccatataatacaagtggtcaaaatttgttgttagtatgttactaccgtcctcaaatttgggtttcgcaagcaacttatgacgaacccaaagccaagccacctaaacttcaaaaacaccctaacctaaatgggcttagtccagaggatatgattggtttttggacttaaatatatagacccttaactctaactttttgcaggatacagctgaaccggacttccaagatttggtcagaattgacatgtctgtttagtagcaactagaattgaggatttatgtgaatcaagtaattcggcgtatggacaatctagcccaaagataactcgtgtcatctgacaatctatctcaggaaatgaaatctggactagaaatacactgggccaagatgtgccggcccatctttactgccaactattctgaaaaaaaatgacaaatcaaaatatctagaaatttaagtccgtagattatgtcgatctggaattgtctgcgtatctaaaagcgcataaaaatcagtaactaaacatgtccttattttacattctctgcaacttgtagttctagttacaaacgaatgatgaagtaaagtggttagtaacgtaaattcgtaatcagagtagggaaaattagaggcaaaaggagaagaatagggagacagtgggacccactgttcacatgttaaaatggcactttgtcggaaaacatgaaatatttcccaaaaggtgccctctctcttttccctatcttaagcatcacctcacgccacactgcaaatgataaatcgcatatttcactattacccccttaacgttttattttattaaattacacactcttacatgctacagagatgacagaaatctcggattccttgtgtatgttttcccataacgttacaaaaatatacatctcattatgagtggaaccgttataaagtatttaaaagggaccaccaaaaaaagaaagaaaaataataggaccaaactctaataatagtctaaagatcgtactaaatccaaagcttaataaggactaaattatccaaagccaccgagagtcaacatttgacaactaatcttctcaactaatacaacaagacaccgccatcaaataccaaccatttcctacataatattgtactaagaatttcttttaagttttaactaacgatagaatcatactggaaattagtcaccagagatattacgaaaattgaaatctttgtaaaaaaaaatttactccaatatttttatatcttctcgtccgtacgtgatttcagagggaaaattaatataaaaaagaaagaagaacatattaaaaaaaaaaaattaaccgaaaacagtaacttcttatttccctcgaaaaagaatattttcacttaatccaagcgtaaaccagtaatgagaatccaagaccattgccggaaccggaaccagaacaacctcctccgccgtactccgcctcatcagcactactagcccattccataaccgacgagctacacgccgaagaagccgacgacatcgaaatcgaagacgacgaagaacttctcttactcttaacaaatctcttcctcatcttcctccactcaacaatccctttaatcccaaaactatttccacattgcttcttcggcttccataaaacgataccgtttcgatttttctcatcttcttcttctttcctcttcgtttcacaaacctcctctgcttctggatcactctcgaatctaaacataaacacggcgtgtcctcctcctcctccgccgtcaccggaacttttactctgaaacaaccaattgtatacatcccaagagatctgaacatgaactccatcgatttcaactttctcatttcctctaaatttccatctaagtctcttgatctgcagaacctgtttcgaatcaacgctaaaacagagcttagcgtcttcatcaacacgacaatcaatagaaatctctctgttcttccctccaaatctcgctttcgttgtgaaaaccctagctccaaacacgtgctctttcctcaacagaagagcttgcggattcgtcggaggtttcgccgatttagcacgagcgtaagcttctttgactgaatctccgactaatagtcccatctctccgtcaacaactacagcgatgtagaatccggatctaggttcggatccagagtcgaatttggctttgcttaagtcccagaagacttggattttgggagaaacgaatctggatccacgttttttccagaaagctaatgtgtttaagttgagatggaaagagacggcggaggaaagagagagatcagcggaggagaaagagagtggcgaagagtggttgtagtaatcttgtgaatggaggaagagattcacagagtggcctcctaagaaagttcgggaccatgttagatagaagacgccgtgatctgtttggtagagacatgttgtgagattcggatcaccggaagatagaggggacggtgattgcgacggcggttgcggtggaggatgattgtgatcggcggttgggcggagccaagacggagacattttcgtgtttacttttttttttcaagttggggaagaagaagaagaaagaaagaataaaagagagagattttcgggagttttgtatttgggaggtttttattatttggttaaagagggatttgtatatttatataaaaagattgttaaattttcagaaaatggaaaggttataataatgattggctcgaatcatacgtaaaacaagaatgtggatgaggattgatagcgatatgagattataattatgcgaaaattttgatcttgtgggcttgcaacttgtaaacttgggcataaaatctgactttttcaacttgactttcttcttatatatggaggatggatttaaacaagaactattcacattaggttgaatattacgagatattcagggttaacagtaaaaaggcgttattaactgttcgagtatgaggaacacgttatgattaacaagcctgcacacttgaaggtttattggagaacataatcaattggtataagttgggtcaattatttcacattatacaaccttttttttttgtcacattatataatggatttagaattaatacacacccattaattacatttatagtaacacatgtaggaatagttttagcttttgacatacccattgatagtctacatgtagtaataaaaattacatttatagtaacacacaccaactatttgttattttaacgcctaatggacagttaaaaaacaaaaatactataattagtgtgaattataatctgatactataattagtgtgacaattgaaaaatgtatcccttgtgctgcctgaaaaaaaagacaaattaatagtaattggttcggtcgaattaatatgatttgaacttttcggtttatttaattatgttttcataagttatattttattgatttcttgagttattcggatacgttggcagacagctaaaaggaggtggataagtacttattgagtcatatccgtattattaattaatttgatatttttgttagatctgtattttcttatactataaatcaaggtgggttttgaatctttaggttcaagaaattaaaactgtaagacaggtaaactgttttttcattatttatatagttagctacgtgtataacaacccattcaaaatttataagctatggtttatacaccaaacatttaacttattcgaacatgtattatgatataatattcttaaacacttaagtaatcacaagtttaagtttagcaagttcccaatttatcattttaacattgtttaactttttttgccgttaaaatttgggtgaaaataattttgttagccatgagtaaattgtgaattcaattggcaattatcgttttaataagactaaaatattatttttgacggtaaaaaagaagacagtaaaaataattctttcccgatctaaaatcagcataattttgaacttaataaaaaaatcatattactaaaacaatgttctcccgagtaagttggtatagctaatgcaaaaagagtccttgttgtctcatcccatgccataatctttggatcatatccacatgttttttgattgtacaagtgagatctttgatagcaataaacaatttcatgtaataattacacttacttgtagctagcaatatggtttgcttcaaaattactctgtctcctatcttttcgagtactttcaaatcaaaggaggatatttgtttcatttattgacaaaaactcgtacttccaaacttagtctggacaatactttaacaagaagaaagaaagtatatatatatatagaacataaagttatctaaagttaattttgaagaaatggtggttaagagagtatgtatacttgattttgtttaatgaaattataagaaaaacgaaacgattttgagagcaatggttgactgaattttctcatgtggaagactaagaccaggtcagattgaaacgacaacacgcttttagtaattcaacttaataacccctcctctctcgagtctcgtcgaccttcattttcttatactgtctgtccacttcttagattctcttttcaacttttcaaatacctttcttttctttgagcacctacttcaacttcattaatatcttttgactaaacggcagttttttttatataattgatttggtgaaactgtgtgtatgattggtataatcttctaccagaatgacaataatttggccgctcacaaaaatcctattaagaaggtaaccaaaaagtagaaatataggctgtgtgtaaaagaaagaaaaaaaactgtgtagagataaattctacatgctactgctaaagatttaattgtttttttacaacctctgatttcatatcttggtactaatagctgttttactttaggagaaatagtaatttatgtatttaccagttaatcatcagatccgagaaccttgtaatgggcaaataaattgtgaagataattataaggacacaacaaatatatgttaatacaaacaatgttgttccatgtgggggttttcactaacttgtgaaaaactttgaatttatttgtatttcagaaaagtgtatattatatgacgaaaaaaaataaagtatatattatatatgcattttgaaaatatatggttaataatgaattcatcggcggaatattagctgctacgaagtaattgagatctcgaaatatatatatatgattggtgggaaagagcaggttcatgtctccaagttcattattttaacgaaataatattacgtacaaaatttgctggagatgaggagctaggtaccaaattaaatcttataaacaatggctctagagttgtcactcttacgtttgcatgtgtattgtttgatactaatcttttgacaatccaacttgatattcttattttgattattaagcccaattgaactgagtctaatgactaatgagtattacctatatagaagctcatgattgatttaattttagttggttgttctaagccttttcttgtgtaagtggaactcaaaccacgtgttcataggtttcacttgtgtatgcactcctgaaaggaggattagactagtagtcttccgtacgcagttctacttctgccattgccactgctacactggctgtcgtttcttctagcggacatagctcccagttcgaactcattcactcgttttttggtttatgttcaaactttctaggtacataatcttaaattttgatccacattcgaatagacacattagacaaggtcgttctcgagtaattcctattttttttccggttcgctaacactttgttctgggtttaaccataccggtttttatttgaaacgaattctattaattgtggtttaagttccggttcggtttcgaaagcactaggagaaactaaaatccctaaattttcatcgttccctctgcttctccgacggctcgataccttctcctctggtcgacgactcaaaaatcgccggttatagttttttcttccgaccgttttctagtttcgtcattttccgtgttatttaacaagtatgtttacgttgagcttcattctctattacgatgtcttacctcgtagagactttacctagattaatcggggcatatcgagcttgatgtgatgttttaggttagtagaatcgagcttagatacatcaaatttgagcagagtctctaatactcgtgttttaggtagaaaaagatgaattttgttctttgttatgtacattagcttaaacccttgttaaaacacagttaagaacttgttggttgtttataaaatggtcttttattgaactcttttacatgatttctctcagagaaagataaggtgtggctgcaatgtctgaagcagaaaataaattgcctttcataccagaggaatggtcaaatgcagcaagttctgtttcctgcagttcgttgcaaccggttatagctttggtctgtggccctaaaaacagtggcaaaagcacattttcacgcaatcttgttgaagttcttctccaaaggttattactttccgttagcctctctttattgttcccggtcttttaatgagtgttcgtgagtctgattattggggaaaactgtcttttttttttttttttttttttccgatcaggggaaaactgtcttgaccttctacttcttataatttgaatggaaccagatttagtttgaatggatgcaattttcttaagtggcttatgatggttgctttgtttcgataagttttgctgacaattgacctttgtggttcttacagatacaaaagggttgcttatttggatactgatgttggccagcctgaatttactgcacctggtttcctttctctcacaattgttgataaatcaattctaggtaaccctcatacttattgctttcacgattcttgttgtttgcattccgaaaacttgttttcataatgctgtttcagtcacttatgtttctggttatattttctactttgtagaatcggattggacagttccatgtgtaaagacaccagagaggttagtttggatcaagcaaattttgtgatgttaagaatttaagcgacttattcccctttctcttttgtttgatgattcagatgcttcttctatggtgatgtttcttcaaagagggatccaaaggcatatttaagatatgtatataccttattcgattactatcagctacacttctgcaagtctagcgagaacaaaactgaattgccgcttgtcattaatacaccaggatgggttaaaggtaactcactctctttatcctttcaaaacaaaaggaacagattttttctttcactaatagaaatgattcacaacctttaggaattggctatgagttattggtggacgtgctgagatatgtttccccttcccacgttgtgaaaattaacatctctgcttacaacaagaacctaccagctgggttgttctggttagacggtaatgatgatgagacagctcatttgatagagatccaatctgcttaccaagacagatataatcaatcgtaagtcctgtacaatgctagttatcgaataatctcaccgatacgctttgttcgagtagttacaagtttttgtatcctgtttgtacagcattttaatacataaggatgctcgtttgatgagggacatgcgtataatcgcctactttaggcaatgctttaaaggaaaagaagtaaacacgatcaaagaactaacacatgaactcgcttcccatattccttatgaagttccaatatcgagtttaacaatcaaccatctccattgtcaggtaaaaagaaaacagtataaaggtcatatctttctaatccatatgattgatgatgccaataatggggttctcttctttttagatcccaagttctgaagtgtattatagtttgaatgcttccattgttggtttgggcattagcaccgaggtgtttgaggatttgccatcatgcgtaggtcttggtaagtttctatttatccattgcaatcagtgatcgaacatgggtttatgattatgtattgaagttggttttggatgttgaatgtaggaatcgtgaggggtattgacacagagagaggaatattatatgtgatcactccagtaccagaaaacttagttgagaaagttgatcttctattgcaaggctatattcagttacctacttgcctcttagaggtgaaggattacaggtcgccatatttatctgccaacgtcttagcttccacctgatttcttttaagacatttttgctcagttcttcgtttttactatgtgtcagtttatctacaaagtttcatgtttttttatagttcaacttactatgcaaccagggttagatcatcttggagacgcagttagttatgtgtcttgtccacacctactactaatgtcaccatttacaacttataataattttcatttgttttcgtaaatagaaatcacatgagaaaagagttcatcaacagtgcgcaagtaagcatttcaaaaggatactgtaatgttccggttacaacttctaacccaatatacacatcaaaaccacctaccggtcaatattaaaccgaatttctataaaaaaaaacaccggttttctatggtgtttaacagtgatccattgaagcacatttgatggtttttaaggttccaccaagttccattggaaccaaaggtataagagaatgcaagacgtctgtaatcaacggtctataactcggttctggctgcacgcacaaaatcgccactgccgctacctacacattcacatgctcgcatcaaaactcttgatactatctcatcaaaaccaactatatactttgcacaatcaactaaatccttctcaaacgtacctggtaaaggtgtttcaagtccatcgtatctttaatcgcaggatctatgacgcttggtaacttggttctatcagtgagataaggcattgcctgagaagaataaaaaaacacaattcaaagttggttccaagtctaagagttttagagaaacataagtatgagtttattatatatgtacccaagtgatgatggattggcattcaccgggagctagtttctccacaggttttttcccgagtaaaagctctaataacactactccaaaagcatacacgtcgctcttttctgtcaattggcctatagaaccaaacacatgcagtatggtgatgagtaagaaatgcttctcataaaaacacaacaagtttctttaaggatgatttttttttaaagtaagacttgacagattgttatttcagggtgttaccgttgagaagatactctggtgcaacgtagccaactgtcccggaaagtttatggttcttgttctttggcccatcaacaacagctagaccaaaatctgaaatctacatttcatagaaagctagagctttagacaaaaaaaacaaaggaatatgatattgaaacattatgactttaatcactgatttgtttaccttagcattgaaattgctatctaataagatgttggatgatttcaagtccctgtgaatgattgctggatgacaatgttcatgcaaatattctaatcccctaatttgaaacaaacacaaaaatagtagttgttttagtcctctagattgtgaattattgcaagttgaaacacgaaaaagtcacaggctcaccttgttacatcaagagcaatcttcatcctcataggccatgtgatcgccgaaccctgagaagatcctgagaacaagtagttgaacaaaaagtttcagtttctctcatgttcacaacttttacaagaatatgtaaataggtttatgtaccgtgtaaatgagattccagagaaacgtttggcatcagctcatagacaatgaatctcgcagtatcattcgtgctataacccaaaagggatattatattcgggtgctggagcttactcaatatctcaacctcactctgcaaaccccagagaatataacaaactcaggaagatgaaaacatggaagagttatcataaaaagaaagattggtatagcaccttaaattcctttgctgcatcttcattggcacagtctagcttcttaaccgcagctgaaatgttgttctctaatgtggcagaatatacacatccaaatccaccttgacccaaaatgttactctccttgaaaccactagttccttcttctagtatattgtaatcgatcaatgacactgttccctgctttgtagttctcttgtctaatgtttttgagcgactaaaccgattcaagaatgtgattccactacacccacaaccttcaaaacccaaattgacacattgagagtcactttctcagctttatcgaattcatcatgaatttcaagattaaggccataaaaacgtgaaaacgagatgtgactaagagaatttacctgagctcttgaggtttcttctcctatggcaaaaccaataaagcagagagcaaagtaagattataccaactaaggaaaatgtagctgctagtgaaataaccagtctcatgttgttactctcttgtttatgcaattccttctctctctgttgataatctgaacaatcaaccaaaagcattagcttttcctatcgtttcaggttcaagaaaatttggccgacctccaaaacaaattcagattcaagaaataattacattgaattttacgaaggaaaatggtctctttttcttaaaaacaaatcgaaaatgtgagtgaaaggttggaactttacggcaagtgatataagcggttacaatgaaggacatgaaaagagtgactacacagaaaatttcttgtgacccagaagacaaaatccccacaaagctaaaaccttttcaaacttttctaccaaaaagatgcaagctataataacgaacaaaaaacatcataatcattaaatgcacatgtgacaaccagcaagagtaaccagaatttgtttcttcttcatcttctaaatttctttaattttcataccgaagtaacatgcggaagtgaacaagtaaccctaaaattgaagcaatttaccaggagataaggcgggagtgaaagcagaaggttgaggagaaggagattcttgtgtagtaagggacataacacatgtggattgatgaagaacataagcttgtagtaaaacaagagctgttataacaatttgcttcatttctttttttcaacaaagttttttactttcaagaaccccaccaagagttgggaagatttagacagatttttgaatttgggttttttagagaagaagagagaagaaaattctgagtaattcaagaaagaccaagaatgtgtttttgaaagagaaagagagatttgagaaaaatattcactttactatttaaccattgttgaagagagctctgagcaagaaatggtaaaaagaaagagacagagaggattcagacgaaatacttgaggtggagcagttaccataaagaatatcggaaatttcctccggatagggaatataatttcggtattaagggaaatatatcatatcaatattaatgtatgggtcgacaaaatatttacatgccatggatgtatacatatgtcaatcaatattgtgataaggttaaatatgtttttttaattatgtctcttatgtaaatcttctggtagaattagttcacgttagttcaatttaaacaggtatcatacaataaaatctctggttcataaacattgataaaccaaaaatttacatctttgtttttcaaaatgaaagtagatttatagaatctaaatttatagaatctaaattttaaacattgataaaccaaaaatttaagtctaagaaaaagtgtagggatactttagacttgactttctaagttctccatccaaaattttaaagtaaaaaaagtaagagaaaagaaaaaaagactttttgttatagaatctaaaaaagctggtttatatgtttttccacactttttaaactagcaggatatgactggggcaaacacgaaccatcgatgtgtagaccatgaacttaacaagctccgtctaattactgcggttagatcatattatatagggattagcaacgcttgactttatattcaacatgacgacttcatttctgttttatcaatccatttagcaaattatgtattgcttttttttactataattaaatctattaggtattgaatgaattctgttcaggtaaaaagaattcgaatatggataaggttgggtggtccattctgaaatacatatgcatgaactgaaatatttcatgttatgaaactatagattagatagttagttgatatgtaactataattcaaattttaagaaactactatcacatgttaggtgaccaatgggtttgtctcgagacattaaaatatattttcttccaacacccaagaaaggccactattagctattatctttctaattatgcatattgatttgtcctgaagtatctaccagaaatcatgttctttagtcttttcatttcaaattaaattacagaatcttaaatacgagatgtgtttcttcagtacttgaaacatttgtaggtgaaagatttaagaattgtgtagaattgaagttacagaaaatgccgttgaattaaacggcttaagattgaggtggaaaatagtaagggaccttgaacgtgtggtgctgtgagtagtctacataactatcagctctgcggatgcttatagctcccttctccagccattgggtcgacataagcgtaggaacttaattaggtgaaccaagactttgtatgcaagtattatgatcaagtcatgatcaccagctgataaacacttgtctgagttacttttgaaagattctataagccaaaaaacacgctttggtgatcaagactttgtatgcaagtattatgattggctgatcctaagccaaaccaatcactgagcctgctaaatagaaatctttggcttgtggtcttggcaatacacaacacaacactcttttgcaaaaatgaaagttggaaagaaagtagaagcaggagcaggttcacaagtgaatgggttatcacttatcaatatgaatataggtcaagcaaagtgccacgactcaagttggaataaccaaagttgcaggaaaatatcaaacaaattttttttgtaactaacaatgagcctacaattgaagttctcactatttttttgactaatgacttttcaacttttcttccacgagctcgatgcatcgatatagaaccaattcaattgggttcagaagccctacatcgtcgagtgaagattcttggccatgatcctccttgaggttctcagcgatgctgcagctcacaagagttcgaagaggcagaagccattccttatacgctttctccagattcttctttgacaaaatatcactgccgactttgcttctctctttacctgcttcacattctatagctttgtcttgtcagaaaaacaccacaagaacaagagagatgaaatgacaaaaccgcactgcctactaatttgcaatattttaaatagtcagatttcctccatttacttggaaggaaatgagataaagcaaagtacattttcaacttgacattttaacattttagagggtatacgactttttacctctcgattcaaataacagtgcaaacctgtagaggttaagtgccgccaggatctgcacaaacatcacacaaagacttttgttacacaaatgtggttaaataatcgatcttcaaacacaaccatgtttctccttattttcgttctgaccctctgattcttataaatagtgaaaattctggggtcttttgttatcgcagttttccttacgacaagttagaaaacaatgcaacatcataaaattccttaattagcgagaaaagcaagctactctcatttgcacagaaaggggcattttctctatttctcggtatgtatgtaatgtttgtccttttaagcatttaccttaacccatatcattgcattgcctaaagggcttatagtatgcacatgaaaagagaaacaaaacatacttttaaagaattgatataggaaaagaaaagatcaccgcatcactctggtccggaaggagtggaggacctccctgtggaggccttaagaccaactccactagctcaataacatgcgtatcaacagccgcacaatctgtatcttgcaaactgcttttgctcatgctgtctttaactagacccagaaggattgctgtctggttgatttagcaaaagatattagttgaaatgggatacctttctcttttggaaccaaatgtttaaaaatattatctcagtatgactactgaagacattaaactatgcagtttatgaatggtcaacgccaaaggtgaccatgatggcatttactattcataaagctcagtgggatacaaatatactaaccattgaaggagaccgggaatttgtgacaagggctcttaaaacgtcaaacctatgaggagctgggatatcagaaagaacctaatcaaacagcacaaaagtaagattgtaagacgagattattaatcatctctgtttaaactttaaccaagcccaatagataactaaatttctgaatgaagaagatatgtttttaaaaaagtatatgaaaagaaagaaaagcaaggcatatggactgagggtagtcattctgtgtcaaagttggctgatacctcttctacttataaaatataatcagcacaagtcaaatcatctgaattggttaaaccatcatttctgtgtaaaaacatcaataacgagtatagatctaaagaatcagaattttgaggaaacaaaagccattcaaaagtttgtgttgttcgttctttttttgtggattcatgcttcatatagtatcaattctgcgtcactcaaaatcagttatccaaattttgattaagtcaaggtttatttaccctcttcagtgcctcaaatgtctttttcctcagatctgcgtctggcgcatacatgatcagtaatgtaacagcctggttgaaagaaacgagacacttggagcgctagtaattggtaaacctgaatggtgtaaagattaaggagaagaatattacacctgtaaagtagcgtagatgccaggcgtgtagtccgaacaatctatttgctcatcattgcattgagatgaagtaactccttttgttatgtcaagcaagaactcgatagcatgtcttttgaattcccagagcagatctccagaggaaagtatatatttcaacatcccataagcttgccaccttttcactggattgttttgaagctcatcaacaacacttcctaaaaccgcattagccgcctctgcaacctcatgggagatctttgcacagatgaataaaagcgatgcacccaagctgatgtcagggaaagaggtgataaactcatcatcatctgttcattttacaaccatgagacatgtgatacgagaacagatgcgtgttattgagaaatcaggaagaagtgtttttgagtattgagagtaacctccagcaaccgtgctcattaatttttcagtgtcattccccgtgattaaaccaagatgtgttaaaccacaggatgtcaagaacggttctaactgaatcaccagaggaatacaagaggccgctttgtctctgatgctaactgaaataatagcctgcaaaaccagaccaaatctaaggtattgaagaaaatctatatgctcataataaaagagaaaagtcagaaaagttccatgatatcgaaacaaagttggaatcaagtacaaaccgttatctgtatcacatagagacaaagtagacaacggacttttgcttcttcttcgttattctgtaaaacaaagaaaagagatcaaatcaggcaaaacgaatattcaaattagagaatttacactttgggtagtgatttagggaatcctaattgccaatttatcaaacttacagaccagttttgaagaaacgtctcgaattgaagaggcaatgcctagagccttatcaaataaatcttcaacttgcacgtctgtttccaatgaaatgtccttcaaaacgttcaggacaattggaactgcaacctttaattgctcgtagtgacgcctctggatcaaaataaatactgaaaccaggaaatttgaataactttttactgcttcagttcacgaagactaaattaatatcttcagtaacaaaactagttagggattcaaacacaaactttaagatattcatacttaagtacaatcaaagcaagagtattactaaaattgcaggtgccaagctaaaattcactttcatgagagaagtctataaattttaggatattcatacttgtgtacaatcaaagcaagagtattactaaaactgcaggtgccaggctaaaattcactttcatgagaggagtctataaatatcttgaaaacgagaaatcttcaactggtacctttagagagcccatgcaataaaggagtagaacaagtggaggctgaatgatagcaccgtgcagcatcgagtgcctggttcagagtcataaggtgatcaaaaagaacttgtaatcttcttatgccaaataccaagaaggaaaaagaaattccagatcaattacctcacaaagaattgaaagcatatcccgtggattgcatgcttccacaaaccgatcaacgatttcctcaactaactgtaaacatctgcttgatatgtctgcaaacttggaagttacttttggcaagtgaaatgacagtgcatctataacatcctgtaataaaatgaatcggggaacaaaatcataagcttggttctctaaacaaaatccttccgtttggctttgaaagcgattcgaaaactgaaaagtacctgatccatttgaggagatgataaaactttcaaaatttcatctaatacttcttcaataacatcgttctccagttcattgttagcatccaaagctacgttctcatacaaagaatccaaacagctgacaagttctgtcacaaaactctcaaagtcttgaaatcctccggcttcttcaactgactgaaaaatcacaaaattagcggcgaatttttcattcgagctccaaaaatcacgaaacagctaagtattcatcgatctcaaagcatctagaaattccacccagaaaacaaattacacaaacccgaaacgaggagaagaagaagagagaaagcttacactgaaacacaaagctaaaagttctcgtacacgacgcgaaggagaagtagtgacagtagttgactcggagctcccttcaatggacgattccataacgccaaaacttttcaatttcgcccaagtttcgttcacagtgagagtattaataatcgcgaatttaaccatatcgtttggttatatgaatagagtttaaccccggatagtctaattctaactaagaatagtttaatacctgtacccaaacagaccacgttctctctctcaacactttctcgttttcgtctccttcagatccggtgcactcacgctcaccgaaagatcctcactctccttctctgatctcgccatggaacctgacgtcagtatcgagactttgtcgatcattcggatcgccgtccttccgatcggcactattccgccgacgcttctccgggactaccactcgatgctgctccgtcatcacacgatcgcgctctcagctattagctctttctacactgaacatcagaaatctccattcacgaatcagccgtgggattccggctctctccggttcaaatttgtgcttggtggttctcctccgagtccttgggaggattttcagtctaatcggaagatgctcgccgtgatcggcctttgccactgtccctcgtcccctgatcttgattctgtcactgaaaaattcaatgtcgcttgtaagagttattcctcggctcttgtccggcgctgcttcgctttctcccctggcgattcgcaagtaagtatattagtttccatgcttcttatctgctatggcattcttagctcgatgccgatggatctagctagcttttttctgatttgtctctacagttgatagtgatgtccattttttgtaccagtgatttagttacttgcttatggatgcgttagattgacgatttactgaacaatgtactgtcttttgcagcttgaagatggagacaagaagggtgaaaatttgattttgtttcctccatctgacaagcaaactcaggagtttcatttacaaacaatgatgcaagacattgccgcttcgctgttaatggaatttgagaagtgggttcttcaggcagaatctgctggcacaattttgaagacgcctttggattcccaagctagtctcaactcagaggaggtttatgtctaggtgtcctataatttggtctacgtttcatttcttcctctggaagcttataacttattagcatagtcttctaggctcactagttttgtttaatgcaggttattaaggccaaaaagcgtaggctgggacgtgcacaaaaaactataggagactattccttgttggctggttcacctgttgatgccaatgctcattattctactgctctggaactggccagattgactggagattacttctggtatgccggtgccttggaaggcagtgtttgtgccttactggtaaggctttatgcaaatatatctctaaatgcattgttcttacatttttaatagtattatagtccaaaaacatggatagtgatgtgctgtttatcgaaagtgcactgattatgaaattgctctcatctgtccctctttaattaagtttgcaatcatcttagttttccgttttcttaatattaggtagatcggatgggtcaacgtgatgtggctttagaagatgaagttagatatcgatacactaatgttatcttgcactacagaaagtcatttattcaagaaattgctcagaggtaattctaccaacctgtttggctttcttcttcgataaacttaagtaatagcaatcaattctcttccttgcagagtttcgcccctaagctttgaactcgaagctacccttaagctggccagattcctttgcaggtatcattgtatgctctctatttctttaaattatcatggtgtggtttcctttcttgccgtctcctgcttaagtttaaggttgctatggtatttttgtctagtaggaagctatatcgctactaaaatttaaatataaactcatgggatcttgtgtgtgtgtggctttgatcctctaaaactatctgcaacattcaacttataataccaatatattgagattactattaagtattaagtggcctagtggaggatggctgtatgttaatgttttgtgattgatggtgatgttagctgggaaaagaataattattacgttttgaaaaagctaaaatacatgggttttccgtttagtatgaaatgatactctctggttgtggcagcttttatgtttttttaaccttctggttgcatcctcatttttttcttggtatctttgatcttaatcattcttacaatgtcattttatgtgttgtgcaggagggaactggctaaggaagtagtagagctattaacaaatgcagctgatggtgcaaagtctttaattgatgccagtgataggctcatattatatgttgaagtagcgcgtttatttggagcccttggttatcaacggaaagcagccttcttctgtaggcaggtcgcccaattgtatttgcagcaagacaatcgattggctgctatcagtgccatgcaagttctctctatgacaactgatgcatacagaattcaaagtagggcatccatgtcaaaagtgtcggttaacaatgtgagtttgccagcataggcattatttttcctctcttgtgtttgattgagcatggttttctggagttttttttgttatcatcacttttcactatcttggtatttatccatgtatcatactttgataatatattgtatcttctcttgtgtttgttggtaaaggaaactgggcgcctacctgacgctgggaaaatgcatcatcattccattgtctccctgttcgagtcccattggagcactttgcagatggttgtgcttagggagatactcctctctgctgttcgtgctggagatcccttagctgcatggagtgctgcagctaggcttctgaggtggcattatcctctaattacaccttcaggtcaaaatggacttgctaattcccttgcaaattcagcggatagattaccttctggaactcgctgtgctgaccctgccttgccttttgtaaggtatgtttatcagcagtcaacctttttgctctcagagatgttttgcttgtgcactctcaccatcatgaaacaacctaacttggtcatgttatatttcctagcactctaagtagagcaacgagatcagaaaaataagtaataatctcttttaatccatctcttgggcttcatatatgcccaatatgtgtttattttcaggaatgtgttccatgtttggttcttagctgactctggcaaaactgtgtatgttttggcaaattttaatggttcttctaagcatgattattttaatgaaatttcaggctattctctttcccactccattcctcccaagtggacatcgtaaaacgcaatccagcaagagaagattggtggacaggctctgctccttctgggccatttatttacactcctttcagcaaaggagatgccaacgaaagtagcaagcaggaattgatttgggtggtcggtgaaccagttcaggtcttagtggagttagcaaatccttgttgcttcgatttgcggattgatagtatttatctctcagctcactcgagtaactttgatgcgtttcctgtcagtgtggacattccccctaactctgcaaaagtgatcacattatctggtattccaacagctgtaggaccagtgacaattccaggctgcacagttcactgctttggtgtaatcactgaacatgtgttcagggatgttgacaatctgcttcttggagcagcacaaggacttgtattttctgaccctttcagatcctgcggatctgcaaagctacgacatgtatttgttcctaacatatcagttgctcctccattgcccctccttgtggctaatgttgtgggtggtgatggtgcaattattctgtatgaaggtgaaattcgggaggtgtgtataaattttgcaaatgctggcacagttccaatagtacaggcacatgtctcgctctctggaaagaatcaggatgctgttatctcgatcgcagatgaagctttacagtctgctcttcccttgaaacctggggcacaagtgactctgcctgtgactttaaaagcttggcatgtgggtccaactgattctgacaatactatgagcagtggcaggaatgctgcgggtaacacaggaagaccaaaagacggaaccagtccatcattgcttattcactacgcaggtattcatttcttccttgacgtatgtttctatgtatcttactttttcagtgcttcatgtatcctcacgatgactaattactaaaagcatttttgtattcatatttttgcagggccattgtctaacaatggggattcccaagaaaaagaatctatcgtgccaccgggcagacggcttgttgttcccttacaaatttgtgttttgcaaggtttgtcgtttgtgaaagctcgtttgctttccatggaaatccctgcacatgtgagtgacaaccttcgggatgaagacattgaaagagagagcaatgcagacagccttgtcaagatcaatccctttaggggaagctggggactacggtttcttgaacttgagttatctaacccaacagatgttgtttttgaaatcagcgtcttcgttcagctggaaaactctgccaaggaagatgattcttcaccagtacaagattctccagagtatgaatacccgaaaacaagaatcgaccgggactattctgctagggtactgattccattggagcattttaagctaccggttcttgatggttcattcttcacaaaggaccctccacctggtagcccttcaagtagtagaaatccgagcttctcagagaagaacacgaaagctgagataaacacattgatcaagaatctcatctctaagataaaagttcggtggcaatcaggaaggaacagctcaggagaactggacatcaaggatgcaattcagacagctctccagacgactgtgatggatgttttgctcccagatccgctaacatttggtttcagactggtcagaaacggtctggagaaggatcctgagacaaaggctgagtccccattttcaaagggatctgttctgtcacatgaagtcactcctatggaggttctggtccgcaataacactagcgaagctatcaagttgaatctaagtgttacttgcagagatgtagctggacagaactgcactgaaggagctgatgccactgtcctctgggctggtaagattcctgtcactaagtaataaatatttgtgtaacatagatatttgctgccattatagccgtgtgtattacaatgagatatgtaaaaggtggcttatacttttgtcaggtgctcttagtggaatctcaatggaagtagcgccgctgcaagaagcaagacactgtttctcactcttcttccttgttccaggagagtacacgatggtagcagctgctgtaattgaagacgctaacaatgtactcagagcacgagcaggaactgcttctccaaacgaacccatcttctgtcgtggaccgccttttcatgtctgtgtagctggaggtgcactgtgattcgttaaccaaatcaggtcttggcattataatttatactctgttttttgctctgttagttgatttctcgagaatcaattataagttccgggtttaagtatgggtctttataaatatctctataattgcttgtgtgtttgtctctgtatttaccttgggtcatcttatgaccaccatgcatagactatgcttttttggaattttacggcctcggttctgagactacttttctcaaagtaagtgtttgtactctgctcagtgggatcactttcagtgataaaaagaataaaacgattatagcataatattagcaaaaataaaactatttaaccatgaattccttccctattgtgtattgaaaaggtccacagagcaatgacataactttcaccgtcaaataaataccattcattgatataatcaaacaaggcagtgaagtttccccaaagctcgtatgtcgtgtattagtggccttacggattaatcaataactaaaaaataatacaataatttactttagaaatagttacgattattaatttaaagcaaaaaaaaactgacacaaagtatctttggctaaagaggattgtcctattctattgcgtttgttattttaaaattctgtgcaatttatctttttggctgaaagacatgaacgaagtttggtttcattttgtggttgtaatacgctttcatgaggttatgaatatattttagtcaattactacgtaccaataataatttggaaaaaccacccaccagctatgtatgtttgcgagtatgattattggcatttttttagttatattactagatttttgttggggacttctcctaaattttatccttccaaataattgtagtcaactaactaatttattacataagtaaatttatcattgaaggtcttctcatttgccgcttcgtcggttacacatttacaaaaacacgtttcaacaattaacctatactattaactcactaattatccccactattttcttacatacgtgagatttatggccgaacaatctttataaaattcataaatatttagttaaacattgttctaacttctataatgtgactaatatatcattatattgttcgtagatattgatctaaataaagattaatggcatcgtaaaaatattgacttgatcgatattaagtgtcaaatagataaaatccatatgtgatattttcctaagtctcagattttgtagtcttgattattttttatcttacttctaagatatatacatgtaataacttttgatgtgtagttgatatatttctataaactacaaagtatcgataactagaaggactattttttactattataagggttatactatttttgactaaaaagtcaatataattaatgaaatttatttagtaattagtgtgcattttattttacctcccattaaattctcatattccttattaccagcttaattttatcccacctttgtgctctcgtctcacctccccattctacactaaactttttctcctttttcttccatggaagaacagaaaattcaagagaagagcctcgctcacggcgctgcaccaccgttgacggcggttgagagattcttgaacggccaaaagaacgaagccttgtgcttcaagaaacaagaacgttctatagaccgaccgatcgtgaagacgacaagggcgattgagattagaaatgaaaacaaagagaacatgatgtttggtccgaggaaggagaaaaacttggccgttattggagaaatcgtcgttaaaggtgcagctaaagattatacttgcaaggatataacaaagaagcaaccatacaagaatatcatcaaagggcaatggacagccgatgaagacaggtatatatatatactatatattataattatatatgtagatcttcatgcttctacataatactgtgtttgcattatatatgatatatattttattttatttttgtcaaaaaaatgagtataatcattatatatatgtatataggaagttgataaagttggtgatgcaacatggagagaggaaatgggcagtaatctcggagaagcttgagggaagagcaggcaagcaatgtcgtgagagatggcataatcatctccgtcctgatatcaaggttttcatatagatctgtattcttacacttaaaacttcggatatatatgtaaacatatttgttgttttggttttgtagaaagatagttggagtgaagaagaagagagacttcttgtggaagcacacaccagaatcgggaataagtgggcagagatcgctaaactcatacaagggcgaaccgaaaactcgatcaagaaccattggaatgcgacaaaacgacgccaaaactcaaaacgcaaacataagcgttcaaaaaacgcggatagtaacagcgatattgatgatctctctccatccgctaaaaggccgcgcattctcgaagactatattaaaaacatcgagaataatgacaagaacaatggcgagaacatcatgactactagtggtaacaatgttctttcgacttcgaattatgatcagttcaattctgaagactctacatcgtcactcttggatgatccttatgacgaagagcttgttttcctgaaaaatatctttgagaaccattcgctcgagaacatcaatttgagccaaggtacggagataacccagtcttcttcatctgggtttatgatcgagaaccctaaacctaaacctaacttgtacaacaatacttttggaacacatcttggagcaatggtcacagaacctgccaattcttcccacctcgcatctgatatctacttatctgatttgttgaacggtacggcgtcgtcttcttcttcacttacttttctgtcttccaacaacaatgagcatgccggtgaaaacgagttgcttttgccccaagctaactccactagcgaaagaagagaaatggatctgatagaaatgttgtctggttctactcaaggtagcaacatttggttcccattgttctagctaccgtatgatgtatgagatctcattatcatattgataattccctcttcttatatttattttagtgatttagtactatttaattttatgtttttttaaaactaaaaaagaacttagatatctcatattcatgtttcttttcatatcaaaagaacaccaagtttatgcgctacaattgatagtcagagttttttcttctactttgtgtaatcttattttgagtgatgagtgatctcatattaagttatgatttccgtctactttagtttttttttttctttttacaatctaaggtgagattgaatctcatgcacgtttgcgaaaggtttcacttttcatgcaaaagccggaaaattaaacattgttgtacgatgacataataatacataaaatcctgaacgttacaacttacaaatacgttatataaatctttattatgaattatgaggagtgataagaaaactcgagaacacttttcattttgtgttcaattttccctattatttttgtttatttttactaaaaatatcagttaagtaaaaagaatgtgttaacccattaacgtacctttcagttttgaattgaaatattaggttgcgatcgtaacagtcatttgatagctagtaataaatattttttgagtaattactatacaaagttcattcaaatcagagtttatgtaataaatgattagtccagctggggggaaaaatgattattcctatatgcgacaattgttataaattacatatatatataattagtactcaaaatttgtccaaaaatatataaataattaatactcaaaaaatacttggtgtaaaatctattgaatattctactgaagaataattaagttttgaagtgaaaattgcatttgtttttattaactttggactttaaatattcatatttaaccatatttagggaacgattaaagattatcccaagtaatatccgaattttaatagatatatctagacaaaaatacgtcccggtgatatatacggatcagattatgttgatatgaatgaaacagaaagaaatcatatattttagatggctacttaagatataactctactgcatatgaataaagggataatacataactaatctctttactttgtttttctaattaaacgtgggctgaggctaagagatcggcccaaagagtgaatatgggccagaaataacttatttgttatcaaaggtagccgtactcgccgactaaatgattttagttattaaattggtacggaccttgattttgtcacaatcagaataggtcgagtaatttgcttaacttcttaagcttattttgaatcatttttttagtttgagttattaattaatttagatttggtgcattgtcaattaatttgtgtcaaattgagtacaaatgtgagttaggacttgagtctagctaataataatagctccaccattatatcgtcaccaacgaaaacttaatatgcgtaagttataaaactttgagcttgcaactaatttggttttaccatgatcctgagagggcaaagaatatagtaatccaacccaaactgttgactcccatatagccttgcaacattcaatgagtacaatttgagccacatcggattccaagattaatgaaaccaaaaagataaagaaaaagagataagtaaatatgctacttcagattggcctaagattcccaaatagatggcaaatgcataactaaaagtaagcaaacaatgcggagagatatggacaacacagagaagcattgaagaagaaagcagaagagtgtagaagtggtccattacagaatttaatttcattgaaaattcttcttctttttcttttcttttgatgttttgtggtccaattttggaagtggacaaagcctaactttgagtgttaataagagaagcggacacttacgccactcttatattagcaagacatatgacatgttttatgttactctgtactattgaggcaatactattgttgatttagtgtattaatattattttttgtgtcgtcatccaactttagacctaataatccatgttattaacacaagtaaaaagtgattatattactatatatcctagttcatctgtgtttatcttttattcttctaaatatatactctaagaacctcaacaattcaacgtttcattgtcaataatctacaaaaatgtgaatatggccacattctcacgtctccatctcactaatgtacaattcaaaagtatataataagataaaaagcttataatactacacttatttcgcttatacatctcatcaaaagttatataagagaaaggttggatggggacacatttacaacattatttgatcaagaatgaactcttgtttctgacaaaatatatatattgcatgactcactgattatgtatgacatatttttttctttaatctgttatccatcaatattaaaatattatatatgtataactagtgttaatacacaaattatcctaaatttacaaaactttttcaaaaaaattaccctaattaaaatgagaagaaactcatgaaacttcaaaataacatggacatggaactcattaaacttttacatgctcacaacaatacatactcaacatcacactatattaacgagtaagagacacacatcagtacgtcactaaaaacataagcatcatagctgatttaatttatcttttatttgtccaaagatatcctttaaaatatatataaaattaacgttgtaagaaacatgtaaaataaagtatttttatagaaagaaaggagacttttcaccagtcataactctatattcttttggcacaataagtaatggtcacaacacaacaatgtcttcaccaaaaccaaagaactaattgagtaagaagaagaaccaaagacttgttcagcaatgtgaataaccctaatctctctttctcaagagaggccaaatcactcttcttttctccgttttgtctactttgaaacgtttctatcttcttttagtaggatcgtttgaacatttcccttactttctctattatttgatatgatcatttagatttcttttatatcatggaggggactacgatttgttttctctatctttttggagcagaagatcagattctaataaaatttgataaatgaggtttttgtgtcttgtaccgatatgacttacacaatatctttaattaaccagttttattgttaataacatgcattatacaactttgaatatggattttgagacattaacgatatgagtgcatgccattatatggtcaatcttgaaccaattaaaatttgttttatatgtatatctattttcacataacatattgttttaccaaaaaaaaatttattatctgcttttgaaagaaaacataacccagttatctctctcaataaatttcatccaacaacattcccccctctcaatgcgtatatttattaaaaactggatagtacatgatcgcggtgaacatgaaaaactctatagtatacattaatataatggaactgttagggcgtattagacttactaaaaaattataagatataagaaaaagaaaaatcctatgtaagaaaattctctcaaacaaaggaactgttagggcgtattagacttactctaatacgctataatgtgaattacgaacaataatcaaagcaataagagaaagtaattcactataggaacaactttggcatcgttacaaaacaaagtgaaagatgaagagaaaacatcctttacgttccatcattttcatccacaaacctgacaaaaagcttcctatgttctttctctactctatctttataataaaataaagtatttatgttcttttaactcaatgttttgatgtatatgttgtctatattgttaggttccttgtaattttcatctatcacaagccaagtagtgtacaacaaaacaaattaacaaaagaaagcatcatcattatgagcatcatcctcgtattagattcactgtttctacaaacatcttttaggaaagaaaaaaaaaattccaacaaaactgaatatctttattttgctgagatgacattgttttgtcttgtgtgttaagttcttgtgttcaatattgataaatataatcaaatggcgatagttgacaagtcaccaggccagcgatcaaatacaatctctacgatcatcacatacttattcaaggctagctgcgtctatatattataaaattttcatataagttccatattagtttttgtttgtttgattggcaaatgcacggttttaataatcttgttagtcaataaagtttaaaaatcaatcgcaaaccactatagattagtgtttccataaagaagattcattggcttatgtatcaatgactatttaaaaaaaaaaaaaaattgtaaactagacaagatttttgctaacaaccccaattatcattaactaattaattaatgattttgtttctgtccctaatatagacagcacaagttgttgattaagattctttgtaccaccctactcttagctttggtcctagacaatcaatataattaagtaggtccaaatccaaggcttgtttatgtgaatgtgaaataagaaataatcggtgatttttattcaaaaaagaaaaaataatcggtggtggtcgttcaatcagtaatctcgaggtccgaaagcacaatgcatatcacgagttcaagatttactggtgattacaattaacttggcacattgtaattacaagatttttatatatatatttcatgtttcactaaccataaggtaaggaaataaaaataaaaatgaaggagtgattagttggagccgtaggccgtagggaacttcgtcgtttctcgtagaaaagagtgtagggacgacaagagttgttgtgaaatggacgactgtgatcgttaatgtgactctctttgtccaatcatgtgttagctgattccacacgaaacatagaccttatcacactggaagtttacttgacacatgtctctactcttttattcatcatcactcagaccttactgtttggatattttggtggattcaactttgtcgtttagtctcattcatcggctctctcgcgtgtatcgcacgcaaatagaacactcaatggccaaatcttggaagcagtcaatggccaccaaccttcaataaattaccactaatcattggatagttctaagaaatgtctactttcatatattaatgccaattttaccggttaaattttgacttgacaacaaaagatttaacttttcttatgaatacaaaatcaaagaataaatttaaactgaacaattggtatacgagatagagaaaccaacttcgatcaaagtatgagtaacgaagcttgatcaaagtatgagtaggttaaagttaaattacttttaacaaggtagagacaggagtggtcgtggatataggttagactagtctaagtgatggagcttaattagacggttacgaattgttttgcatcacattcctaataagtacattagatgggtttgatacaaatcgatggatatttatattgtattgcttccaattctcatattaaaaacatttggaaccacatgcaaaaatttatatgcttgtaacataagtatataatctatttatttgtttattttgtcaatgcttagtgatcaaattaacaaagtataagtatatgtatgtttctataatatctgaaatatttattcctagataatatgtgtatgccaaacatttgatatcgtgtatctgtaatcatgtttttttagcagaagtcatgagttcataccaaaattaatatgcaaattttatgttttttctgatgatgggattaaatttgtcgtacttttttgataagacagcaactataagcttaagtcaaatttctgaaattggtcccccacacctctaaatttttgaatcgtttgtattttttttgttactaaatacaaaataatgtaaaatttaaatttgtacggctggattctcttatccgatctatcgcatgccaatttcttcagggaccacaattagaggaaatcgttatcacgacacgtgtcctccgatatttttggcgccgagtagtgacgtcattattaatggtcccctccttccttgcttttttcccattcgtctactctcctttttctttaacaaattatcttttttttcctccgatattcttcaaaatttgttttaaaatcctttgcagatttgtgtaatttatttacttttgcttggtaccaaaaacaaatagagcaaaaatgagcaattctttttgataagcagaaaaaaatgttaggaacgaatgaagaaaaagtgatgcagctatttccttttactgtcacttcgtaattcgtatcattcttttgccgtcaacttctaccatctcttttttttgtaaaacgataaaactttttgttgtcgctgtaaatgttagtaatctgacctaatcccaatttattatggatcaccaaaaagctggtactctacaatttaataataaaagaagaagaataaatataggaataaatcgtcttttttggtgtaagctacatataaaattcaaaccgtcaaacacacatacacatcgaaacccttatatttcattttctttctgttttagagaagaaagtttctataattgattgataaatctgaacatcaaagctaagaatttctcttctttttttcttcttaattcatctttccctctccgaaacagaaattcaaaaacaaattcaacacgaaaacgatggcgtttcataacaatcactttaatcatttcaccgaccaacaacaacatcagcctcctcctccgccgcaacagcagcagcaacaacattttcaagaatcagcaccccctaattggctcctccgctccgacaacaacttcctcaatctccacacagctgcctctgccgccgctacaagctccgattctccttcttccgccgccgctaaccagtggctctcacgatcctcatccttcctccaacgaggcaacaccgcaaacaacaacaacaacgaaacatccggtgacgtcatcgaagacgttcccggcggagaggagtcaatgatcggagagaagaaggaggcggagaggtggcagaatgcgagacacaaggcggagatactgtctcatccactatacgagcaacttttgtcggcacacgtggcgtgcctgaggatcgcaacgccggtggatcagcttccgaggatagacgcacagcttgctcagtctcaaaacgtcgtggctaagtactcaactttagaagccgctcaaggactcctcgccggcgatgacaaggagcttgaccacttcatggtaacttaacttctctttccttcttaccactctcaattcccattattttattccttttcttttcttttggaaaataaaatcactaaaaattactttcatcttttatatttaaaacggtttgacaaatttgaatattttgttgttaattatctccaaatttataaaagtaaattagagaagaaaatcaaaaattctttctagacttgtactttgcaccgacagacatgatcagtgggttggataaatcgtcagttaaaaatttggatattagttttgcacagtagtaatttgacagcataaggtttattttgagatagatttttgctgagtgtaagtgattgagcaatttcattgattgcagttacggatacagtgatctgacaaaaactagtttgtcactttctgtatctatatcccatattttactgttcatggacgtatttgtatgattgtatctgttgtctgaaagatatttccatgtttttgtgcagacgcattatgtactattgctttgctctttcaaagaacaactgcaacagcatgttcgtgttcatgcaatggaagctgttatggcctgttgggagattgaacagtcgcttcaaagttttacaggttagtttttaagacttctactaaattatcaactttaatttgtcatttagctgttatggtaacttttgtatttcactatagtattgtaaaagacacaaggttcttttattttatttctcatttcaatgctgttttttatatttagtacctacttcttgaggttttaatttaacacttgttttgttgaatgagacaggggtatctcctggtgaaggcacaggagcaacaatgtctgaggatgaagatgagcaagtagagagtgatgctcatttgtttgatggaagcttagatgggttagggtttggtcctctagttcccactgagagcgagagatctttgatggaacgagtcagacaagaactcaaacatgaactcaagcaggtaactagtgaaatatactatatccatcatttactactacacatatataagatcaatgataacaaatccttcacaccttattatatatcgttgtagctaaagtaaatatgcttctatttagtccaatcaaccaagaacttgtcaaaactttatttttgatctacaaaaagactcaaatgaatttatgatttttaattgtctgaagcttgtttgatgagttgtcagtttgcaacatctacatagtacttacacgcacttatatgcatgaaaattgtggtacacactatatatagttagcttaactaatgatattgacccatgtttttgtgaaaagggttacaaggagaaaattgtggacataagagaggagatactgaggaagagaagagctggaaaattaccaggagacaccacctctgttctcaaatcatggtggcaatctcattctaagtggccttaccctactgtgagttccctctttctacttcttcagtcactcgcatgaacacgcctcgtgggtctttacctagttctgtcccgaaaatctttgactacatcatttttgcaacttcatatgctttctcaatctcctaagttttaaatgaatcatgtaaattttgacaggaggaagataaggcgaggttggtgcaggagacgggtttgcagctcaaacagataaacaattggttcatcaatcaaagaaagaggaattggcatagcaatccatcttcttctaccgtctcaaagaataaacgccgaaggtactttgcaccaacataactttataggaagagtatccaagaaaagacaaaatatgatcacacgataagatacaatctctgaaatatatatatgttaggtgtgacaaagtttagcttgtttatgtatggttagattaatgtttagttacattttcaagatatatggagtcattaaatttggagggttttctttatgaagcaatgcaggtgaaaacagcggaagagaccgttgagatcaagcttgcatgtagagatccaaaagctttatagaaaggtggaggcatgaagacaaagaattcttacacaacaaacgtaggacgtaattttgtgccagtacatggtatggctttcatatttggtaatgattagggccacacaaaattaaaccccaaagcatgatttgtaatatgaggttttagatggactttatgataggatcgtcagtcttcactgccatctccattctccaccatcaatccatcattatatcttgtgaataacatggaaatttctcgttatgcatttaatttgtgcaatcattggccgtaatctacacaaatatacatattaatttagcttgaatatattatctcaattaatggtttcaatttttttgttttgttttgtgagtggaaccactttttatgtggaattgttaaccctaatgccaaaatctaaactctgcgaaggtcgccagcaaacgaaagaaagagattatctccgccgttgtcaaaattattaaaagggattataaagtttttcaatttgggcccctttcctgcgttttctttattgtccattatgggcctcattgtctctagactctctaccttacagggtttgctcgccgacgtttcatacatagtcctcttgtttctaaggatgccgattaacacttttcatttttatcaacaaactggcttgcaagggttttgaacctgagtgatgacctaccatttctatccatactataatcagatttttttttgttcttttttataatcaagttggtgaaataattaacaacaatactagcacaaatcattaacataatggttcatacctcatagccatataagatcatgaaaaagttatagttttagaagtttgtttttatttttagttaaaatttagtttttccaattaagaccgagttattagttaacaatgtaaaacttaagtaaatgcgatttctttggattggtttgattcgactacagtaaaacataggtctttgttttgttttaaccataataaaatcaattggattataaataactttagttctaattccgtttacacatttaggtttgcttcaattataatccttcatggagatagatagctagattagtggtggtaataatgtatgagttgagagagtctctttttaggtagaataagattgcacatgacgtggcattgtgaacgttgtggggttttgtgattggtcttgtcttctacttacaagacagtcatatgagaggagcattttagagctggcccaatcataaaagacagctagctctctgtgactctgtgttatccgttatgttgcagcagcgacgaaaacaatttgcttcttcttcttctcttttgtccttatagataatacttttcttttcaaaatcaattcacaattgctgaagatatcaaagattcgttatctgaaagtgacgcagaaaaagtacacaaaataaaagtgttagtgggtaactggaggatagatagagaatataaacagagaggacgacaaagaagttcaacattctctctagtttatcgcgcgcttctttctgttacacgttagccaatctatgaggaacattttctgatttttttatatgtaagtatattaggataatcattgatacaaatattcgattcatctggtgtttctctaaaagattaggatatttatgggagaagaagctcttcctcgaacaccaatacgaggaaataacgttcaatgaagtttgacattacatcttaatattatattttaagatattttttaatatgcgatgaaggaattcatctatgtagtacggtaacaattgcaagttgaggacgtcacgatttcattagtttttatggcatatctatattcgtcgttggggacacgatgcaagtatattatttttttttgataaagcaaactttacagttgacaaaaaaaaattacacctttacaatttacaaaatatatgtttaaaacatatcataatacatttgttaattagaaacactatggatttatatagaaaatgtactggactaatggtggatacaaatatctaaaatggaaacaatcaatgacgatgattgatattgaatgttgtgactcgataggagatcaagtctagagatagttgtaagggaaaaagtagaaaagagtataatacactaaaaatgtatagtagacaaaacgagcaagatttgaggcatcagaagagaaagagacatgtcgaccggtggcaagtggtaggtatcactatgtaacaacacaaacgtcaaaacatgtgagaaagcgtttttgcttcgcttttctttttcaattttccccacttcacttcacttcacacagtcacactcttatcctcagtatctccacttcttttttcaatgaaatgttgtggataaataatacgataattggcatccactatcttaaaccagctttgtatgactatgcccgtgacagcttaccagaatctctgtgttttgattaatactatttccagacactaaaggttcttttttcctaacctaattcataattagtcgaaacgtaaagattgattcttctaattattaatattcatatataattccagtagctgaatcaggttcctgtgttctatctaaaagtatactatacaaataaaaacctttttcttctcgacatgagtttaatactatatgaatatgactacacaaatatttttatattttttgaaaaagataaatatgttgatgttgtatacccaaaaaattgtgttttagctccaaaaaaataccaatgtcttgcttcaacggtctcaatgatcacgatccataaatcataaattttataaagttcaaacgtttctagctacaagctagtttcatatgatgccgacacattaattcatagctttcgtctcttgtcctgtaattagtcttaaatgctttatttcacccatatatagcttttcacttgactcacgtttcaactccgttctaccaacactgatttaatcctcatcagttcaaaaatctccctcactcatcattctctgctatagttcttgatgaataaaaaactctaaccatctcttgttccatctaaatacaatgtggtaattaatgaacgctaagatcaaatcaagatttgaaatgatggaatcaaatatgcaatgattaaccatctattagatccacaccattattttagggtttgtccgtaacagtttatgaacaattcaacaaagcgcataaagtgaaatggattaaatttgtaagaaacatagaaaatgtttctgctttttatttgcacacatcaattttacaagtatatcaaatcaatatggcgagagagcatttacatacacctgacgtcatattcttacgtcatttctccggcgaacagttacattccaccgtcacacacaagaaaacgaaaagatatttttttaaagaatctttttgtaattaattattccgtcagaaagagatcaaatcaaccgtcgccgatctcgtcttggtcaccggcgactgaggcaacctcgccgtgaaattaggaaaagaaccatcgtcatcagctctcacattatcctcgaaattgagcgcgtaactcaacggatcgtaactgaaatctccaggataactctggctatgatgatgatgatgaacacaattattataagcacaattgttgttacgacacgtaaccttgatacgtgacttcacacgccggcaccgatctcttaactctagctcctgcgccgtagatttgagccattcgtaaggagatcttggtgttctttgttctcctccgatcatcatggcttctggctcaaccaccgcgttggctcctatacaacagatcggagatctcattctgtgatttgtgactctcgttgttgatcttgcggtggagggagagctgcattcgttatacattcttgatcttgtaaattttgtttctttgagggatttgtaaaaaaatacagaggaaaagattatatggtttcttgaattaggaaaaaagaagacaagtgagggaaagagaatgtgtctggtgagaataaataggaaaacaaaaaagaagaagataagagagagtaaacaaaactccgtggataatgcgtgggcttttgggcctgatccgcgttttcttgctaaagttatttttgttttgtaataataaatattgctacttgtataatatatagttttcaccatgatagtgctgctagagaaatttgttgtttttgacttgaactttaaaagaatcaatttttattggaaataagtgtatataacaaaggtgttgctactatgttatgaacaaaaaaaaaaagactttttgctgttctattgtaatttgaaaaacaaatagagttccgaatgaaaaatataaaagtgtctcctttttgcatctctaattgcttccattctccaccaccaagtttcactcgctctgcgtcgtccacatccaaaaaatagtgtctcagaggccaaaacttccaaccatctctttcttggctttgctatagtataggtttaaagtactaactatgtttaccatctcatgttctgagtctgaatctgaaagctcctcctgcgaaatgataccaacacacaaatgcaacaaagttataactatactgcgtatatgtattactatgtcaccatgattccattagttacatctgtggtaagtcgaggagaggaggtattgtctgcattttgatcagatgcattgaaatagagatcggaatgttgttgattcctcgatgatctcctacgtgatataattcttatcctccttcctgctctaatacttgtttgcagccaagagtgatgtgactatatgaagaaaaaggtcaaaatgtgtatgtgtcaatgagtgatacataaattggtgatgaagaaagagacagaacaaacctgtaaccgattttgacctgttggggatatgaacactgcacgaccaacatcatcctgagatacatacaaaaggataagtgttatattgtagtcgtagacatacacataaacgcaaaggcatctacaagctaattcgtcttaaaaatattaatcagatacatatgtacacacttgtgtttctcccatgctaattcttgaggtgccatggcctaacgcaagaattgaacttcctaagtgacacaagaggcttcctgattcaaccactctttcttgccgcaatcttcgggctgatgggtccgtaacatttacttgatccacaagcaacattgaaatattctgcacaatgaaaacaattttatcccaaaatcaaaaaacatataatggaatgtggtaaaaactcgattcaagagaagaagacaacatactgataaacattcagcaacttcaccaatcaacaatcgccttgtcgtatgtgccaactccccccaatgacattctcttgcgatcagatcctccctggaacggttaggagcttgccagttgttatcatcattgttacctagaaaattcacaatacaaaatgtcacagaaattcagagattttatttcaactaaatagaaaccatgtctaaccatatgtagcaaacacttgtcttatacgatccagatgtcgagataaggttgtgatagaatctggaatcacctgcagaatgaccaatagatataattttcatgagtaagttaaagagtgtgtaccctgagaatataagaaaccttttacaatgacttacaacagatggtgtatcatatcctcttgcggtcagttgataagaatggtcagtcagagtcccctggccaaataaaggagagatagatgcttacttcttgaatctcaagtggcccttaaacatcaaagaagatacaaaagagagcaagagaaactcactcgaccaagatttgaattagccgctgaaaaagaatttaccaacttagagaattagtattttaccaagtgttaatttagagactattgagagaatatacacctgcattactagagaatagtggaattggtggtgatccttttaccaaatacagagtgtggccttcttcaacatctaagatttaacccatttaaagaaagattcattcgaaaaatgaaaccaagtattatgagatgcgatgaaaaaaacaaaggcaggatacgataatctgataagcgttgatcattcttcaaaactcttccccggaataacaagcgaggttgtcgttccggtgaaactccacaatagtaacaaatatcctgcttcagatctcgtacaggtatctgcaaaccatagagaaataagtctatagcagaacaaatatgatgccattggttatcacaactaatgatcaaccaagaaaccattatggaatacagaaggacacaaggaaacacacaatttttaaccataaagaacaatcttacagttctctcaacacttaaggtgtgagttgtagaatgcaatatcttaatctttatcctaatcaaatccgtgaaatcgtgcgtgtctcccattcctttcaaaagcttttgaaaaacctgagaacaaaatatacaaaatccaatcagagacgaaaacactaaaccaaaccagccaaagactaaacttttatcatcagaatctccatatttggtgactgattatgaaaagcttactctgcgatcaccattcaccaccaatatacaaactttgatcaccacgcaaactcaccattcgctactaactttaatcaagaaacagagaaaacgatattaactaaaaccctagaatatggagagcgaaagaaagcatcacgaagacgaacgatgagattaggaggaagagataccaaatgcgaaagagtaagtaagaacttgagaaaatcgtacagatggagaacagatttcggtgtgatgcttgaaccctagaatctcatccacgatcctgcagaaagattcctttctttcttctttcaattctgttttttttccctctgcaagagacctctcagtataacagattcaaacagagctttatgcattgctgttataacgtttgggaaaataacaaatataaccctgatttgtttcgctttttcgttttagaccttgatatttatatttatatcataaagtcctgaacatatgtagagcaaattaaacgtttccatgtataaacggtgtgtttcaaatttcaattatagaagttttttgttttgtttccatgtgtttcttcttaaaactgaaaagaaaaggaataaaaaaacgcgataattttgaatcgaagtttcacagaatcatgtataattctcattttcttttgtatgatgaaagaagtggacttaggctaccagaatctccgagggaaaaaaaattgaaattgtgtatatgggccatgctggcccgttgtttttaagggtatgcaaaaaagatttgggttctgggtccattacccaatttaaaaatatttattcatagaaagtgttctaaacatttttttaacacagaggcctaactgctattgattttagctctagaccctattgttgaggagaagatgatgattctccataactttggtgactattttttcgtcgttttaaaactcttccctataacatgcaaccaagtttttagtgcattttataaattaatattgttgtttcttggtcttctattggcgggatgtccatcatggtctccaattctctatttgaaactcattagtcaatcatgtttaattattacagtagttttgtaacgcaactttaatttaagaaaaaaattactgtaatttcttatttggctaaaccgttaaactgtaaattgagacaattataatgattctatattcatatcatatcgtcgcatttacgagccctatatcgggaatcttttaatttcagtttcctctttatatcttaaaaagtcaatgattaatgcaatttatggagtataggtgggttggtgtgtgttgcaattacaacctatggcacgacaatatctctaggaacagtcttctcgtggggttttaacatttatttttgattaaagttgtttttacaaagtattaaacggtgcaaaactgcgaattgtacaatcaaaaataaaaagatattcaaatcaacagcaattttctaaataaaataaaaatagttatacttatttcactaaataaaatgaaagtaaagcagaaatatgaagaaaaaaaaagtaatagtaaaagaaagttcatctataaagaactggtgaactctttttagctatattccttggtttttctacgagtaacaccattttagtgtaacatgtgtttaagtctggagtggatgcattctcggtggatgtcatgtttttcgatcatatatatatatacacaatactacaataagatgcaacgggttaccacttaccagtagctaaatcaatacttgcatgaaggtaaacggttaaaagttaaagctaagataacactaagaaatcacgatacttcttcaattttaagatagaagagttaatattgatatgattgaatcctttacaaccaaaaaaaaaaaaaaaaaaagaataccatttttggtaaataaggtttttaagatcgttagtttctggattgtttagataatactaagatttttatttttttttgtgcaccagataatactaagatattcaaatgtctcttttagtggatggttattgattaaccaaatatacaaacagatgtcgaaatgaagaagaaaaaatggcaaatcagcataatatcataattattgaaatctgtacattataatattggatgctagtacaacatcattgctacaaccactttaataaaatgaaaatatcagagagagaaataaagcatcatatcctttgtaatatgattctcaaactcgagtcaaattaaatattccttacaatttactatttaccaattactatactccataggcatcgagccctctctattcagttttacattctcgaagcacctttttatatcgtgcatgagatatcggacatataatgaagaagattgtaacacgctttatactcgccaaaaaagatatcaacttaacaaatgctgataaaaatagatacagaagattactcttgatctatttttttgtgtgaaattactcttatgatcttatcgccactagagtaaaagagtttccttgtaaaaaaagatttggaacaaatatttgttttcaccgaataatttttttatcggatgtccccgaagggactttcaccaaataaaggtgagtccagatgattactagtggacttttggattgtaataagaacgaataatcacatgaccacgaccaggccatgaccatgaccatgttaaataaatccaacttccactctaaatccagtgtcagacattggatcaccagttaaacacttttggctcttggattgttatgatgctagtagaagcctggacacgtgtgacataaatctatacgtgtcgtagtaatgtggacgtggtggtgtgagtgttgtagcctattgctttatcacattgtgtgtcccgaccatacaaaaataactgttttgtccctaacttacccaacacgacctccatgtgccccgcatcattgtgatctactactattttcaattatatttattgcctagattcgtctaaatcaactgtttacaatcgtcgtacccacctaatcatatactaatgtctaatattagttttactttcttttagtttttatcaggtataatactattttagtggtattaacgtttgataggtgctactaagaattaattacacacaaaatatggattctgtcaagaccaatttagacaaaatgtgaaacgagtagatcagaccttattaataatctcaatcataattctctcttaaatatttaatcaaattagacaaaatataggtcgtttctgaccgtcaaacgtttaatatctgtagaaaccgtgtttaaaggtttagttggtaagaactctctgaaatgtatccatcaaattcttaaaattgatattctgcaccaaaactattactggcaataatctgtctaagcatattttgtattttgcggttaaggacgcattggaataagacatatattattactatggttgagttcatcaccaaattccttctgcagagaagctgttatacctttaagatagcatataaatgttctaatacatcagaatagtgttcgagtcagtagttccatcaatttgtagggactctttaggtctaatatgaaacacagttgcatggatctcctccaccgtaacaactttataccaaatgctagattcgttgttgttgttacattgcttttaagcccattcaagagtttggctaactcaccagtaggtttaaggtgaaaagttgttgaaatatgttaagtgttacgtgttgagtaactcttgactaattatgatcataatacgaaattcttaaagtgttacgaattaacgattggcattgccttccaaaaaactagctatatcaagtcctctctctttggcccttttttatttggtagtgagctgttatttcttcttctagcattaaaccatcttgaaaggaaacaaaccagcaaacgtaggtacttttaatgatggtgtcagttagatcatagatgtaactttatatgttaccttcatgttataagatttctatattgatgttgttgggtattagcaactagtattgatgaacccaaaaaaaaaaaaaactaattttgatatttattataaaaaaataataattagtaattaatatttgatgttaagagactatatacgtagaccaaaggcatgtttcagacaaaaaaaaaacaagaacaatagagtgctaaatttgatcaatgtaagcttttaatatctactacaaaatctaaaattactaaaagtcataaatcttcaaattgctattaaatttattttataaaccaaatttaattatttaaaatatgtttataaaactattcaaagtctaccaaataaatatgacacaaatcttcaaattgctattaaaattattttataaacccaatataaagtcatatttatttggtagacttttgaatggtttgacatatgtgattttagctcactaatttattagtattgaactctcttacatttattaaaactattttatgttggcaaaaatgttttactctagaatacactatacataagactgatttattcgaagccttctttagatagcctaaatttacacaaatgttgttagatgctaaacttttgtataatcttattaatctgaatcaataccgttacagaaccattgggttgtgacgataaaacaaacaaaataaaaccattggaaatgtaaatccggctcttggcaaaacaacgggcaatggcaatttacgtaattatctaaactttctctgggtactctcctacttaagagctgacatctttcttagtcatgacacgtggcagcttttttaactgcccccaaaagcattccctctgatttgtcatctcagccgttggatccgaacccgattcttttcgaaacggcaaaaccgcctcaaattgaaaaacaaattagtaatttattttgctaaccatagttaagtttcattaaccatggttaaatttgactaacccgacatagaaatacctaaatttcgaaaatggtcaaagtctttgaacgtatttacatttattgccattgaacaagcttttgctataaattcggttcctgagactcgctaggtttgccgaaccaacctcccttaggcactttctacagagcagctaatcaaaaaaaaaaaaaaaaaaccttgttcttctcttcttcttcctctctcacaaatttgactttcatagaagaaaaaaatggtgactacatcgtcacgaaccaagtcaaacggaccggtgcttcgttcacaatcaccgtcaggtcgattttgcggtggttactcaagagccgttccgtcatcttcttcatcagctttcgcttcatcaacgagttctagcttttcatctccgtcgtcagcttttttcagcaatcaccgtcatcacgagagcaatcacagtcaccaccgatctgcgtcaccgactcgtgtgaatctctacacagcgcaaccgatgtctcagtcgtttcgttactctctcgatagcagatctatatctccgactaacaaatcgatctccgtttcgaagaatcagccaccgagccataatcacaagatctcaaggagatgtatgtgttctccgacgacgcatccaggatctttcagatgcagtctacataagaacgtagcgaatccacatggtcaaggtacagcttcgtatacaacgaatggattgaatatgcgtcgatctgcgatgactaattcgctggtgagaattggtggtgttgaaggagagtgggtgagaagagctttgactactttgattcgaccttcttcgcatcatctgaaaagacgagctgcttatcagccacgtcctagtcgactctcaatcatggcgaaagctgatgagaattgattttgatctggattttggttaattcaggtttgttttgtttgttgttcttctctctttaaacgaaaaccaccacaggatttagtagatccggcgaagaagtcttgttatgaagctgaggtctgcgaagaagaatcatcctcgagaaatcgagattttgtaaaaggaagaaacacacacctatcataatttttttgttgttgggtgaaagaagatgctagaatgcattgtacatacgttctcttttttactgtttttgttgctctctcttgcgtctttgtcgaaccccaaaaaaaaaaaaatgttcggagtctcaccaaaaattagagacctaaaatcgaaaatcaaagaactgaatctaatttctgtattgaacaaagtgagatttctcattcctcacaatcaattgtgtatgtgtttgtcagattagcgttttttttttcgtgtcccgtcaagtcaacgttcgtgtactccgttgaccggcgttgtttgccattatccgtcgtcgtttctaccgtgaagcgttgcgttagttttccaggtatgcgttattcgtcgtgtcaggtatgttccattcgttttttttttttttccgttttatgttacttacatttttttgtagttatattttcgtggacattttgaattttgtttttgttttgcaggttgcgtttggtgatggagtttgaactacttgactaacagggacatgaaaattcagatggaattgagagaaaaacaaaataaattagtagaaaaatacattaaaaacaaaaacaaaagaggtggaaaaggtcttcactttctggacatatataaaaaaacaacgaaaaatctatggagggaaaaacatgactgaagacaaaatttacataggagggaaatggaaaaaaagtgttttggtaaaagagatagctgactgacccaattagaaaaatgactgaacatatggaatatattagggagcagatggaaaagaatacatatgaatatattattaatggaattgggaatcttttggattcatgaaggagtaaaacttggaatgtttgaaagaagaaaagaggaaggctatgaatgtggaaagacacgtcttactgatctggaagattttgttatattcgatcatattcctctgcgtccatgatatactttttaaaaataatttataattaattcaagaaatcttctttgaatttattaaacaaagtttgatgttttaagtttaaaaaaatgaaactcatcgaaaagctaaaactgcgtaaacttgacgatgaatgatgatgccccacattgtaatatgttgtacgtggattagtttaggtttatttgtagaatttaaaagggttttctattgtcagaacttagaagaagtcggctagtgatgaatagaatgtgttggcgaccacaaaggttggaccggacttgtgatcttttctgattgacgtatcccctcgggtttgatcggtttaacttcattccgctttggtatgttcctacaaccaactgatactaaccgagtgaaacactattgactatagttttgcaaactgttgtttcttcttctgtttagcggctctcgaaaagggaagaagtggaaaatggctcttgtgaccaatagtttccaatgtcatactcatacagtcatacatgtttcgttatgagtcgtctccacctcaagtacttgaaattattgtaaatttaagaatggtagttgaaaaacttaatgattttccacctattcaatatcagcatgacatcattggtcgactaatatttttgtaaaaattctagcaataaattgtacctaaagaataagaggaataaatggtgaaatagagggatcgtccaatttataaagaggaaaaagtggaatgaaagatgggatacacgtcttccttacctggaagagtatatgccaccatcatattgttacattattgttttattatatcacttagatatttcttttataccttttcatagttatggttcaattcatagtgatatcatatgaggtcggcgactacttgcctaaaaggaaaaatattaagaagagatatacatggaatattatattcgcaattattatcactattttttgcaaaacgtagaacaatgaatgtgtatcaaaaaaacaaaatttacgcgtgaaggcggatttaggtgaggtggaaaccaaacttgttaagatttgagaacagaataaaatcagaataaagtaaggaatcatcttccataattaagggagatactgtttaagaggtgtttaattaaagatttcatctcgttaatttagaatctttccatgagtttaaaatttaacagaaggcttgtaccataattaaatagatttgcagagatacgtagcataattagtattaagtaatacacctatcttgatggctgattaatttagttttaattattcctaagcgttacttctgacttcaatctcatgttggccctaacgaagacgtgcttatttttaaatggcttctcataaacaccacccttgatgaaaatttaaaagtgatattaaattgtgtttaacagagagaatgatgttattaaaatcaatgaaatggtagtaacatacatttggtgaggtaaggtcagaaaatgacgaaagtgagagtgtattttgcgtggcggattggaaattcctgaaaaagacttgaagataggctttgcttgtgtctgaagcgtgggagttcaaccaacttgttattcttttctttttctccaacttgatattcttttataaatactctcacaaatttttaataaattcgtccacgatatatacctccgtgataaagcataaaccgaaactcatactttctaccatttcatgaatttaaaaaattgtcataattcatcagaattaaaccttaaatcacgaatggctgtaaattgtttaccaccgtgttaatgttttttttatatatatatatatatgtacttagttagagccagatttgaaaattatgtaaaccctccacatgttatatactttgttgtctataggttatcataatagttataaatataatttataaaaaaattagcctctaaaatttatataaagattaaaaaagtgatgcagtcttattgatcaacactctagcgggttggcattcctgtgaggcgacaagtcggattgttgttcaatcgatcatatcacactagaagtctagaacgttcaacaccaatacagctcgtattcgtatacattgttcaattgtttaatagtattagtttgtcaatatcatactagtcactaagtgttctctcaaatcttccacactctaatcacacgtattgttgcactcttgctcttgtgacacgtatgcaaggttaaattttttctcatgtcaaaccgacttttgacaaaagaagatggactaaggaccatacgctattatatcaaatattttttcctccaaaaccgacttcttgttttgtcccttttcctttcgcttgtaattattgaatttctaaaatcttctcttttaagtttgattatttatagaacggacaacacaagaaggcttcacgagcaagttttccgaggattttggcctcaattatccaagttgtttaaaggatttgtgcccaaaacaaagattgttcaaatttacttgtacatgttggaaaacatgtcctacaacatagaaatgcaaaaacatgtatctaagtttaaatttctcattctgattagtaggaaaatgatcattgagctacgttattatttaatttagtttcttctaattaatgatttagacctatttcaactaaagttgtttccataagatcataatcgatattcatctcaaatgcatcatgatttactattgttgtttgtttcctataggtttctggtcaactagctcccaatattctatttctgaggatccatttttccggcaacgatcaagtcttttactatttctaagttgatagtactaatttgtttattgctattccgaaaataaacttgagggctggtcaacaacggcagttcaatgatcgagggggagacttaaatattcataatattctgctattcaacacctaatttcaaatgtgacatctagctatatatagcaaaattaaaagttagagaggcaggcacatgatgcagcacttcagtcttcaatatgattaattgataccaaccgttttaataattatgactataaatgcaagaggcagggcttatgataattcaaactttcctgcattactgttacaaattcaaactttataatactactactactttcgataattctcaactagtttgtttagggtttctatctagagccaggtgatgaaaaataatcatgtacgtattcctttgtatttcgggtgttctcaacgatggtatccgttaattgttttttcatttttttcattttcttaaacaacgttaactatacatcattatatttaaacgaatcattaaaaaactgattatcaattaagacagcagttgagatagagagaaacgagacatgagtgatgagtatgacccacacgttttcattaagatgagtaattaactctttaactttaggctttagctagagaagagccaatgttcagacactacatgtgacaatcagaacccacaaagagatgatataaaacttctttttttttttttttttttctgttatgtttcggcaatttttaaggctatggcacaatttcagttggctttttctttattcctcaaactcgttcacattctttttgtgagtttctgattctctcttctgaataattcaaatctttccaaccacacactcttacaaaaactacaaaagaagttgttgttttcctatgttcttttatttgtagcttctaaagacaccctccatgttcctagataatctacaaccactcactagaaagattctgtgtttaagaaatttaaaatcataaagggtgtttttttccttatgcttatgcgaatataagggctgttatgaatttccaagattcgttgggacgcaaatttatgcatttcacattcatatatcgagaaaaaaattggccaaaaagtaagagaagttcctagattcgttgggacacagatttatgcatttcacattcatatctcaaggaaattttttaaagtaagtctaaaaatcataagcacaaaagattgtgttcgaagcataaattaagtagtaccatgagtttccatcacattcaatcttaatcaatttcaatgatgcttttcctttgttctttctcattattcacgaatagtgaaaatataggacaaaacataacaatttcattgttaatgcatgtataataatcacaaaatcccaattattagttttgataaatgactacaacagtatttttaattaggtttatgtctatctaattaacgcctataaatttggttacaacattattgcttttttttgtcgacaacatagcttttttctttaaacatataaatgacaacacgtgatatatcaaattcggcctaatacataatgtaactgatgatgaaattgataaagctacttgttgaaacagtatatttacactcatttctaacgatacgttacctaatgctaaccaaacaaaatttcaatatgaatcgcgtacttagaacaaccatcttatattatgcattgattatataatactattcaaagtcaatgctttgtagtatctttcgtttcgtggtaagttcaaatactcatattcaagataatacaatcgggaccggtcataagttgatcgaaccacatactgcatacataagagaaaaaaatgaattcctacttagattataaatatttttattttagttttgatatatgcaatacgaaaagagtaacaactatacttactttcaaaaataaaatggacccctacaaatatatgggggccagaaacaaatgtttcatcctgctgtacaataattgatacagaaaaacggcaacgttcattgtcaatttgaatttagttgtgagattcgcgccggaaaaatagaagttgagagaagaagaagtgtaattgaatgccaaaagtgatgtaaaaagtcagaaaagagttgaaaactaaagagtaatgacaaaatatgttgcgtttgcgtacgtccatgaaattgtcaactgtcaagtgatccttccaaggctttgataacgactatcgatctttacattttgaaagtacatttgttattaattactatggagtttagaaatctcaccattttacatttgccgaaatatacttgttgtataaatacaaaattatactgtaaatacaaaaaagaacagtgtatgcgtatttttcctactttcttactttctttacacatttctggtttttgtacccaaaaataaaaagcacttcatggttcatacttcatttgtacactacagtaacatccttattaaaaagcgtaagaaaatggaatattgtttgtgaattgggccggcccatccttaagcacaattttcggcctattagagatttatgagacagaaaaaaaacgagcgttagaatatcggtattcggtaacaagaaaccaaaccaaaccgaattatatttgaactggttcggtttgattttttcgattacggtctgatgtagattaaataaaataattaaaaagttccagaagcatgcagaagaagattgaagaacaccgagataccgagatttacagaggatcaaatcaaaagcaaaagagaaagagagaagaagtagaagaatcatcatctttaaagccaaaaatatcaataaattagattagagaatacttaagcttgaagcaatctcgtctttagcctttattgtcgaattactaattaatctcgaagcagagcactctctgttccgatgaatggatctcatctaaaaaatcaccgtgtctctcgtccctggtttggtccttcgagaagtgtgaacaaaaatgggttttctctttggtttgttcataggaatcgcggtttctttcggtttggtcgtcgcatttgctcgctactctagtgtcagatccactcgtcgagctgatttggtaaaaccaatttcatattttcgtattgtgattaatccatctaagaagattaataaataagaagaacaattttttggttttgaataggcaaagaccattgctgcatttgcaagaatgacagttcaagattcgagaaaacttctcccgggagatttttatccttcttgggttgtgttttctcagagacaaaagttgagttattctaaatgtcttgtactttcatcattttgttctgtcttttgctcttgttgatgtattgatacttgtccttgattaaactacagttaaattggcttaatcttgaacttgaaaagatctggccttatgtaaatgaggtaactttaattaacacgcaatggtactttttttttttacctttttggatgtgttgatatatcttcactaacttcgtttttctgttggttaatcttgtaggcagcttctgagctgattaaaagcagtgtggaaccagtacttgaacagtatacaccagctatgttagcatctctcaagttctctaaattcacacttgggactgtggctcctcagttcacaggtttggttttgttggttcttataaataatctaatagtgttgatatatttatgaagttatccgtaactcggtcaatccagagaacttgtatcttaaacattgatgcaaatgggtgcttaattgaagatgttttattttagcaatcttgtttatgtagctgttttgcttgaatcatacggtttagagaaaagtaatgtgtagtcagaaaaacgtttattatattgccgagttttcaaattataacagtcgttatgctcacctatttgatcaatgagacattaaaagtcgttatgctcactcattttcaggagtttctatcttagaaagtgaaagtggacctaatggaatcacaatggaacttgaaatgcaatgggatggtaatccaaaaatcgtgttggatgtcaaaaccttacttggcgtgtctctacctattgaggtactccactagtaatgctattttttataaactttgttatccattttttgttcttgagcttactgtgttgtgtctgtaggtcaaaaacataggattcacaggtgttttcaggctgattttcaaacctcttgttgatgaattcccttgctttggggcactttcttattcactccgcgagaaggtaacttagtgatgatatgatatatattgcttgttataataacttagtaatcttctcttgttttctgtgagcagaaagggcttgattttaccctcaaagttataggtggtgaattaacatcaattccagggatttcagatgcaatcgaagtatgccaaaaaccaaatttgatcgtatgttttgacagcataatgttacctattattgattaacaatctttctttaacgcctttgacaggaaactattcgtgacgccattgaagacagtataacatggccagttaggaaaattatacctattttaccaggagattacaggtttttttgcttctttgtatgattttttttttggtaaagaccattttatgaagatctgaaaatgtgttttgacagtgatctggagttgaaacctgttggaaaattggatgtgaaggttgtgcaagcaaaggacttagctaacaaagacatgattggaaaatctgatccttacgctattgtattcattcgccctttgcctgacagaaccaaaaagaccaaaactattgtaagattttccctctaaacagattccactatctttctcttactgatttggattgtgcatacctctcttggtaattctttttaatgtcatttagagtaactcgttgaatccgatttggaatgaacattttgagttcattgtggaagatgtctcaactcaacatttgacagtaagagtctttgacgacgaaggagttggatcttctcagcttattggggctgctcaagtaccgttaaatgaactcgtacccgggaaagttaaagatatttggttgaagttagtcaaggatttagagatccaaagggatacaaaaaataggggtcaggttagtatttcctcctatcataactattgtttccatattcataacacaatgtagaaaaatataacatatccattttagttaggactataaaagatatatttgtggtgatataggtgcagttggagctcttatattgtcccttaggcaaagaaggcggattgaagaacccgtttaacccggactactcattgaccattttagagaaggtactgaagccggaaagcgaggattcggatgccacggatatgaaaaaactggtgacctcgaagaaaaaagatgtgatagtgagaggagtgttgtctgtgacagtggtggcagctgaagacttaccagctgtagattttatgggaaaagcagatgcatttgtggtaatcacattgaagaaatcagaaacgaaatccaagacaagggtagtaccggatagcttgaatccggtttggaaccagacgtttgattttgtagtggaagatgctttgcatgatctattgacgcttgaagtatgggaccatgacaaatttggcaaggacaagatagggagagtgataatgacattgacgcgagtgatgttagaaggagagtttcaagagtggtttgagttagatggagctaaatcagggaagctttgtgtccatcttaaatggactcctaggcttaagctcagagacgcctcttgatcattctatcttctactctcaacacattactttgcttattttttgttttttgttgtatagtgtgctgatgtttgttacttcttgtcaattgttatcctttcttccttgccttagaagaaaccaatataagtattaaatatacactttttctgtttatattcattttactcactttaccttcatttgattcgtaattgtgaatgaatttgtactgaactgatattggttttggccttcaggggtgaccttcttttccttttaaactctcctactttagatgatcataattagcagcagcatgaacaaatattgtcaaataaaggaaaagtaattattttgtgactgacatatttctgtattttttaattaataaaattaaaacactaatactaacgaatgacgtcaacatatttatgataatcaataaatgatagatactttaaaatgataatcaataatttaccgagtagttttctaccgacattcatattaaaagcttgtaagttgataatatctgattttgagggggttacgtgggttcgtggtcgtgaagattataataaaattgtagacagctgctcactgtattattattattttttgttaaagaacagaaaatttggtcagtgtgttataatattcgttcgtctaaataacttctttatgctcttttgattattctatatgctaattatggtctagagtttgccaaatgtcaatcactcactgcgcagctgcgcttgttatagtatcaattagtcgtttgagaagactcataccgaaaaattcataaacaaatcgttacgaatcttccagtgttacgtgactcgtcgtaattttgacacctcacgcttttttaatactaaacaattatgtttctaataataaagatatgacaaaatcggatattccctcagtaattaattcagatagtcaaatatctaattaagggtcatttaattgggttataaaaaagaaagaaaaggaagagacactttttcacaaatcgccaaatcacctctttccctctccttcttcttcgtctctctcgttcgttttctagaaacctgtcatcctcttccatctccagatcacaacactaactatcatcacttttgtatatccgattcctgattcaccagtttttgtagagagattggtttctgctttctccagatcgttgagttcgggagagcgaacaccaatggtgggaaacgactgggtgaatagttacctggaggcgattctcgcagccgaacctggaatcgccaattccaaaccgcctggaaccggcgattccaaatcgtctcttctgctgagagagcgtggccatttcagtcccactcgttatttcgttgaagaggttatcacaggctttgatgagactgatcttcaccgttcctgggttcaggtatacctcttcgctttggatttattccttttcgtttccgtttttgatgtttcctgacaactttccgattgatttgttattgatccaaaggctgctgcaaccaggagtccgcaagagcgtaacacaaggttggagaatttgtgctggaggatctggaatttggctcgccagaagaagcaggttcgtgatttcgttttaggatcgtttgcttctagcttgatcgttatctttctggatcttgtgctatgaagattactggatttggaatctgttttgagttaatgattgtgtaatgtttacttaggttgaagggaagaatgctaagcgtgaagctaaaagggagcgtgagcgtgagaaagcaaggagggaagtaactgctgaaatgtctgaagatttctctgaaggagagaaggcagatttgcctggtgaaatcccaactcctagtgataacaacaccaaaggaagaatgtctcggattagttctgttgatgtctttgagaattggtttgctcaacacaaagagaaaaagctttacatcgtgttaataaggtacaggccattacttgagaatttgtgtgtttgtagttggtataagtttgtttcacatggtggtgaataatggtagaaattgtcttgcagtcttcatggtttgatacgtggtgaaaacatggagcttggtcgcgattctgatactggtggccaggtatacttctacctacaagcgttttttttgtttttgagttttaaaatttctcaattcacacatgtatgaaacgacttatgtactcaggtgaagtatgttgtggaacttgcaagggcattaggctcaatgccaggagtctatcgtgttgatttgttgaccagacaggtcaccgcgccagatgtggattccagctactctgaaccgtctgagatgttaaatcctatagacacagatatagagcaggagaatggagagagtagtggcgcttatataatccgtattccttttggcccgaaagataaatatgtaccaaaagagctcctctggcctcatatccctgaatttgttgatagggcacttagccatattatgcagatttcaaaggttcttggtgagcaaattggtggtggacaacaagtatggccagtttctattcacgggcattatgcagatgctggtgattccactgctcttttatctggggctctgaatgtaccaatggtttttactgggcattctcttggtcgtgataagcttgagcaactcctgaaacaaggacggccaaaagaagaaatcaattccaactacaagatatggagacggatagaggcagaggagttatgtcttgatgcttctgagattgtcataactagtacaaggcaagaggtagacgagcaatggcgcctttatgatggttttgatccggttttggagcgaaaactcagagcaagaatgaaaaggggtgtgagttgtctaggcagatttatgcctcgcatggttgtaagtatcatctctgtcctctctgatcatcttattttccactctaggacttatacgtgagaatgtctttatatcatgactcatgagtagccttgtcatgtgatcctaggttattcctccaggaatggaatttcatcacattgtaccacatgatgtggatgcagatggagatgatgaaaatccacaaactgctgatccaccaatttggtctgaggtaatcttatcttcaaatcatagcctatttcctttttctttagtcaaaggttttacattttctatatttgttttatcggtacctttaaacttactacgaactcttcacttgggcagattatgcgcttcttctctaacccgcgcaagcctatgattctcgctcttgctcggccagaccctaaaaagaacttggttactctagtcaaagcctttggagaatgccgtccattacgggagcttgcgaaccttgtaagtcttgcagttattctttttagaatcatgatctccaactaatttattggaagtgtgtttcacttttttcatttcttctttcactatcttcgattgcagacattgataatgggaaatcgaaatgatattgatgagttgtcctccacgaattcctctgtgctgctctcaattctgaagctaatagacaagtacgacttatacggtcaagtggcaatgcctaagcatcaccaacaatctgatgtgcctgaaatttaccgtttggcagccaaaacaaaggtagtggtcaaacatgattacttttctcctctatgctcacatgagtcccagtattttcttttttgatctcttataggacatgtactcttcataaattatttgtagtgctcattcaataattgttcccatattaaaatgcataggatcatagcatgtgttttgcctccatttctgtgatacagtttagttccttgcattgtttatccgccttatgttaaaccttcttttccagggagtatttataaatccagcgttcatcgaaccatttggactgactctaatcgaggtatttatcatttattctcttttcagcgctctattcattccagggtctcttattaattaacacgcactgtatctaacaggcaggagctcatgggctccccactgttgcaacaattaatggaggacctgtcgatatacatcgggtttgtctcttttcatattttaatagaaaatatgcactatacaatcattgcagagcctatgctgaattgctgatatttgctactaacttgtaggttcttgacaatggtcttctagttgatcctcatgatcagcaagctatagctgatgcgctcctgaaactagtttctgacagacagctatggggaagatgcagacaaaatggcctaaataacattcacctgttttcatggccagagcactgcaaaacatatttggctcggatagcttcgtgcaagcaaagacatcctaaatggcagagagttgagtttgagaactcagactccgattcacccagcgactctcttagagatataaatgacatctccttgaatctaaaactttccttagatggcgaaaagagtggaagtaacaatggtgtagatactaacttagatgctgaagacagagctgctgaacgtaaagctgaggtagagaaagctgtttcaaccttggcacaaaagagcaaaccaacagagaaatttgattccaagatgcctactttgaaaagacggaaaaatatatttgtcatttctgtggactgtagcgcaacctcagatcttcttgcagtggtgaaaacagttattgatgctgcaggaagaggcagttcaacaggattcattctctcaacctcaatgacaatatctgagactcacacagcactgctttcaggagggttgaaaccacaagattttgatgctgttatttgcagcagtggaagtgaactctacttcacgtcctctggttcagaggataagaccgcacttccttatacactcgatgcagattaccattcccatatagaattccgctggggtggagagagcttgaggaagactttgatccgttggattagttctgttgaagagaagaaaaagacgaaaaaaggagagattttagttgaagacgagtcttcttctaccaactattgcctatccttcaaagtgaaagatcccgctttggtaaattcaccctcctcaagtctatatagtttttgttcgtcctaaaacattgattttctgtttgtaccttctgatatcaattttattttattcaatctctgcagatgcctccaatgaaagagctgaggaaattgatgagaaatcaagcattacgttgcaatgcagtttactgccaaaatggagctaggcttaatgtaatccctgttcttgcatcacgatctcaggcccttaggtaaattttccatcataaaccattatatctacgcatcatcaagttttcactttcttggatttgagctctcactgatcgtagtgcatttgtattcctctgttttcaggtatttgctagtgcgatggggcattgacttatcgaacatggtggtgttcgtgggagattcaggtgacacggattacgaaggcttgcttggaggaattcacaaaacagtgatacttaaaggcttagccagtgacttgcgtgagcaacccggcaacagaagctacccaatggaggatgtgactccactgaacagtcccaacatcaccgaggctaaagaatgtggtcgtgacgccattaaggtcgctctagagaagcttgggatcagtctcctcaagccttgaggactgaggctgttttttttttctcaataaaagaagtttttgttggaccaatacgcgatattgctaattgataatcataacggccaacaaagtgcaatatactaataagattgtcgccaagtacaaatttttgtgtttcacttttttgggtgatatattaaaataacctttgtattatcaaaaattctcatatgcttccccgataggattgatgacatatgaaatcttatgcattaatcagtattaattgtggaagagcaagttctaagtggtgcctttagaaagattcatttggccctaaattgaactgatgatgttttagttgtttgaaaagaaaaataggttttaaaattattggactgtaaacggtcttgtctttcgtttttaccatcaacttatttaccaatttcaatgaatgttgttcccaagtattacaaactaggaaaatattaaaaggtatagtgatgttcaacaaaaaaagtaccaaaaccagaaacaagtaaacagcagtgtcttggttttttgcttgggcaaaaagtacgtgatgatgtaagtcgttaaaatagttgcctttttgctttttccttttgtacactttgcttggggcttgtctctgatgatgttattttttcttaaaaaggcttatttctaacaaaattatacatttgttttgtttttgaaataagaatatcaagtgtataaatttcacaggattatacacaaaaatgcaatgcacttttggtcaaagttcaaagttttggtgaatacataatacgtttcgactaaattttaatcatatatccgtcttatatttacgtctatattaagagaaaacgtacaaatcttctacaatctcgagtttgatgaggggaataactttacacttattatcataagataattgagttgaatgtaatttatgatttccttttttaatttatattaggataacctcaggaaaaatttaagccaatataatctagaatgaataattaaaaaaaaaaattttattagaaaaccgaaaccaaatccaacctaaaccataccaaaaaaaaaacaaattacacgagagtcatgtttaatttgcttaattcgttgaccaagaaataaatgaattttgttaacccaaaatattcgaaaccggattagacggtcaaagagtgacacacatataaatcgaagagtatgggaagtaaataaaaataaaaataaagaagaagagagtaaataataaaaacctcactacagagaaattgattaaacaaacaaacaaacaaccctaaaattcatcatcaaaatcatctctttttttcttcttgagatattcttcttttcatctgtaaaaaccaaaaaaccaaccctaattaaattacaccttgaagaagaagaaagaaagatcgatcctaattattactttcatggcggatctgacttgtacgacaccgtttttgctctatccatcactcgttatcattctcttcttctactccattaaccaccataaccaaatattctcatccgtcgttgatgatgatccttcttgtcgtctctcgtcttctccacaagctgttttctcttccttcagaatcttcccttttcgttcttcatcgtcttgtctcaatatcacttccaacaacaatgtacattaatttctcttctttttatttgttacatcctttaatttcttcatatatatgtttagtttctttattttatttttgttggcttctaggtttgaggaattagcttaggtacgaggtgttaaattgttattttctattaatttataattaatgttaaatttgttttaaattggaaacagtcgacgtcagaagttgtggtggtagaagaagttgatgaagcggtggagaggattgaagaaggtttggcgatggctagagccgccataaggaaggccggagaaaagaatctccgtcgtgatcgtgatcggacgaataattcggatgtgggagtcgtatctaatggatctgtctatctcaatgcttttacttttcatcagttaagaccttttctttctcctcacttttttcctatttttgcttactctttgagtcttttctctctctaaatatatatatagtacatgatattatacaaatatacaaattggtatatagtgtaacaacattgtttagttttgtcactaggtaatttcccttgttagatttgagtcagtaaatctttttttagttaaattcatgggtttcaatcacttaagttaaagaaaggttagatttgatgaaaaactggagtataaataaataattgaaactatgtaggtaactagtaggtactcattacgatctgtacttttttttccatgactccaaatgatccttaatagaaatatgtgtcaacatcaaaattctatgtaactttctatttttagtaaccaacacactactagttttgcagtttcaaggtccctttgtccctttctttagttttaaatatatattttaaatcaggcacactttgtggaaagagtagttttctccatactttctctccatctctcaacttgacctttgcaaacacatcactcactttgttcttacttctatgttaaaaggtttaaaagtctcacattatcactccatctatatatgtagacaaacacaaagatatttatgcaaatgatcacagcatatgtaatgttttttctttacacatgacaattaaacaggagtcacaaagagatggagaagagattcaagatatggacatatagagaaggagaagctcctctgtttcacaagggtccactcaacaacatttacgccattgaaggccaattcatggacgagatcgagaacggaaacagccgttttaaggcggcttcaccggaggaagccactgtgttctacatccccgtagggattgtcaatatcatacgctttgtctatagaccttacactagctatgcacgtgaccgtctccaaaacattgttaaagactacatctctctcatctctaaccgttacccttactggaatcgcagtcgcggtgctgatcacttcttcctctcctgtcacgattgggtgagtttcaatttataaccatttcttgtttcgtacgtaaaccatagtagcctaactctaatttttcctttttgtcttccttgttgttcaaggcacctgatgtctcagctgtggatccagaattatacaagcattttataagagctctctgcaatgccaattcctccgaaggattcaccccaatgagagacgtttcattaccggaaatcaacattccacacagccaattagggtttgtacacaccggagaaccgcctcaaaaccgcaaactcttagcattcttcgcgggcggttctcacggagatgtccgaaaaatacttttccaacactggaaagaaaaagacaaagacgtccttgtctacgagaatctccccaaaaccatgaactacacgaaaatgatggacaaggcaaagttttgtttatgtcctagcggttgggaagtggcgagtccgagaattgtcgagtcactttactccggctgtgttccggtcatcatagctgattattacgtcctcccgttcagcgacgtgttgaattggaagacattctcggttcatattccaatatcaaagatgcctgacataaagaagattctagaagcaataacagaagaagagtacttgaatatgcaaagaagagtgcttgaggttcggaaacactttgtcataaacagaccatcaaagccatatgatatgttgcatatgatcatgcattctatttggttacggaggcttaatgttcgaatccctctttcacagtgaactacatattgtaatactcttttatatataatacacatacataatataggatcttcagaaactatataacaatgtcccgttcttgattttcgattaaaacaagcctccaaagtttcgtttgggaatgggacgtacaattttcatggcctacttgtaatggttgggaagcccaaaaaggcccatttaggatcatcatttgaaaaagatttttcgacgacttttaaacgtagcttcaggccttcagcctaggccttgtttctgactcgttctagtttgacactttcctttttaaaatcctttttgttttgttcctctggtttgagaaaatagaatttcctaaaacagaaaatgttgacaaagtcaagaacgcgatcatagcgatgatcgtcgagtcaaagtcagaatcgttgctaactccaataaacaataacatatcgttaaaaatacaatactcaaagcctttgaaataaacctttaaatagatggaaagagagcaagagaactttatacttttc

SEQ ID NO: 1421 - DNA, 110992 bp, Arabidopsis thaliana
ggtggtgaataatggtagaaattgtcttgcagtcttcatggtttgatacgtggtgaaaacatggagcttggtcgcgattctgatactggtggccaggtatacttctacctacaagcgttttttttgtttttgagttttaaaatttctcaattcacacatgtatgaaacgacttatgtactcaggtgaagtatgttgtggaacttgcaagggcattaggctcaatgccaggagtctatcgtgttgatttgttgaccagacaggtcaccgcgccagatgtggattccagctactctgaaccgtctgagatgttaaatcctatagacacagatatagagcaggagaatggagagagtagtggcgcttatataatccgtattccttttggcccgaaagataaatatgtaccaaaagagctcctctggcctcatatccctgaatttgttgatagggcacttagccatattatgcagatttcaaaggttcttggtgagcaaattggtggtggacaacaagtatggccagtttctattcacgggcattatgcagatgctggtgattccactgctcttttatctggggctctgaatgtaccaatggtttttactgggcattctcttggtcgtgataagcttgagcaactcctgaaacaaggacggccaaaagaagaaatcaattccaactacaagatatggagacggatagaggcagaggagttatgtcttgatgcttctgagattgtcataactagtacaaggcaagaggtagacgagcaatggcgcctttatgatggttttgatccggttttggagcgaaaactcagagcaagaatgaaaaggggtgtgagttgtctaggcagatttatgcctcgcatggttgtaagtatcatctctgtcctctctgatcatcttattttccactctaggacttatacgtgagaatgtctttatatcatgactcatgagtagccttgtcatgtgatcctaggttattcctccaggaatggaatttcatcacattgtaccacatgatgtggatgcagatggagatgatgaaaatccacaaactgctgatccaccaatttggtctgaggtaatcttatcttcaaatcatagcctatttcctttttctttagtcaaaggttttacattttctatatttgttttatcggtacctttaaacttactacgaactcttcacttgggcagattatgcgcttcttctctaacccgcgcaagcctatgattctcgctcttgctcggccagaccctaaaaagaacttggttactctagtcaaagcctttggagaatgccgtccattacgggagcttgcgaaccttgtaagtcttgcagttattctttttagaatcatgatctccaactaatttattggaagtgtgtttcacttttttcatttcttctttcactatcttcgattgcagacattgataatgggaaatcgaaatgatattgatgagttgtcctccacgaattcctctgtgctgctctcaattctgaagctaatagacaagtacgacttatacggtcaagtggcaatgcctaagcatcaccaacaatctgatgtgcctgaaatttaccgtttggcagccaaaacaaaggtagtggtcaaacatgattacttttctcctctatgctcacatgagtcccagtattttcttttttgatctcttataggacatgtactcttcataaattatttgtagtgctcattcaataattgttcccatattaaaatgcataggatcatagcatgtgttttgcctccatttctgtgatacagtttagttccttgcattgtttatccgccttatgttaaaccttcttttccagggagtatttataaatccagcgttcatcgaaccatttggactgactctaatcgaggtatttatcatttattctcttttcagcgctctattcattccagggtctcttattaattaacacgcactgtatctaacaggcaggagctcatgggctccccactgttgcaacaattaatggaggacctgtcgatatacatcgggtttgtctcttttcatattttaatagaaaatatgcactatacaatcattgcagagcctatgctgaattgctgatatttgctactaacttgtaggttcttgacaatggtcttctagttgatcctcatgatcagcaagctatagctgatgcgctcctgaaactagtttctgacagacagctatggggaagatgcagacaaaatggcctaaataacattcacctgttttcatggccagagcactgcaaaacatatttggctcggatagcttcgtgcaagcaaagacatcctaaatggcagagagttgagtttgagaactcagactccgattcacccagcgactctcttagagatataaatgacatctccttgaatctaaaactttccttagatggcgaaaagagtggaagtaacaatggtgtagatactaacttagatgctgaagacagagctgctgaacgtaaagctgaggtagagaaagctgtttcaaccttggcacaaaagagcaaaccaacagagaaatttgattccaagatgcctactttgaaaagacggaaaaatatatttgtcatttctgtggactgtagcgcaacctcagatcttcttgcagtggtgaaaacagttattgatgctgcaggaagaggcagttcaacaggattcattctctcaacctcaatgacaatatctgagactcacacagcactgctttcaggagggttgaaaccacaagattttgatgctgttatttgcagcagtggaagtgaactctacttcacgtcctctggttcagaggataagaccgcacttccttatacactcgatgcagattaccattcccatatagaattccgctggggtggagagagcttgaggaagactttgatccgttggattagttctgttgaagagaagaaaaagacgaaaaaaggagagattttagttgaagacgagtcttcttctaccaactattgcctatccttcaaagtgaaagatcccgctttggtaaattcaccctcctcaagtctatatagtttttgttcgtcctaaaacattgattttctgtttgtaccttctgatatcaattttattttattcaatctctgcagatgcctccaatgaaagagctgaggaaattgatgagaaatcaagcattacgttgcaatgcagtttactgccaaaatggagctaggcttaatgtaatccctgttcttgcatcacgatctcaggcccttaggtaaattttccatcataaaccattatatctacgcatcatcaagttttcactttcttggatttgagctctcactgatcgtagtgcatttgtattcctctgttttcaggtatttgctagtgcgatggggcattgacttatcgaacatggtggtgttcgtgggagattcaggtgacacggattacgaaggcttgcttggaggaattcacaaaacagtgatacttaaaggcttagccagtgacttgcgtgagcaacccggcaacagaagctacccaatggaggatgtgactccactgaacagtcccaacatcaccgaggctaaagaatgtggtcgtgacgccattaaggtcgctctagagaagcttgggatcagtctcctcaagccttgaggactgaggctgttttttttttctcaataaaagaagtttttgttggaccaatacgcgatattgctaattgataatcataacggccaacaaagtgcaatatactaataagattgtcgccaagtacaaatttttgtgtttcacttttttgggtgatatattaaaataacctttgtattatcaaaaattctcatatgcttccccgataggattgatgacatatgaaatcttatgcattaatcagtattaattgtggaagagcaagttctaagtggtgcctttagaaagattcatttggccctaaattgaactgatgatgttttagttgtttgaaaagaaaaataggttttaaaattattggactgtaaacggtcttgtctttcgtttttaccatcaacttatttaccaatttcaatgaatgttgttcccaagtattacaaactaggaaaatattaaaaggtatagtgatgttcaacaaaaaaagtaccaaaaccagaaacaagtaaacagcagtgtcttggttttttgcttgggcaaaaagtacgtgatgatgtaagtcgttaaaatagttgcctttttgctttttccttttgtacactttgcttggggcttgtctctgatgatgttattttttcttaaaaaggcttatttctaacaaaattatacatttgttttgtttttgaaataagaatatcaagtgtataaatttcacaggattatacacaaaaatgcaatgcacttttggtcaaagttcaaagttttggtgaatacataatacgtttcgactaaattttaatcatatatccgtcttatatttacgtctatattaagagaaaacgtacaaatcttctacaatctcgagtttgatgaggggaataactttacacttattatcataagataattgagttgaatgtaatttatgatttccttttttaatttatattaggataacctcaggaaaaatttaagccaatataatctagaatgaataattaaaaaaaaaaattttattagaaaaccgaaaccaaatccaacctaaaccataccaaaaaaaaaacaaattacacgagagtcatgtttaatttgcttaattcgttgaccaagaaataaatgaattttgttaacccaaaatattcgaaaccggattagacggtcaaagagtgacacacatataaatcgaagagtatgggaagtaaataaaaataaaaataaagaagaagagagtaaataataaaaacctcactacagagaaattgattaaacaaacaaacaaacaaccctaaaattcatcatcaaaatcatctctttttttcttcttgagatattcttcttttcatctgtaaaaaccaaaaaaccaaccctaattaaattacaccttgaagaagaagaaagaaagatcgatcctaattattactttcatggcggatctgacttgtacgacaccgtttttgctctatccatcactcgttatcattctcttcttctactccattaaccaccataaccaaatattctcatccgtcgttgatgatgatccttcttgtcgtctctcgtcttctccacaagctgttttctcttccttcagaatcttcccttttcgttcttcatcgtcttgtctcaatatcacttccaacaacaatgtacattaatttctcttctttttatttgttacatcctttaatttcttcatatatatgtttagtttctttattttatttttgttggcttctaggtttgaggaattagcttaggtacgaggtgttaaattgttattttctattaatttataattaatgttaaatttgttttaaattggaaacagtcgacgtcagaagttgtggtggtagaagaagttgatgaagcggtggagaggattgaagaaggtttggcgatggctagagccgccataaggaaggccggagaaaagaatctccgtcgtgatcgtgatcggacgaataattcggatgtgggagtcgtatctaatggatctgtctatctcaatgcttttacttttcatcagttaagaccttttctttctcctcacttttttcctatttttgcttactctttgagtcttttctctctctaaatatatatatagtacatgatattatacaaatatacaaattggtatatagtgtaacaacattgtttagttttgtcactaggtaatttcccttgttagatttgagtcagtaaatctttttttagttaaattcatgggtttcaatcacttaagttaaagaaaggttagatttgatgaaaaactggagtataaataaataattgaaactatgtaggtaactagtaggtactcattacgatctgtacttttttttccatgactccaaatgatccttaatagaaatatgtgtcaacatcaaaattctatgtaactttctatttttagtaaccaacacactactagttttgcagtttcaaggtccctttgtccctttctttagttttaaatatatattttaaatcaggcacactttgtggaaagagtagttttctccatactttctctccatctctcaacttgacctttgcaaacacatcactcactttgttcttacttctatgttaaaaggtttaaaagtctcacattatcactccatctatatatgtagacaaacacaaagatatttatgcaaatgatcacagcatatgtaatgttttttctttacacatgacaattaaacaggagtcacaaagagatggagaagagattcaagatatggacatatagagaaggagaagctcctctgtttcacaagggtccactcaacaacatttacgccattgaaggccaattcatggacgagatcgagaacggaaacagccgttttaaggcggcttcaccggaggaagccactgtgttctacatccccgtagggattgtcaatatcatacgctttgtctatagaccttacactagctatgcacgtgaccgtctccaaaacattgttaaagactacatctctctcatctctaaccgttacccttactggaatcgcagtcgcggtgctgatcacttcttcctctcctgtcacgattgggtgagtttcaatttataaccatttcttgtttcgtacgtaaaccatagtagcctaactctaatttttcctttttgtcttccttgttgttcaaggcacctgatgtctcagctgtggatccagaattatacaagcattttataagagctctctgcaatgccaattcctccgaaggattcaccccaatgagagacgtttcattaccggaaatcaacattccacacagccaattagggtttgtacacaccggagaaccgcctcaaaaccgcaaactcttagcattcttcgcgggcggttctcacggagatgtccgaaaaatacttttccaacactggaaagaaaaagacaaagacgtccttgtctacgagaatctccccaaaaccatgaactacacgaaaatgatggacaaggcaaagttttgtttatgtcctagcggttgggaagtggcgagtccgagaattgtcgagtcactttactccggctgtgttccggtcatcatagctgattattacgtcctcccgttcagcgacgtgttgaattggaagacattctcggttcatattccaatatcaaagatgcctgacataaagaagattctagaagcaataacagaagaagagtacttgaatatgcaaagaagagtgcttgaggttcggaaacactttgtcataaacagaccatcaaagccatatgatatgttgcatatgatcatgcattctatttggttacggaggcttaatgttcgaatccctctttcacagtgaactacatattgtaatactcttttatatataatacacatacataatataggatcttcagaaactatataacaatgtcccgttcttgattttcgattaaaacaagcctccaaagtttcgtttgggaatgggacgtacaattttcatggcctacttgtaatggttgggaagcccaaaaaggcccatttaggatcatcatttgaaaaagatttttcgacgacttttaaacgtagcttcaggccttcagcctaggccttgtttctgactcgttctagtttgacactttcctttttaaaatcctttttgttttgttcctctggtttgagaaaatagaatttcctaaaacagaaaatgttgacaaagtcaagaacgcgatcatagcgatgatcgtcgagtcaaagtcagaatcgttgctaactccaataaacaataacatatcgttaaaaatacaatactcaaagcctttgaaataaacctttaaatagatggaaagagagcaagagaactttatacttttctctcgagctttcttgtgacaaacaaaaaaaaacaaaaagctttctctttctcgaactcaactactttctccttctgtctgtgtttcttaagtaacagacagagatgagtttatgttcagagatctctcaacttcatgttcctcattggaacagtgcatactctgttttcaatgatgataacgacaaagactctgttctactcttccctgagcttcttttttctccattgaacaaggctcttgtgatcacaacctctgattcgtgggacgttgtctccgtcggagaatacaaagtcaaagctagtctctcctccactcttcaaagcattttcgacaagtatggagacatcacatcgaattccaagctccaatcactctccacacgaacatatcacctcgagacactagcggaggttgttatcgaactccagtcaacgcctctacgtcggttatctgaatcacgggccactgagattctagcaatcgttgatgacatagaaacggcaaagatccgagtaggttggctccggtccgttcttgaggaggttcttgaagctacaaggtattttgacagatgcgaaatggcagttatggagaaaaaggccggcgagcaccgtttattgcttgcaaagcaagaaatggaactgagtttgaagaagcttgcagagaaagagaaggagatgaaagagtttagggagaaattaatgaagacaacagggaaattgggttcgctggagatgaaacggacgtgccttgataagagattagtgtttctgagatctaaagtcgagaagtttcaaggtcaatctgtttttcaggacattttgtgaagaagtttttgtatttcttaatagtcttttgcgtttagatttttttttgtatagagagaactcgtctttattcgttgaatgaaaaaacagattctttttcattttgttgactttttttcgattcagatttgttcagatacaaaaagatgaaaaactttcaccataatataagttgattcaattttcgattgaatatgttagtcaaacaccaaatttccatgtggccaatcttcagttcttcaccatgtgactagaacttaataagttggaaaattcttcacagatcaagcaaaagctaaaaacgtcatcatttaatacaacttttaacgccgcagcataaattgcaaacagacaggggatgatcattaacagtgaaatatcacacttacaaataaataatcgactctgtaattcaaagcaataagcagaagctgaaattgaaagatcacataaacacacattttagacaaacgcatataatctcacattccaaaatcgaagcagagtctgataattcccaagaagggaaaggtgaagaagataagagaatgtcttcttacttgaaacaagaaggaagacttggcccatggcaaacaaaggccatcgcgatgtacacaaccaaagctagtacaagtatcagagcaattctgcagaaaaataacaagcatcatgagcagagaaaaccaacaacaaaaactccaccaagaatgtaaaattgtaaaatatattttcaaacatacagtatgtagttatcaattcaacacgaaattgctagtttttgtctcgtcaagtttatcaggtaaacaggtttgttgggaagaattttagatcagaaaacttacgtaagcttgacatttctccaccacataatggttctgtaacgacgagcttgctttctgaaacgaaaagtgttgccttgcatattttcggttttatcaactagcaactccaaacgctcccctctatccaaaactttatcaatattctcaatcatcacatttcgaacctgaaaaacaaaatcaacgtcactagtaatagttagtaataaagctacaatactgcataaagtatcgagcaaatcattatgtccatgtatgtgtcgtaataggctatatcaaacatatactttagacttcaaaaaagagatgattttgtaacattacctgactcatttcacctttgattctgctcatcctgtctgcattaggatcattggaataaaactccatctgttgactcagaactcttgaaaattcatcattcatggaataagcttgagctgaatgaatagctcggccatatgttttcacaaacctctgatgaatatcatccaaaaacgcaaacggaatattccctgccgcaacatcagagcaaaatcataagtgacataaacctaacatcaccaaattgctcccagaaaattatcagcatctttctattgaaacaacaatcaaatcccccagaattgatataagatctcagcagaaatcgaagacactcaaatacaagagccaaatcatgtaaaattgatgaaattagcgagagaagcagcttacttccggcggtttcgtcggccatacagagaacggtaagaccatctgttcgtttcacatggaagatgtagcgatcctgagagtaagacatatggctatcgctatcgtttccaggcaacttctccaaaatctgcttcgagattgagctagcgttagtcgaagtagcgctaaactccgataacaccaccgttccacgagccaccaacgcaaatatgatcgccatctactccggcaccttgttccagctcacttctccctgtaaatctcagatcttgagaacagcgattaacaaaacaccccaaagtgattcgattagagtgtaaaatcggagaattgttcaacgccgatttgtaatcaaagaagcatcaccatacatctgaaattgaattattgaaatgattttgaggaaccctacaaattgaaattaggatatcggagaagcccgctttacagtgaaaaaaaaagttgaattttgaaaatatcaggcgcaacaaaaatatctggcctcaatctaaaactcttgggcttacatataaatttgatatcacaaggcccattattttatttttaggatttttgggcctatatatacagaaactcttgggctattttctgtatgggtaaaaaaaacaagcagtagtataatcgcccatcatgaagctagttggaataaatccctgtataaacaaaagtcaaatgaaagtgtaaaaaagctgtgaatgatttttgttataaagctataaagttagacaacgagatttgggatatctcctcgaagttgtaactttattgttattctatctctctacttcaatttttttcctttaggtttgtggtgggtttctcggtacgaggttcatttaccctcccaactatacaatagacttttgtttttgtttttttgcttttcaccttaaatcttatctacctcatattctctaaatgtaatcagtggaggaacgatctaattaacaatatacctatctagaacacgacctagataatttacatcattagaaatattttgttggttaagcttttagatatatactatgctagctttaacaaaaaaacaaacagaaaaaactgtgttaagagaattttgtaagcttttagaaaaatactatgttagttgaaattctattgtcccaagtgttgtttggactgttttgtttctttgcatagttcatgtagtgggcttgtttgagtttttctttatcggagaaagattattcctaagtgaagtctctttgtatgttctctagtgaagcatgaaagacatcactgtaaattgaatcaaaacaatacttgttatagtggaattcttgtgaactatgatcatatagatgttaacttcacaaaatcttgaactttgaaaaagtttcacttgtaattatacgtttgttatttattttggaagctaagtggtttttgaggtcgagaaatcatttaggcggacctaacatgggctaaggaaatcgtaataaacacatgcttcacgaggctagtacttcttgaactgtgtatttggcggcctcgtgccatgcaaacagagcagtatatagaattttcatagaagcatagaagataccaataaaatatcttcggtgaactagcacaaagccacaaacttcaaatcagtacttcacatttctgacatgaaattttgttttaacatatatcgttaaaattgaaattgctcatgaaaaggggtatgatttaacttctcaaaaacatggtcttcacttatatatgaagtcaccaatccattatgctaatttcttacatattagcaattattttgggtctttatttattgaactcttatttatacccgttttaattattagaagagtctagatctttcacacgtatttaaaaataatatttaaaatttattctatatcctttactaatctatatagagctgaactaaattatagagttatatgattatatcttaaacctgaattcaaaactaaccccgtaccatacaaaagaaattttgttatacaagttggcatgtaccactcaattctggacgcatattgactctattgctgatttatttgtattcggtgatctgctccccatgtacttttttacttacgctttgaattcacataaaaacctgtactactactatctaaatgttataaacgcaatctacaaaaatcagtactcgtacaaacacaaacagtgtaatgtaggagacaagaaatataaaacacctcgatttaaggaaaaaagaggtaactaaaactaacacaaaggctccgaatggtgactgcgttttgcggtgcgggagaagtgcggtgcggttcaaatagtaacgaaaatacatatgtagagattttgatactgttacagcactgttgcagtgcggttttaggtgcgattttggttaacattaacagccaaaatctattatccctacgcctaccaatataaagttgtaaaaacttatttaatacacattacagttcacaaaacttttaatatagtaaaaaaaagagaggcaagtgtagctgtgtatggaggagacaagacacaaaacatggaatgtgaactagttttaggagaatgggtacttctttttatagaaaaatgttttttatttttggcagagtatcgaatctctttcctttataggtcttttgatcgagactctagtaagaaagagctaaaggccaaaagattctctcgaagatccataagattttcttttcttcttcggatctttcttcactctctttaatacagtatccattaacgcttgtgattgtgattttattgcggttcataaaaacctgtgtgccgacccagttcgcgcgtgtggtacacacactcttctccactactattaaatattaaatgctctctcacccactttctatacaactggtggtgaacagaggaacagagcgagacagagacatagagagagagagagaagagagaagatctgatctcatttcatttcatttccttcttctgcgagggaaatttatttgtttcctactttgaattcttccccatttactctctcaagagagagagagagtgcgagagattaatacacacaagtgaagacgctccttaactctctcagaattgaaactttagtgagaaagagaagagagagagaaaagatgtttgcggcggagaatggtctcaaaggagatccaaggcttgaagctatatcagcagccattagggttgtccctaatttccctaagaaaggtctttaaaacttcttgttcctctgttttttctgttctttgttctgtttttgcaattctctgaagttgtttcttggacagggattatgtttcaggacataactacgttgttactggatcacaaggcgtttaaacacacaattgatatcttcgtagatcgttacaaagacatgcaaatctctgtcgttgctggtaagactcctctgttttttttcctttgttcttccttatcctctcatttctttactacagtgtttcgtcatcaagtttgttaagtaacgccaaaaactatgtgtctttctaaaatgggtttacatcatataagcaaacaaaagacaattaaaaaaaggagaaacaagaattgtctttttcttcattaagaaattaatatgtttgtttacatccaaatgtattatataggagttgaagcaagaggtttcttgtttggtccttccattgcattagccatcggcgcaaagtttatccctttgcgtaaaccaggaaaattaccaggtttttttactgcattatctgttttggttattgtgatagagaagctcttgagattctgaaaaattggcgaaactataaaatatagggaaagtgatatcggagtcttatgagctcgagtatgggcatgaccgtttagagatgcatgttggcgctgttgagccacgcgaacgcgtcattatcattgatgatcttgttgctactggcggcactctttctgccgcaatgagcctattgggtttctttctttcttcttgttttctttttcagtttttaaagagaattttttggtcttgaattgtaatgtgatacagtttgacgttttacagagagccaaggagctgaagttgttgagtgtgcttgtgttattggcttgcctgaagtcaaggtgagtcacatttatcttacttgtctaagaagttatctctggttttgttcttttgaaatgatttctaaaatgtagtgatagagttagtttttttgttataatctcaactcaaatttgctcattgagtttgtgaaaattttgaattgtttttaggggcaacacaagctcaaagggaagccgctttatgtgttggtggagcctagtggattagatgagttctgttaggatacataccggttacttccggttcagttttctttccctgcagagttcatgttctttttttcaaaatttctagggttccaacttcttgtattcgttctcgtttattgatctctgtagattttgaattttgatgtgtactttccacggcagtggttggtaaaaaaccgagatactgaaaagagtctttacatttcccggtttggtggaatttctgatggatcactaactcatgttaatcagtttataataactgtaatcattaaaagggtaaagatacgttcgtaatttatgcgggaaatctaaaaagtacaactagtaggtttactaaatttaatgctgatattactgagcactgataaagttggttgtattctacgacaaaactattcattactgcaatattggtccatatttttgcttcagcactgctgcaagtttttctttgtttctccctaaacttaacaacttacttcactgatttcaaattataaattgaaaatcgttaataaagttttcatgatacaaattattacataagcaaactactgtatgtgttatttattgaagactataaaacaataaaagtgaaagtacacaatggctttccttacaaagctttatttgctaataaacagaagagtctgatggataacttgagaactcagcagagctggttagatcgcgaaatcggattagggtttcgaaatctctgaattgcaagagtaaaaatatctgagcttcgtccaaacgattccaaagagagtgaaagatatggttgaactcagtctaaattgggttttgttttaattaatgggcctacaattttgttgggtccttgaaacaaaaacattgttattaagggaaatgaaatatcttaactaaaccaatttgttatctattgtgctctactgttctgttcgtattgactcgaacccactaaaccaagacgagccctgaccgtcattgtctaaattgactcgaacccactaaagaaaaaaagaaaaaaaaacttagataataattggcgcagaagggccgattaataaaaactttaggcccattaaagtaaagcttattgtcaaccctatccagtctccttgtatatatttatttacgacaccaacgcggcgttggtgattcattctcttcagtcagagatttcgaaaccctagtcgatttcgagatccaaccaactctgctccttatctcaggtaaaattctcgctcgagaactcaattgcttatccaaagttccaatggaagatgctttcctactgaatcttaggttaatgttttggatttggaatcttacccgaaatttctctgcagcttgttgaatttgcgaagtatgggagacgctagagacaacgaagcctacgaggaggagctcttggactatgaagaagaagacgagaaggtcccagattctggaaacaaagttaacggtgaagccgtgaaaaagtgagttttatgatttcctcgatctgtttcatgagatagtggatgtttaaatttagggttttcttagattactgcttgataacaaccgactaagttcttcaattatctatgtgtttggttagttgcttaactttatgacaattgactaagttcttcaatgctaaaattcctggaacctacccaatattagacggtcatgtgtttatcatcttgtattttctctttgtgacagagggtacgtgggaatacacagttctggattcagagacttccttttaaaaccggagcttctcagagctattgttgactctggatttgaacatccatctgaaggttattacaatgaaatacaccctacctttgacttttctgccttgcctttcaccattctattaccgaatgatattgtataatttacagaagtgacttctccataagatgttttagttgtccggaaacttttaattatatgtacttcgtctagttttgagaagatatgttggttaaagatattttatactttatcttggtcctttgcttatcatctaactaaattaaaaaaagtttgtgttgaggtcaaattcttttttatttcctgttataatggtttttgttttctttgtttattaacgtttcactgattactttttccaggtaataaacgatatttcaatctattggtttggagtgagcttaaacatgtgctaaagccaccaatttaaaagatatggaggttatcatctacttataaaggctttcttcggtacaattttctttggttctccaccagtgcaacatgaatgtatccctcaagctatcttgggcatggatgtcatctgccaagcaaagtctggtatggggaagactgctgtgtttgtcctgtctactctacaacagattgaaccatctcctggccaggtttctgcacttgtcttgtgccatacaagagagctagcttaccaggtatgaccttcttgtttcactcaggttcttggcttatagttttgttgtacgtcttcttcctctaatgctttttgccttgatgctgacaattacttgcagatctgcaatgagtttgtgcgattcagtacctatctgcctgatacaaaggtttcggtgttctatggtggagtcaacattaaaattcacaaagacttgctgaagaatgaatgtcctcacattgttgttggtacccctggtcgggtgcttgcacttgccagggagaaagatctctctttgaagaatgtgaggcattttattcttgatgaatgtgataaaatgctcgagtcacttggtatgctgatttctgacatcattattacatcgatccctgaataattttatgttttaacactttaactttttttttaccagacatgcgaagggatgtgcaggagattttcaagatgactcctcatgacaaacaagtaatgatgttctcagcaacgctcagcaaagagatacgcccagtctgcaaaaaatttatgcaagatgtaatgttccatggccaattctctctccctttgcaagtcttctagttttcaactatttttagccttctatgagtgatcatagcattagttgagcgtcttctgcggttctgccctggaaaagcggcaactgatctctcaatgggtctcaatccaataatggttgggtagtttgtagggaacgagaactgtgagtgtgagactctgtagctttggtatggtttctatgggtgattatagcattatttgggcatcttctgcggttctgccctggaaaagctgcaactgatctctcgatgggtctcaatccactaatgctttgggtagtttgtagggatcgagaactgtgagtgtgagcctctgtagcattggtatgaatgagtgaccattgcacaacaggatcttctttcgtcattaccttttattcagtttcaatttctttgcaattctagcagtgctgggtgggttttgggtggggtactgtgttgtcccaaggtttcattgtgattgtatgggccttaatgttccgagcaatatcgctgtatcatagcaaaactcacatctatgaagagaacctggtggacgaggatctcagatcaggggttttacatccatcttcacttttgtagtgtaaatcatttcctgagaaaagcttgctaattattacctgatatctattcctttcagccaatggaaatatatgtcgatgatgaagccaagttgactcttcatgggcttgtccaggtactcttatctggtgttaggtcttcttattcaatggaaatatagtttgttgtttgatacttaaaagaccttttactgtcatactgtaacagcactatatcaaactgagcgagatggagaaaacccggaagttgaatgaccttcttgatgcgttggacttcaatcaagttgtcatttttgtgaagagcgtgagcagggctgctgagctgaacaagttactggtggaatgcaatttcccctcaatatgcatccactctggaatgtctcaagaagagaggtctgtacattctcttcaaaattcaatgtttttgaaggaccctacctgctcttaaagccctcatggagaggagtccaattcttaaggctaatacgatatgttatgtaggttgactcgatacaaaagtttcaaggaagggcacaaaaggatccttgtggcgactgacttggtaggaagagggattgacattgagcgtgtcaacattgtcatcaactatgacatgccagattctgctgatacctatcttcacagggtaagtatataatactgaaatttattatttgattgttgatctcactgaaagggctcttgtaactttaccgttttgctgtgtatggtataggttggcagagctggtagatttggaaccaagggtcttgcaatcacatttgttgcatctgcttcagattcagaggttcttaaccaggtatggtgttcaatctttgtaataagtccacggaaaactcctcttgaaattgagttggatatttagtaaagtggcaattataaatcttggacaggtacaagagaggtttgaggttgatataaaggaacttccggagcagattgatacttcaacctacagtaagtgtgaaatcccttaccaattgtttgtttaaaagcttggttttgtctggttgtgatattaatgttgtttcttcttctttctttgttcagtgccttcttaaacaagtagcacgtccctcaggaaagaagctcttcagatttcaaccttgtaggtgttcaaagggtcatgggggttcacaactatctctcgctccgtttgttttagtgttttctatgacgacatttttttccatatgtttagaacgtctgttgtactctttaaaggagattcgagtcactctccaaatcgcacagttaaaagctgtccagttttttgtacaagagattattatgtttgaaatatcaggatttagtctcgacctgattactgtgttccttaggaatcgatctattatcaatttatcatggtgttgctaagaatcgtcattcatcagcgttacttccttcatgtgatgctttttttttataacacatttcatttagtgtggaagagatacaacacgtatatatggttactttatatattgaaaagtttatatccaaggaacaatggttaggggaaaaaggcaacttgaaggagtcaatgtgtccttgcctatttgtcttttgactttttaagaggcaagtctgttgcctttgcatgagaaaaaactcaaaaaacaacacgcaaaagaacataataattaggttcattcagaaagactacgatcagagcctatgcagacttaatcctcgagaatagtgcagctcttcgggtgggtattgtttttgaggtgatcagatttctacggtgaaccaaagttgggtcgacttccacaataatatctacttcatttcgatctccaacattaacttcatcattcagaagctgatcttgatcatcggcttcatttaatgctggaccaggtggctcaaggacttgatcatcaattggcggactagtcggagctctcatgttatcatctgttggctgattaggtggagctctcatgttaccatctgttggcgaattattagcattgatctcgccgcttttgctttcttggcggtatcttctacaaaccaacatggctaagagtagaagcatagaaacaacaaagacgatcgtaaatagagcttcaaagctgtggtgatcgagccggattggagaatccgatgtggttgagtcaagacaatgtttttctccgaggagccacttattctctatagctttcatggtctctccctccgttatattcaagatctgtcttgaaagatctggcaccaaaggagatcccaatggaaaggcctacaaaaaaaatggagatccaaaaacacatttcaaaatcatattaagaacaaactcgatggtttgaacatattttcgtagcatggatagagtctatattttattcgtaatgctatagaccaatactttttagtggtagctaaaagcggtttgtactagtcccgccccatcctctgccactattcaaagcctagataaaagtaaccaggtttacttacaaagccaaagccatcagccttaaaggtaggctcgataatggtatattttgagcaatatttagccatgaaaagcttgacataagcgacttcgtcgaatgcagcatcaataccaccattgctgctctttttaagaaaaagctcatgcatttcctgaggagtatcataagtctttaacctcgattctttgtaacccatttgtttcagcctttcgaatgtaaaggaaccagtttgatatccaatgttaactccactgttcctcagatcatccatgtgtctcactgttggtcgaagttcttgaaccgtcagcatcgatgtcaatgttgctgtgtagctctgagtcagaataagcaacacaaagcaccaaactaccacaagaacccttgtgaaaatgctctccgatggcctcactataaaaaaatgtggttatatcagattcttttttcaaagatttgcaagtaattggaatgattagaagctgaagatgtgtgacaacaaaaaaaaaaaaaaaaaaactcactgtgtgcgaaaaagagagtcgaaaatgagaagtagaacacattagatattttattaataatgctctgtttcctgaaatcaccacttgcttggtactcaaaaatccaaaccatgatcccaatgtagagaaaagaagctgcagtgaggaaccagagctcccttgttaaaggctttaagaagacccattttcctttttccctctcatccttgacgggtaccacgactacaatacccgtctccgagtatggcaacgcgaaatctacgtatgtagaccgattagctaagattgtggtatcccctactgctccatcaaactcctgtaagaacaagaaaaagttttataaaggtctcatgatttcggctaataatttacatttatgatcaaaaaaagaaaaaagaaaaaacttagggatcaatatgtaacttaccccaagaaatacatgataaaccatttcgtcataacttccacggggttttccatcaggagtttcaaagggtatgtactcataggggacagcataaggcatttgtctcattgccgtgtcgaaaacatctatgcaaaacccggtgatcgttggagcattagtatttgcatcttttgttacctccacaaaattattgaaaccatccttctttggaactgctattcgcagcttctttgcgtttgttgggaattcccaacctttaggcacaaaaatagtgtcccctggccatattatcggtctaaggcggtgcgagctgtgtgatattttaatgcctgtttgattcactcttaagctcttcactagtcctacttttgatttccaaaatccaactgttctttccccactttcctctatattgactatcttgaaagtcgtcgcctctagctttccgttttttagctgaaatcttccggcaacgcctttgaaactgactgttgccaacgcttgaagaagcttgggaccagagagagcaaagctgagatcatcaagatctgtcccagtatcatctcttgaagtgtttcttttggtctgactgaaactcatgtttacgttactactgatttcctcaattgacattgcaagtgctgtggccgtatcataaccccaacattcaaaattgtttagctcttctcctccgaatctttttcgccaacgagtttcaagatacattagctcttttgatcttgagaaatatgtcttgacgcccaagacaccatgcatattctccaagcttgattcccccattacactcatttgatcagctataccatttgtgacaatccatacatatcctttagtcatcataccaatctcttttgctatcgagaaaagcctcgatccgagatcaggcaacatgtgcacgataaaaaccctagtgggcatggtcattagtttgtaaagctctttcttgactaggtcatcagtggaatggactgatatggcacttcggtatcggatacgaacgttgatctcttgaaaagcatcaactaagtaaggaagaataccttctccgaactcattgtctgcataaataggcacaacttccctccatctaaatgactctatgatggcgctaatggcgtgcacttgagatgagtcatcgtgtgtagctctgatgaaatatggactacggagagaatcaagaacagggcttgacgcagagaatgaaattatgggaacttgagattgatttccgaggttgattaaaaatggtgcttgcattgaattccctggtcctataatggccaccacttccctcttctttatcaagtataaagctgcaaagtttaagttaatatttcctatttgagaagtcatttctcaaaatgtgcttagaaatgactaaaacatagcttctataaaatatgatgtagagaggacttgagatttgatccgtgggatccaattcaaattgccttcaaattcaatacatgatatacaaatctatcatgtcaaacactattattttctaactataaaattctagaattccagtttattcttatatactagatctattttaattttgatgtctctttcattgaatttcatgaaaaatatatagattttctcatgttttaaattattgctgattttggaacgatctttactttcgaatcaataggactcatcatttgccaatttagacaacacagtcacttcctaagacaaggatctttagatctatcagaagacttagagcatcattattggttgtttcttagattagttcgtaggattttttttggtcattgattactaagaacatctcattttaactcttatataagagacattttgtcattttgtctcttatataagagttaaaaggagatgttcttatcctaagaattaatctaagagacaaccaataatgatgctcttagacaacgttgacgattatagaaagaactagtccttcgttaatcattgagattgttcaagtcactatatgtgggactttgagctcaacttgctgcgatcgccagctagtttttatttaaaatacttctactaatttaaaaattataaattgtaataataaaaattaaattttaataaaaattataaaattataaaaaataaatcaaaaatgaatattatctgaaatgaattgtaataatatgttatatgtatagaaaaattaaattttccatgttttgttttttgtaagatagtacgttaatatatgtaagatcaaatttcatacatgactgatgaatgttcataacgaaagataagaagagtacctgaagctgcagcaccaacaacagttcgtttggaatctcggatgttgaggacaatcctcgtcttgaagccattatgagtgttatagaattcagagagagacatgttgatagctcgtaagctcaaagctgctaatgtcgcattagtgtcaagaacaattcccacttgaacttgtaaaacttcctgttgagatttcccgagtaatactaagaagttgataaaaaataaaagccataaaggaagagcacgagatagaagatgattgaataaagacataactaagattgcatgattacaagaggagagacgatcgagataaataaatagatagttttgaagagaccaattccgcttattaattaattacctgttggaatttgcaagtagactattagtttaatacatactttatacttaagagataattgttaatacaaagatgatgtatagagaagacttgttttggtcattttggatagttaacgcgttactcaaatgaggcaaagacgtggtcttccaaaaacatacaatataggtgatacaaatggataatcatttgtgaatggttagttaataaagcttaaagagcacataaactggaagctgcaataattaagattggtttgacttggtttgttgagtgaatgtactcatatattgataagattccacattgaaaggaaatagactgaatatcacgaagtgactaacggtttgacgaaaaaaaaaagggactaaaatcccactaacaaatcatattggaaaaggttattattaataagtctctcacaagcctttggacctagcaggtaaagcccatgctgcctttacatgagtacgtctctttatttcgaaatgtttgtttgttatatattggcttaagtttttttttttttttttttgaacaccatattggcttaagttaaagaccttactagtaggttactgtgaaaaaaaagaaaacatccggaagaaccaacgttaaattccagggaaataaaataattatgcgtccgttttaccaacttattattattatttttttaatttggtgttacaaaacaaatcaggacaatcgagcaacggcgtatcggcctttagtctgccaacccatactctttaatattttctcaaaaagtcgaccagtagtgaaataattaattcatggtttttaaatctagaaaaaaaagctttggcaactttatttttttttcttgatatgaaggacctttgtgggtgtatatcttaatttaggttagatgaagattagctaaggttaaatggttcggaccagttaccatttaatgggttggtacgttaattaaagggaaaaaagtggattgctttaagagtttgagttagagtttgggatccaccatccttgctaatcttattgcaccgtattttaccaattcattttgatatattacgaacaatgttaaaactctaacaatgattttgtttttaatctaactcaaattagtattgacataaaccaaaacattgattatatgagaatatacttttcgtgtttcgaatttcatttcactctattgatgaacgctatacacactttgtattggaactctttttttataaactacctatacttattttccatttaattgaggaagataaacaaaaagcaaaagaaaccatctaccaatcgatcgacaatggcaaacctactttcgtaatgttagctacggtggtaaattacccacataaatgaaatttattctattcattagctttgtccatagggtgaagctcaatattggaaaagtcttctgccagaaagaaacgaaagatatttctataggcttttgattgggtactaggttaaggtcaaatatggttcaaataaaagttaatattaaaagatggaaagtatgaagtttatactagtgagttacttgttctttagttttagaatggatatattttattttatttttatactttagaccattaagcaggaaaaatatgtaagcaatactctaataggtagaagaaacaagagatacaagtaaagtagtgcataaagagatgaaaacactgtctttggtacctctaattgttaccggccgttttaataattgataatgttatagtatatttgtttatttgacaaatatctcaaactttaaaaattacacaaagacaaagatgtaaaactatttgcagcatttcaacggatgcgatagattacccattaaaaaaaaaaaaaaaaaaaaaaacacgaatggaatagtcttttcaatggctaatattagttttcacttctgatcacttagtaaaatcatgaaagacacatacattagaattgtgtccatattgaggaaaagagaaagagaatggtgtacatacataaatttaatacatgtttattatgagaaagcaacgtacgtaatacattactttgtctctaggtaacaaattgtggatttccattggttggtaacagaaaaaagaacgattgggggataaactacaatatgtgagtttttttgttcaaactagatgtgaactatatattggtgaatacctttgaaaatattacaaacattactatccatcccatagcgtcgtcaccttactcatgacttcaattatagtctgacaatataggactgaaaaacatgattgcaaatgttgtgaatacatttattttagcacaaagttttaaaagttattggtctattatacgttgaaccttaaatgaacgttgaaatatctacgccctttcaccacccgacccaccgacatttctttggtttttgtttttttagatatatatatatatatatttttaattcaaacatgtaaattgaattaaactggaagataaacaaagctgcaccaggaattcgagccgaacttacgaggtggccttagagctatgttattatgtctacgtacacccaaagtttgaagtacagaattaggttatagatctgtcttgtggaaagaaaaacttattgctaatttaggttgactcagattataactgtagttgagatgagacagtcaatggagacagatctataacaaattgatgttttggcaaataaaggtatgatatataatgtagttatatgataataaaaaaaagctatgatatatcctatatatataatgcatgttgatgtttaaataaaagaaagctatatatgttttagtttctttgtgggtattaaaactcaggcatgagtccctatatgggtcgatcgtgggaaaaaaaaaaaaaaagagagtccctatatggcatgaaagtaacgttagaaacgaaggtacgagtcgtgtcttcactagattcattctaataaagtaaggaagttgtattcataaataaagaatagatatctattgatgttacgtccctcactaaggcttgtgagacaaagtagtgggctcaaatatcttaattaccaacgtgaatcgaatttatatagatcatcgaagaaaggtcaatttacaaacaaagagaaacttcaaattaaggccctatataaatagttagttggggacgaaccacagtaggatcagggactatatcagtctctatctttctctctctcttctgattgtccgagttgtgtctgctaagaagagagagaaacttaaaaccctaaatttcaaatcagaaaatatagagtttgaaggaaactaaaagatggtacattcgaggaagttccgaggtgtccgccagcgacaatggggttcttgggtctctgagattcgccatcctctattgtaagtaattggctctctatatacatatatgatctccattgtttactgttttcctgcttaggattacatattatataatgttgtagttgcttttctcatatgaagctactatctttattctttagtatatttcatcaaaactttatttgtatattaaaacaaacgctctactattgcttaacaatctacaaaatattaaaaggaattaaaagttaaaaccaaccatgcatgctaatcaaagttaagttatcgactgattttcatctacttgattctttgattatttttgtaaattaaatgtggtaatttctaaggttagtttggatttcagctcaaaacttaattgaaatgtttacttggattttgtaactaatataaaaattactaaaatccttttttaacgtgaatgttatatgataccaaaacgttaaaaattatatttcaaaattcatatcatcatatgtagtgtatttagtatttacacgtgtgtgtgatatattaatcaggaagagaagagtgtggcttggaactttcgaaacggcagaagcggctgcaagagcatacgaccaagcggctcttctaatgaacggccaaaacgctaagaccaatttccctgtcgtaaaatcagaggaaggctccgatcacgttaaagatgttaactctccgttgatgtcaccaaagtcattatctgagcttttgaacgctaagctaaggaagagctgcaaagacctaacgccttctttgacgtgtctccgtcttgatactgacagttcccacattggagtttggcagaaacgggccgggtcgaaaacaagtccgacttgggtcatgcgcctcgaacttgggaacgtagtcaacgaaagtgcggttgacttagggttgactacgatgaacaaacaaaacgttgagaaagaagaagaagaagaagaagctattattagtgatgaggatcagttagctatggagatgatcgaggagttgctgaattggagttgacttttgactttaacttgttgcaagtccacaaggggtaagggttttcattgttttccggtttttaatatttttaaaaagtttattatgtgatggatttcctttatttatcgattatacatgtaagaaaattgtcaaaaatacatgtaaaaaaatgtaatatatacagatttgtatttttttgtgtgatgaaagtatacatgcttgttgtattgattgatataaaagattgttcgatttaagtattctcttgttttaattaatgggcctacaattttgttggtccttcaaacacaaacatatatacatatacatttttgcagccactttgtaaaataaacctcaagttgagacttatttacagtggctgccactggcatttaataattatttttgataattagaaagtaaatcttcgaattaaatatttgacatttaactatattcccaaaatctctctacattaactacacgattagttactaaaataaaacttccaaaatatttaacatcatttaaaaattacaaaattatcatttttgatattgcttttttgcatgactataacaattcgattatacgcatcaacccacagagatatttgatagcaattaattattacaaaattacaaaatatttagacaatgattcataaacatatcataaataagatcaatattaataaaataaatagttttttttacgggacggattggcgggacgagtttagcaggacgtaacttaataacaattgtaaactataaaataaaaatattttatagatagatacaatttgcaaacttttatatatactaacttaaaaaaaaaatattgtcccctgcggtataagacgggttaaaaatctagttgttattattaaaggaaataaaatatcctcataaaacaatttgttgtaatctatctttgggctaatgttcttatcctacaagacgaaccctgaccgtattcgtcgtagaaaaaaaattgcttcgatcccatcattgagttcaataatcggcgcacaaaggccgattcataaaaactctaggcccattaaagtaaagcccattctcaaccctatccagtctccctgtatatatatatttacgacaccaacccagcgttgatatttaattttcttcagtcagagatttcgaaaccctagtcgatttcgagatccaactaactctgctccttatctcaggtaaaattctcgctcgagaactcaattgcttatccaaagttccaactgaagatgctttcctactgaatcttaggttaatgttttggatttggaatcttacccgaaatttctctgcagcttgttgaatttgcgaagtatgggagacgctagagacaacgaagcctacgaggaggagctcttggactatgaagaagaagacgagaaggtcccagattctggaaacaaagttaacggcgaagctgtgaaaaagtgagttttatggtttcctcgatatgtttcatgtatactactgtgtgtttaaatttgtcgattcttagattactacttgataacaagtagcagtatgtgtttaattagttgcttaacatataacaattgactgagttcttcattgctataattcctgaaacccacccaatattagactgtcgtgtgtttctcatattgtattttctctttgtgacagagggtacgtgggaatacacagttctggattcagagacttccttttgaaaccggagcttctcagagctattgttgactcaggatttgaacatccatctgaaggtaattaccaataaaaattcaattttgttgcctttcaccattctattactgaatctgaatgatatggtagaatttacagaagtttcttctccataagctttttaggtgtccggagacttttaattatatgtacttcgtctagttttgagaagatatgttggtttaagatattttactttatctgggtcccttgcttatcacctaactaagtccaaaatccaaaagttttgtgttgattataaggttaaattcttctttagtttcctgtaataattttttttagttttctgtctattaacgtttcactgattactttttccaggtaataaacgctaatttcgatctattgatttggagtgagcttaacatgtgctaaagccaccaatttaaaagatatggaggttatcatctacttataaagggtttcttcggtgctattttctttggttctcgaccagtgcaacacgaatgtatccctcaagctatcttgggtatggatgttatctgccaagcaaagtctggtatggggaagactgctgtgtttgtcctgtctactctacaacagattgaaccatctcctggccaggtttctgcacttgtcttgtgccatacaagagagctagcttaccaggtatgaccttcttgtttcactcaggttcttggcttatagtcgtgttttacgtcttcaagttctctaatgcttactatgccttgatgctgaaaattacttgcagatctgcaatgagtttgtgcgattcagtacctatctgcctgatacaaaagtttcggtgttctatggtggagtcaacattaaaattcacaaagacttgctgaagaatgaatgtcctcacattgttgttggtacccctggtcgagtgcttgcacttgccagggagaaagatctctctttgaagaatgtgaggcattttattcttgatgagtgtgataaaatgctcgagtcacttggtatgctgatttctgacatcattattacatcgatccctgaataattttatgttttaacacttcaacttgtctttaccagacatgcgaagggatgtgcaggagattttcaagatgactcctcatgacaaacaagtaatgatgttctcagcaacgctcagcaaagagatacgcccagtctgcaagaagtttatgcaagatgtaatgttccatggccaattctctctccctttgcaagtcttctagttttcatctatttttagccttctatgggtgatcatagcattatttgagcatcttctgcggttctgcccttgaaaagctgaaactgatctctggatgggtctcaatccaataatgctttgggtagtttctagagaacgagactgtgagtgtgagactctttagctttggtatggtttctatcggtgatcatagcattatttgagcatcttctgttgttctgccctggaaaagttgcaactgatctctggaaggatctcaacctaataatgctttgggtagtttgtaggggttgagaactctgagtggagactctgtagctttggtatgattgagtgaccgttgcacaacaggatttcctttcatcttaaccttttattcagtttcaatttctttgaaaatctagcagtggtgggtgggttttgggtcggggtactgtgttttcccaaggtttcatcgtgctcgtatgggtctcaatgttccgagcaatattgatgtttcatagcaaaactcacatctttgaagagaaaaggtggacgaggatctcagttcaggggatctccatccatcttcacttttgtagtgtaaatcatttcctgaggaaagctagctaatacttcttacctggtatctgttcctttcagccaatggaaatatatgttgatgatgaagccaagttgactcttcatggacttgtccaggtacgtttaactggtttgaggtcttcgtattcaatgtaaatatatgttgttgtttgatacttaagtgaccttttttctgttctactgtaacagcactacatcaaactgagcgagatggagaaaaatcgcaagttgaatgaccttcttgatgcgttggacttcaatcaagttgtcatttttgtgaagagcgtgagcagggctgcggagctgaacaagttactggtggaatgcaatttcccctcaatatgcatacactctggcatgtctcaagaagagaggtttgtacattctcttaaaaattcaatgtttctgaaggaccctacctgctcttaaagccctcatggagagtccaattcttaagcctaatacgatatgttatgtaggttgactcgatacaaaagtttcaaggaagggcacaagaggatccttgtggcgactgacttggtaggaagagggattgacatagagcgtgtcaacattgttatcaactatgacatgccagattctgcggatacctatcttcatagggtaagtatataatcctgagatttattatttgatcgttgatgaaagggctcttgtaactttaccgttttgctgtgtgtatgggataggttgggagagctggtagatttggaaccaagggtcttgcaatcacatttgttgcatctgcttcagattcagaggtccttaatcaggtatggtgtttgatcttttaataaattccatggaaaaagtccccatgatattgagttgggtatttagtaaagtggcaagtataaatgttggacaggttcaagagaggtttgaggtcgatataaaggagcttcctgagcagattgatacatcgacttacagtaagttttaaatcccattactaaatgtgaaaaaggctggttttgtctggtattgatattaacttagtttcttcttcgtattctttgctcagtgccgtcttaaacaagtagcatcatctctgaggaacgaacctcttcagatttcaaccttttaggtgttcaaaggggtcatggaggtccacaactatctctcacaccgtttgttgcttcgctattttagacttttctatgaggacaagtttttccatatatttagaccgttttgtaactcttgaaaaatgagattgagctactctccaaatcgcgcacagttgagagctctcctgttttttgtactagtgatggttatctttaaaatattaagatttcaggatttattctttggcttgatcattgattaaatgttcctagtgaattgatctagtttgatgcaaagcgaatattattgaatgttgataagaatcctgaacgtaaataccgtcttttatgctgaccaatgaacaaatatttcatgtaatagtagtaggtaagatttaagtttgcatcagtctatcttagatacatttaaacatatttgagaaaaggattccttaaatattatgattatgcaatctaaacagtgaaagaaatctagagtttaggtttgactatgctgactttagccttgatagtggcgcaactcttctaatgggtatagtgtttgaggtcagtttcttacgacggaccaaagctgtgtcgacttccacaatatgatctccaacattaccttcttcattgacttcttcttgagctgcattggcttgatcatttggtagattgggtgaagcattgtgttgtctctcttggtatcctctagaagccaacatgagtaagagtagaatcacagaaacaacaaagacgatcagaaatagagcttcaaagctgtggtggtcgagctggattggagaatctgatgtagtcgagtccagacaatgtttttctccaaggaaccacttgttctctatagctttcatggcatctccctctgttatgttcaagatctgtcttgaaatatctgacaccaatggagatcctagtggaaatgcctgcaaaaatcattgagatttagtatcacttctgaatggtgccagtgtagaaagctgcttttagttcatcgttcacaagtttggtgcgtacaggccaaaacgtttgaatgttagctaaaagtggttttgactacaagcggtgtacctctcttctgctgccaccattaaaagtctaaataaaaagcaatcagctccacttacaaagccaaagccatcagccttaaaggtaggctcgatgatggaatactctgagcaatacttagccatgaaaagcttgatataagcgacctcatcgaacgcagcatcaatcccgccattgctgctcttgtgaagaaaaagttcacgcatctcttcaggagaattatatgtctttaacctcgattcatcgaaacgcatttgtttcagcctttcgaatgtaaacgaaccagtttgatatccaatgttcactccgctcttcctcaaatcatccatgtgtctcactgttggtcgaagctcttgaactgtcagcatcgatgtcagtgttgctgtgtagctctgagtcagaattagcaacacaaagcaccaaaccacaacaagaacccttgtaaaaaagctctctgatggcctccctataaagaaaatgtttgtagatcagttttcttgtttcaaagattttcaagtaaattggtaatggttagtagctgaagttgtgtgtgacagagattaactcactgtgtgcgaaaaagagagtcgaaaacgagaagtagaacacactagatattttatcaattatcatctgttccctgaactcctcatctgcttggtactcaaaaatccaaaccatgattccaatgtagagaaaagaagcagcagtgaccaaccatagctcctttgttaaaggctttaagaagacccattctcctttttctttcccatccttgactggtacaaggaatacaattccggtctccgagtatggcaacgcgaaatcaacataatgcgaccgattagccaaaattgttgtatcacctacagctccatcaaactcctgtcaacatcatttgtaaaaaagatattaacattttagctcaatattggctctccaccctattgtagacgccttaactatcaaaaacaaaaaaaaacttttacaggtctcatgattatgtatgtatataagaaagaaaaaaaaaaaagaggaattgttttttcaaatggttagggatcagagtaacttaccccaagaaacacattataaaccatttcatcgtaacttccacgaggttttccatcaggcgtatcaaaggggatgtactcataggagacagcatatggcatttggctcattaccgtgttgaaaacatctatgcaaaacccggtgaccgttggaacattagtattttcatccttggttacctcaacaaaattgttgaaaccatccttctttggaactgctattcgcagcttctttgcgtttgttgggaattcccaacctttaggcacaaaaatagtgtcaccaggccatattatcggtctaaggcgacgggagctgtgagacactttatctactcttaagctctttactaatcctacttttgatttccaaaatccaaccgttctttcaccgctttcctctatattgataatcttgaaagtcgtcgcctctagctttccgttttttagctgaaatctcccggcaacacctttgaaactgactgttgacaaggcatcaagaagcttgggaccagatagagcaacgccgagttcatcaagatcagtcccaatatcatctcttgaagtgtcttctttggtcgtgttgaaactcatgtttacgtgcctaatttcctcaactgacattgcaagtgctgtggcagcatcataagcccaacatgcaaagttgttcagctcttctcctccgaatcttttttgccaacgagcttcaagatgtagtagctctttggattttgcaaaatatgtcttgacgcccaagacaccatgcatattcaccaagcttgattcccccattatactcatgagatcagctataccatttgtgactatccatacatatcctttgctcagcatatcaatctcttttgctatcgaaaagagtcttgacccgagatcaggcagcatgtgcacgataaaaaccctagtaggcatggtcattagtttgtaaagctctttcttgatttgatcatcagagtaatgtaatgagatggcacttcggtatcggatacgaacattaatctcttgaaaagcatcaactaagttaggaagaataccttctccgaactcattgtctacatatataggcacaacttctctccatctaaatgactctatgatggcgctaatggcttggacttgagacgaatcgtcgtgagtggctctgatgaaatatggactacggagggaatcaagaagagggcttgttgcagagaatgaaatgattggaactttagattggtttccaaggttgattaaaaatggagcttgcattgaagtccctggtccaataatggccaccacttccctcttctttatcaagtataaagctacagagttaaggttatttaccgtttgcattataagtgtaatgcatttaaactctgtgttaaaaaatatatttatatttatataaaaaaaaacctagacagttgactatattttataaaaagaaaaagtgtttccataacattaggattgttcatgtgctataggcaaggctttcaaggcatacaattataaatatcatattaaaatatagcattaacaacatattgtaataaaatttaatgtacgcaagatcgagtacctgaagcggcagcaccaacaacagtttgtttggagtctcggacgttgaggacaatccttgtcttgaagccattatgagtattataaaattccgacagagacatattgatagctcgcaagctcaaatctgctaatgtcacattactgccaagaacaatccccactttaacttgtaaagcttccttttgagatttcccgagtgataatactaagaagacgaggaaaattaaaagccataatgaaagaaaacgagacacgagatgatggaaaagagacataactatgatgatttcataactacaaggggatcggagagactacgggtcaaataaaatgatagttttgaagaagataaccaattcagtctaattacgtgacggaatttgcaagtagactatattaatttaaatgatttaataacataccttagagaagactttttttggtcattttggagaagtaacgcgttatccaggccttatgaggaaaatacgtggtcttccaaaaacattacattattattattaaggtgatactaaatatcaactaagtgactagctttgcgtaattaagccaacatttaaatttgactagaacgaattaaaaaatcaaatattttttaaaaatgtgtataattttcagaaagaataatgtgtattagaggtgagtttgcgagaaaaaaaaagattagaggtgagtttatttttttctttttctttaaaacctattaaatcatacggccgacttcgtgtcacaccacacgtagaaataggtggaagaaaacctagttgaccgaagattattaaaaagtctttacatgactaagttgaacatttgacttgcttttattcgtaatcactttttttttgttctttaaacaaaaaatttcatgattgtgtatttgcgttcatttaaattttcacattcttcattgagcgcgttaacttagattatttttcgtatatctatattgtgtttctatgttggatttgacacctacaatgttattttttgctaaaacctttgaggatattattacgcttaaaagtatgtttaaattttcattctgatgataccataatgtcacacaatttcatactccgaactgaaaacatagacgtgtaacacgtgttgggtataatcttcttcatgggatcgttcatgtattcttgggaactaatatatattctcgttgctgttgagattttgtatcaaaagggtttaaagagactgtacagtttgaggtttagagttcatggtttgttagccaacacgtcaaggcaggcccaacataaattgatgtctaaagcaaaaataaaataaaatttaagcctttataaaaagagttgcaatcctttttacaaaaagttggagaatttggcctcatcttgtggtaaagccagtcgatgaaaaaattcaggtcgtggtaaaagctgccagtaggtgaaaattgttccaaaaactacaaaaaggattttctgctaaaatcttctacatgtccatattttcatcgaagatctactatttatccaacaagtttttaagattttcaaggattttaaaggattttctttgcgaccagggtgagagaccttttctcttttcaacgtacaatatttacatgattttttttttgttaatatgtagaatagtctttttagttttcttaagaaattactgtgacaattttttttagacaatgtattcaaaatttgtttattagggaaaatatgttctggcttaagaacttgtaaattggtggatatacaattgttgaaaattttaattattctttaccaatttgagtaacatataaatggtaatgattaatattataaataaatgaaaagattaaataatccccaattagatttaaaaaaaaaagattaggatagaaggaaatgacaccattaaatagtttttttctttttttttgtcatcaaattttatttagagctcaaccattaaatagttttaaaatacaatttcttattgaccaccttaattaggaaacaactttagagtctaattatagttaagactcatttagtaaataatgatttgctaaaaacgtttgaccaataaactcatttttattttacttttaaattttattgtcattaaaattcaatgtcaatagtcaactaaactccaagagaagcttgtcattaggtgtaaaatttacatgtaacagaacaaacttagaaaaaaaagttcatttcttaaacttttctttagtaactgttactttgaaactatcaataaaatctagtttgtggttggatacgaaaattaactctttacatttattatcttaaataaccttctaaatcatgtgaccctcatatgtgtataaaaacaaaccaatctgatagggacaattattttccaccaatctacatttcaatttttcacagttttaatctttttcgcaatctagtttttttcttcccaaagctctctccgaatccgagatcgatcatgtcaccaccctccatagaacaactacacacttttcatgccaaagacagaaaaatattctcaaaacttgtcctaaaattctcaaaaaccccagctgaatcacttcttatcatggctacatggttttggcttgaggactttttttctcaaaacatcttatcaaccatattggctttaagcgatccagtcattatggctttagctaacgaggctgtcttgtgcttccaatgccttgattctgctgagcagccaaatgacttcaatcagatccctcttactgcagaactcttagcaaaagacatatctcttcaaatatttcacaaacaccgatacagtgctattgcaggaatcagaaactttttaaccactgtttgttctagaatattttctgatattcttcaacgagctcttccaccttcttcatcatatccttttgtcaccagactccgccatcctcttatcatccccggctttccccatccgacgtttgggagcatcaatgttatgcatgatgttgttgttggggataatctctacaacaacaacttattcccatgttctcatggtctatggggttggaacgctagctgcatcgcaactgataacgaaaggactatgtttataacattttctcgtgggtttcctgtttcgcaagcggaggtgaaacgatttttcaccaaaaactatggagaaaattgtgttgaaggcgtttacatgaaagaggacaacaagaacttccttaacgcaaatgggaatgacaatggtcaacaacaatcactattcgcaaagctggtcttaaattcagttgctactgtggatcgtatactcgacggcgagaagataaaaaggtttaagtctaatggaaaacatatttgggctcgtaagtatagcatgactagagatgattaatttagtttttctttttttgttttgttattctctgataacaaagtctttatattatgttgatgtgattcaataacaagaaaacatatgtaacaccccaaagacgatttgggcttcttcatttttgaaggcaatatgttttcacataactaaatttgaggttaaatgtcactctatatatccaatatatatacttgtaaatacacccatggtctttaactctttataatcctatgacttgtaacaaacttcaaagtaaaattgttaacgtttacattctgaattgtatgtagtatttttcgcaatcgatccagaattatcatagctttatgtcggcaaacaaccatagagttacttcttgataacaaaaataatcaaatcgtaaactgcggaatcaactatggaaaagctaaaggtcattatagaataaactgaaaacgaattgcgtctgccgggagtcgaacccgggtctattgcttggaaggcaattatcctaaccgttggactacagacgcttattgaaaattcaacacggtttatgtatatatactttaatccatgtcaaaagtggactacagaatataaatttcaattgtcaggcctaatgggccattcccatccctggaggaagatctaagaaaaaaaagatatccatataaagttgtggagccatctctagtttgtagtagactggactggactcgttgatcgttattcgcggaacttcatggttaaaaaatgtagaagttataaacttgatgaatgaataaaatccttatatctgaagaatagccacttaggtatatttcattgatattttaagggatacgtgtatatgtgattactggttagtattcaacaaaacccctcaaatccttttatacaaaggctaaagtaaaatacgatataaccattatgattggctaggcgtgaacatgacatgattagtattgtttggcaggttaactctacaataccacaagaacatctggcaaattaatcggtccattcgttgagttttcgggtgtttggttgttttttgacaaattaaatactcgaatacttggattaaaagttgttagtcaacgaattggagtctcacatcaaatcatgcaatttgttaggtaacgacttgcacatcttttattttagtagttcggaaggtgtccaaacgaaagggatttatgaactataaaagaatacagtattattaccaaatcattatattgagactatatataatataatttacttaccaaaaagcctgaattacgcattgactaataaatatccaaaatcgagaatgtcatctctattttgtctgtcgataatgatttattgataccattgatgtttcacaaaccctgaagtaatatcatccaccaaatcagttttgttttgctaagatgatggagatggagatggtgattggtgagaatggtgcggttaaaaacagaagataatggatcattgtggttagtaataatttaacatcacttagagtaagtggctttattcaactcgatatatatatttgtttaaattcttcaactcgatatatattcttcaacacactccctaaaatagaatattcagcaaattaatagtacgacaaaaagaaagcatcccaagtcccacactaagaaaataaaattgctcaatggcgttttccacattgtaacagaattattgtttttgtcatattcttatatgattattccaaacttattacaatattatctatcaaaatgtctccagcatcaaatactagatgaactaacagtcttcgaaagccgagtaccaacccatacaagatgacaaaaacaaatttgatattattcatcaatcacaagtagagtgtcttaattttcttttccatttttgtatatatggatgttaataaaagacaaaatataaaatataaaaaacaaatatttgattatttttcccctagcgggaaaaacatgtccaagcgacaaaggcattgaatcacaattcacacaaaacgcgcatcacaagccgcgtgactttggtgagacgcatgaatctcactcacctgaacggtgaacgctcgacgcgcgttgtcctaacaccattttcctcctggtgtcttgtgaacgctattgggcttttggttgcaatcagtgggcccaattacatttttgtcggcaatcaatgggcccactaaaacaaaacacttatttaaggaaacaaatctgtattatggtaacaaattgttcattgaaatgtttatttataaagatcttggctgattgaacgaaaaatctatcacggatttatctaccaactaattaatggtaaacaaatttcttattttgtaatgaaattttcttaaaaacaaattttttcacattggattttataagtacgagaagatttacataaactaataaatcttttagttgttatctcaataaatttcgtggctatcgtttctatttatttaatttctccattcacattattatcgtttattatttataaaaaataataatatttcaaacgtataaatatatcgtgaaaccaaaacatggaagagcacaactaaatcacttccttgtgaagacttttttttattcacgatctcaccaaaactaacaaactctatcctgcgccgccacttcaccaccgtcgtatccgccgcttcagcaccgtacggagaagcgaatctcaacaccaatccgtcgcaatggggaaaggtggcgcactaagcgaaagcgtgataaagaacatcgttctctcatacagctacgtagcgatatggatcttcttaagcttcacagtaattgtctacaacaaatacatcctcgacaagaagatgtacaattggccattcccgatctcactcacaatgatccacatgtccttttgttcaaccctagcttttctcatcatcaaggttttcaaattcgtcgagccagttaaaatgactcgcgagacttacctgagatccgtcgtaccgatcggtgctttgtacgctctctcactctggttatcgaattccgcttacatttacctatcagtctcctttatccagatgcttaaagctctcatgcctgtagctgtttactcaatcggtgttctgtttaaaaaggaaggattcaaatctgatactatgatgaacatgttatcgatttcgtttggtgttgcgattgctgcttatggtgaagctaggtttgatgtttggggtgtgattcttcagcttggtgctgttgcttttgaagctactcgtttggttttgattcagatcttgttaggagataaagggattaagcttaatcccattacttcgttatattacgttgctccttgttgtttggccttcttgtttattccatggatctacgttgagtttcctgttcttagagatacgtctagcttccacttggattacgcaattttcggagcgaattcgttttgtgcgtttgcgttgaatcttgctgtgtttcttttggttgggaagacatctgctttgactatgaatgttgctggtgtggttaaggattggctcttgattgctttctcatggtctgtgattaaggatactgtgacacctattaatcttttcgggtacgggattgcgttcttgggagttgcgtattataatcacgccaagttacaggctttgaaggctaaagaggaggagaagaagaagattcagcaagctgatgaggagagtggtcggttgcttgaagagagggaaggtgatgttgaaggtaagaagaatgatcagtctggtaattaaatgaagaggttttgattcgaattcataaaaatggagtttagcaacatatagaggattggtggaataagagcagtggaagaagattatgatttggatttggattaatcagtaatggtattggtaggttcttgtggaatctgaggttgctttggatccgttgatttgctcataggtagtgaagtcagaatctcttaaagctttcgtcttgtttttttttcgagctttctttctccttttcgtattgttttcttcatgttatttatgattacaatggtgttacccaacctctgtttatggaatttcttatttaatcatactgaggttattgaaagtttcagtatacttgtggatggtaagatttgttacaagaaatgacagagacagctttgtgtttgactgtctgatgatgttatcatcaaacaattatgaatatgttagtcagcatcatacggctccattaatgaacatttgatgatgccaagttactcctctttagtcacatattgttttcatttcatttagcaccaaaaattatagggtggttctcacacattgttcctaaaaccgactgtgtcttccagagactgtgagttatttccaaacatcttacaatttcgttcctgccaaaaataaaccaaactagcaattggaaggccgagagaatctcatcaacagcagcacaactccctaattccttttgctctccagggaaaaaaaaaatagtcaaaaagttataacaaaaaagagaagtgacgactaataatgtgggctttattaaatgaataagcccactaactatttggcaatgttgatgaccaaggttttataaggcccgttaatctatatttggcgcatttttcctaatccttgtaatttctgttgataattcattaaacccgtaataattaaatttgactaatccaacccttttcgcttcgccgttttgaaacttcagaaaacagaaaaacctctcaaaaaccctaatttgctttcttcttcttcgccgcgacgcctgactctctgtcgctcttctcttccgccaccgtctaactgattcacctcctgggcaagctgaagaaagttgtactttgaagcctgcttctccttcgattagtctggttagttgcctgtttttgttattctctaagtgttgaattagattgtttttgagcgattgggttggtaaagtcgcagcatttcttcaaaggaagatttccatgagctagaagacacttacatccacttatttcctagaccttatctcgagttttggttgtgtgtttgataaggaaggaatttgattgtatgcttcaaataattttcagggaaagatgaatttggtgaatattaaagatgtattgacttctttcagtcctgcactagattatctcgctcttagcaccggagatggccgtatcaaggtatcttcacttttcttctattatggtctaaaggctaaaatttatataagtgtaatccacatacctaattacttttcttcttcagttttcgttgtaattttttagttttattggtaattatatactcggtggtggattgttgttattcatacaattatgcacgggcctctttgatcttacttgtgttgattggaatttggctcgtagtttatggccctgttcagtttgtatggattttttattcaaagagaagatcttttgctttttaattaatgtaattttcgttcgatgttgtatagatttgggatactgtcaagggtcaggtccaaacagagtttgctgatattgcatctacagaggagacaaacatatataccaaagttggaaaaggtcacctttcagtcgattatacttgcatgaaatggttgtctctggagaaaaaggtatataggcttagtttatttttattctagccttgccgtgtagttatagtttgttaaatcattttttttgcttataaataagctttattcttcttgtctgcagaagaagaggaaacttggaacttccgtattggtattaggaactggtggaggagatgttttagcacttgatgtggcttctggtcagctgaaatggagaataagtgactgtcatcccgggtgagtaacgaactctaactgtcttcttctttaccattcttttattggaccatacttgaaagcaaactgatctatttgtaaaaatattggcattctgtgatttggttatgcgctagatagttgttctctctgcaggtctttgtgaaatttcctctctgaagctggttttagacatattaatacgtgtttcctgtcttgtgcagtggtgttaatgctgtttcatcttcagcaaaggcatcttgcatatacagcggtggggcagatgggatggtttgtcagatcgatccccacagtggaaatctgatcagaaagttcaaagcttcaacaaaaacagtttcttctttatgtgtttcaccaggtatgtccttccgtttgatctaaatagaaaaaactggtttcttcaagtacgttttgagtacccttaaaaaagcaacatgaatatggggaactttcagttaaaatgcttaagagtagaacagacatgtatacctgctgatgacgtttttttccttccaaattgtagatggaaaaatattagtcactgcatctactcagttgaagacttttaactgctctgatctcaagaagatacagaagtttactggtcatcctgtgagtacctgtactgtttgtcagcattattttttatcgaccaggttttattgttaggatgctgcctctatgtcacacattcgaaggttattaacagtttttcatgttatatagggggttgtgcgttgtgtggcttttaccgaggatgggaagtatgtcctctcatccgcagtcggggaaagatatattgcagtttggaaaacagatggtgcaaagaagcagtcagctagctgtgttcttgccttagagcaccctcctgtcttcgtggatagttggggtgaaacaaatgaaaaagggttatacgttttagcaatttcagaaataggtgtctgttatttttggtatgggtcaaatgttgaggaactatgcaatgcaacgcctacaaaagtcgcattagcaactgcagattcttccctcaaaccttacaagagctcattgcctttaatctttgctgccaaattacaaggcattttgaagcctggttctgcacatgcatttattgcatccggattgcttgtgaaaccttcattccagaaaatggtgttgcagtttggcaatgacttggtgctgaatgcctctaaggatgggatccttctccctatcactcagtcagtttccaagtccagcaagaggcaaggcgtgcagaataaaggtatcttctatgggctataccttttactaaatcatgaaacttccaacaaagtaaacaaattgattaggctgtttttgtttatttggtcattgtattacgagagcaaattgactaatttatgcaaagatttcaggggcgcaactgtttaacaatatccacaccatgttgaagtagactcgataattttttcttattaggtgtaactggtttttcacattaatggagctacaggatgtatcttccgatatgttgaatcctgttgtttcatcttctcagtatggaggatctttgtcctcgatactgtcttgtgaaattgtgcagtttctattttttccctttcctgtcaataacaatgactgactaagattttataattttatagttacaacattagaccgtgcacatgccgaggatgctttgctgccaatcgcaagagttgctgatctgcacgagaaaaagagtgtacaactacactcatctgataaggatacttatatggttgaccaaagtcatgctggtgagttttacatcacggttctgaagtctaaccgtactgatgcagataacttgattttggctattttagtaaacatatgcagatgcttcagtacaaaaactgctctggccttttcttcattcttttctatttcaaaatttcagatcatgtagaaacatttagcatggaggataagttgagatcgttagggatactgggaggtacagatgaacataaaaatctttcctatgcttcaataattgatggaactgatctcaaggcttatctaccaccaaagaaggtatatttgctttctggatgctcagttctttggcgtgtgttacaacccactgatgaatttctttagagtttttcctttgaatatatcaatcgtagtattcatataaatttttgtattggcagttaaagtctgctgttttgtcaatggaaccctccactgcattcaagactctagaagctttggctgctatgtggcagacaaggttggttctctgatttccttgtttcctgttcgcaagttgtctcatctattcttattattgaaaataaagtcgactctttaaacttcattgttcttctctagagtagcaaattttttttttttgtttaatctttggctataatgatataacccaaaacatgtttgattcgctggtcttaacacagttgcatttacttcaacagggcttgtggtgggaggcatcttcttccatggatatacagcataatggtgaatcatagtcattacatcatgtcccaagaaccaaaaaaccagcagcttcttaatacattggttaaggtaagagataagagtagagccaaggaatttgttaattctgtaatatttgcttggtttaattatgttatactgttcttccagattaccaagtcccgaggaacggctcttcaacagttactacagttatctgggcgcttacaacttgttacagctcaggtaatacccatcaccttctaatcaattctcaaggcggatgcaagcttatcgttgtctagttttaataaacccttctttgatggcagatcaataaagctgcaggaagtcaaacgcaaataacagcccatgatcaagagattgatgaaagtgaggatgaggaagaagatgtagaagaccatttctatggtgagaatgataatgaatccgatttaagcagtgacgatggaaaggataaaggtaaatgattttagattcatttctcgcaatattggtttgtggagcaaatgttatatctaaatcttgcctactgtctttactttcagatgattccttgatggagacgtaagctaatgagcgaagcgtagagaaaggagcgtggcctcttcttctcacgtttttttttggtctcttttatgattcccattatcttgtattagaatttgtatttttgatccgaagcgggaatttttttcactcatttcttgtcttctatgcgttgcacagaattatctgtctttctttaaactgaacaagactacaacgaaacgcttaagttccatagcaaagaagtattgcaacggaaagaaagcctttacttatctagttcctttcatgttggattacgttcaaagagaaaaaagcttaacatgtgtcttgaaaaagaaacatcaaccattcaaatactaaaacttctgcttgaaaatagaaacatcaaccttttctatagcggtgttgtttattattattaccataatgcaaaacctcttcgaaatggctcgaatttactgttaggtcgccaaaagatgtacaacaagtcacatagcatttacctttctcttcatctcggctgatctttttagtatctggtttttcaattgctcactgctcagtgtcgagacatgctttaaacggcacactgatattctcaccttaaaatgggattagacacagccatgtgcttttgatgaaaggattccgaaactgcatgttttgggcttgaagcatctgacgctgagtcatcaacatgttcttctctttcaaaataacatagcacagcttctgaagatcatcccatgactcgagacgcaattttgaagctttccaacctcgacttataacacaccaaaatatatagacaaatgttcttaaaagacctcatcatcaaaacaaaacaatccttaattccaacactacagtttccaaactttttccatagcgaaaccaaaaagaaaaaagcttaagggacaagagttacagttatatgaacaaagtataaaaagaaaccataaaacattcagaaaacttaaaaagcaattggtaacagaataaccacattacatgaaccataaacaccaggtttgtcttcgtcttggcttctgttgaactgaaagaactcttcgagaggattttttggcgttcgaattcttgaggcacaagtggactccaatctcgtggtcgtcaatgcagccgtcaataattgttttttccacatccacaatgaccactaccgctcaagctctcattttgttcacatgaaggacttacgatagttggcgtaacccgcattctccaatcttccagtggttaccgttctcgaccttgaactcaaagacaagctcgctggaagtcaccttctcttcgatttcgaatgtgtacagatgctctgttaagcctgaatatataatgtgccccaatgttgtagacctaacaccgaaagcaacatgtaaccatttgtctctatcatgagcgccatagtcaccaatacgaactagcaagatgcaagccttatatctcatagatgtaggaagaggcctctcattcaacttaattgtcaatgaacccccactcgctcggtgagtgaagtatgcaggcacctctctaccaggtaagactgcttgtttagtcggtgtctggatgattaggtctcttgcttcttgattaagtttaaagcacttaccaaagaagagagtaatctctggattgtgaaaggagcaatctagtctctccaaggactcacaatcttcagcatcaatccattttaaagaatctggaatctgtgggagtgataccacctttctgtaccccttgagtatgagtgtctgaagacgagatattctcttgatcagtggaggaacctcttgtatttctttaccgctcaagtccagatttgtgatgatgtcaagaacatgagggaattccactagattatcaaagtatgacatcagcaattcatcaagacggggccatgacctgatcgagagaggcacttcttctattgcggttccacagagatagagagctctaacgttagtagagatctcaggaaaccttttcaacatggagcaatcattgagcacaagtatgtccaaagattccaagttgatgttgatgggaagatcctctagcttagagcatccttttaaaatcaattcctgcaacttctgaaggtttcctatagaaagaggaagctccaccagatttgagcaattactaaggttcatgtacactaaattagtggcattcccaatagacgaggggagctccaacagacttgagcaatcgtcaagaagcaggttttggagattaatggcattcccaatagaagacgggagctctaatagctttgcgcatctgcgaagatccagtttttggagattaatggcattcccaatggaggatgggagctccaatagatttgagcatccgttaagatctaaaatcaaaagattaatggcattcccaatagaggagggaagtctgatcagactcgagcaataataaagatccaattcccgaagattaatggcattcccaatagaagaggggagctccaccagatttgagcaatagcgaagaagcaatttttgaaggttaatggcatccccaaaagagggaagctccacaagacttgagcatccattaagatctaaatcctcgagattgatggcattcccaatacaagaagggagtttgatcagactggagcaattagaaagaatcaactttcggagattaatggcagttgagagatcaggaagctccttcaagtttacagaataactcaaatccatctgcctgagattatgaagcggctgtacagacaaataacacaaacatggttgagtatacacttagaagtgaaaccacttaacaacctaaaaatacttccatggaaaaaatcgggagaggcaagatcattctattttttaaagctgattaactgtacaaaaaagccaaatgatagattagaaataaagagaaagtacttactttaactccttcccacaacatatcaagcttgctgtgcgtcaggtttagttcaataaggaactccacgttcacagtagaaggcaaacatgtcatcggaaaatatatccaatctagtaactgaagtttacgagaaagatagctcagaccgcgggataattgcaatgtatcatggtcacaatcgaatcttaagaactgaagattagacattccttcaaaaactctctcattcatatcgaattcttcctcgattatgtagtggaaatctatgcctattacacttttactaccctgaaataaaggaacaagaaaaaaaggtctagatggttagtttttaaataaactaaatattgtagggagcaatgcaatgaacttactgctgcatcaccattcagcacatcacatatctcttctccatcaaacaaaaactggcgttgtccaggctcatggatagattggttacgaacaatttctccacctagttttgctagcagtttatgcatctctatagttccccaattgctaaaagatatgagagatttctcagctaagacgttaagtctttgcctgacttccacaaacttctttgcaagatgctcttccaatatcttaatctctttaccgttgaaaaaacatgctatatgaagaaataaatttttatcttcgtcatctaaagcgtcatagctgaacttcaaaatgctttgaatatcagcgtcaaggctactctctaatcttggtaatgactttttccactcttctctcgacattcccctaaaataggagcccataattcttagccccaaagggaggttaccggcaagatttattactttccaagcaaggttctgaaaaccatctttaggggaattttgaccaaaagcatacatgcagaagatttgaagagcctcttcagttggtggaaaatccaccttgtaaatatggttaatcccatgtgctctaaaaagtttctgatcttgtgttgtaatgatgattcgactcccaggaccaaaccaccaagcttctttcgccatcgcatctagttgtactgactggttcaccccatcaagaacgaccagaactttcttgtctttcaacctatcttgggcaactcctaaatgaggaatctctatatccttttgcttggttatttgagacataaacatttgttgtaattgcaactttgcactgtagtcatcggagccagttggtctggtatagtttgctttgatattctccataaagacactcagttggaaactgtgggagagttggttgtatacaactctggcaattgtggtcttcccaatcccaggaggaccccaaatcccaattatccttacttcgtctgtgtctaggcataacaacggtttcatcttttctaaatgagctctcatcccaactaacccgtcgaaatcacgtgaaggagtggaattaatcaatatgttcgaaatatcagtggcgattttcttgatcatggccgcttcattatccctaacaattaggtgggggagagaaaattacatttagtaaataaccatggaaatatcacacacattcaaaaacgaatttctttgatgggttttgtttcaaagctaaagatgtatatagtttacgagcaagtagaaatcataaggactaaccagttgattgaatggtaaccagctactgtggccactttttcccaagcttgtctccatctcccaatgtccttctttggtttaccggcacaagtttttctaaagactttcccgaaatctccggtcagattttttacatcagaaggatccactttgtaaaatatggccatcacagtttgaccatactcttctctgcatttcataatctccaccagttcgtcaagacaccattttgaagaagcatagttcctagagagcaagataattgctatcttagaccctctaatagcccgcagaagctcaggaccgatggattctcctcttttaatctcattatcaacgaatggagtgattcccattctttgaaactccatctgaatgtgactgagaaagtctctacggacatcttccccgctgaagctgggaaagacttggtgtgtccagatgcaagacgaagaaggtggaggaactgatgaaggagacaaagaagatggagatgatgaaggagataaagaagttgacttcttttctttgttatcatgatggaatctgagttttctcaaaagggtgaagaagcctattgcagctgcaacagtggtaaggaaaaacgaagaagccataaaattagtaggatcagtatcacagttttcttatctcttttcttgcagtcaactatcacagagctttaaagaggctctgtatacagtgaaaaacgttgactccaatctccattgactgagaatgttgaaactattacatatataccccaaattctggatatttctcacagaaaattacaagaacgggtcctacatgagcaactagcaagagaagaagcttcgttcaataatgtttcaatagcaaaatgaggtccaacgaaaaaaaaaaactaaatataaaatcataagaagcaaacagcaaaaggaaaatttaacctcacaagcataaacaagacacagaatgtaagaaacagtaaaaggaaagataatgtagaatgtagaatcataaggatttttcattggttgtgagattttgattctaagaggaaagcagcaactaaaaaactcaagataaatttcaagaaagcattgatcaaaatctgagttccatgacttaaaatacttacattgctgttcactcctcaagctttctctttgtcggattttttgcaaattgatcagcgatattgatgatatgagagatttctcaggtaaaacgtcaagcctttgcctcacttcctgttcgcaagatgctagaaagcgagatattagattctctattcgcctggatatactgatgactctcttcttttaatctcattatcattgaatggagagattcattttctttgaaactccatctgaacgtgactgagaaagtctctacggacatcttccctgcggaagctggtaaagacatggaatgtccaaatgtaagacaaagaagatggaagtggtaaaagaaggagaataaatttttctttgttaacattgatagaatctgagtatcctcaaaagcatgagaaataatgtcaaacaatccatagtacactagcaactagcaatagatgaagatgagatccacgaaaaatctaaaatagaaaacaaagaatcagaaagcatacaacaggtaaagaaatgtacgattttgtccatgaaattcggttgtggcaacccgattctaagaagggagcagcaagttcaaggtagcagtgacagaaaacaatgtctggattccatggattttagaaaaaggaaagcaaaagtgtaagaaaacacttacatgattgctcatctctcgagcttgacaagctttggctgtaaaagatcgaccctaccctctttgtccgatttccgcataatatgatcaacggcatcttcgtttacaaatccatggcgacttgtctgtaagaaatcgggagggataggggcaaaaaggaaaaaaaaaagagtaaagattccactatcccagaatttgtttgggactttgaactgcgggaatcgaaaacgcaacctttctactacagtgtcacaatgtcatatcatagaacaaaaattagcttatttttgttataaaacaacattatgtttcaattaagagaaatctaagactacaataagagaacttggtctacaattgcaatattagctctcacatcccatataattttaacatgataattattgatacaattctctgtaaattttatccacaaaaatataacacaagaagaagaaggagatcaaaggcttgcatcagcattagaaccaccaccacctcctctcttgtttcctgttgtgttcttcagaatctacaccacataaaaaacataacaactcaaaagactttattaccacacacacacatagagatccaactttgcaatctcatcttctccattcatatagaacaaaatgagtgagcatttcaagaaccattgaagaatttacatgccttttgagagaatatgcgagtgaatgaccatttcaagaacctacatgccttctgagaattaatctaaagcttaagttagcttcttagatccttttaactaactaaactaattattggtcaatcctagactcgtaaatgtgataaaccagtactgtgatatatcaaaaaacaaatggcaaaagcattgacgttgcaggttaagtcaacagtaagatcgacaaaacgtacatgtctaagcatctggttctcgttctgaagagtagagagtcgctcttcaagttcagagtttttgttctccaagtctttcactctgttttccaactcgctcaagtaagcctttttcctctctcttgcttgctgagctgaaactctgttcctcaacaaccttttcaccacaaaattaccaaacaaccccatcacgcaaccgttatttaacataatcaccttccatataaagggtaaaaatgtaaattcaatgaatagagaaaaagacacctcttcagccgcttgttctctttctccgccggtgtcctccctcgcttcctttgactttctccgacagtcgcctgtgtccgctcctgaccggtcgccgatccagattctctaccggaagtttcttttccgacagcttctcctccaaactccggcactcgccgtatctcctcatcgctttcaattcctttaaaacataaaagagactttagacgaaaagtttcaaactttttaaatacaataaaaaattgcagatcttctgggggagactaaaagttgtgaatctagatgtgaatcaatggtgatacaaaatctagatgtgaatttactagatatccaatgcatgagaatgaaaatcaatgagatcactcgttgggagaagatatgaaaataaaacaatcgacaatttttgtttaccttctttgatctccaaatgtggagcagagcttgatgacctctcgctgcttgatggtaaagagcttgcagctaaagagctagtcgcttgttcctgcatttttcttactctttgaagatcgatcaggcgagagagagagggaaagatttgttgtcttagtagcgaagctggtgaaaaggataaagaggaaaagagcgggacttgggatttacagaagaacttggaaagaatctaattgcgagacattttgggaaggaatagattactctggctaccgccgtcagatctctgaagaatcgaacggatatcgagagtgaatcgtggagaaaggtgagccttgaggaaatacaaggatccaaaggcaattgagattggaacgtgggtggattttagccgttagatctggttagcatcttacggtgaataatggataggggagctaattgggtgggccccattcctgtccttggacagaaaagtttggtctgagttctttcattctgtcacatggcccacgcctagggcagtgctttcaaaagtgtcgtgaaagtaatttattttatttttggtgatttgtttttgtcatgcattaaaattaaactttatagccgccataaaccaaacaaagttgaaacggttttctacaagacacaatctcagcaaggaaataactaaaaactgaatacaagatatcctaaaatttcatagtccaacatatccagccacaccattggacagaatctactactataaacactcctcgtatcaccaaaaaaacttgtccttgacgacaatgttgatgagtttctgagaatcaagtatacaaatcattgccatctcaacgttaacattagatcaaaccggagcttgatatggagctcgcttatctggaactccgtcttctgctcttttatcttcgaaccacttcaaaactcgcttccttggaagattggtcacttgaacaatgctgctaaccacagcattctattcacagcatcatcaaacatgatcatatgtgagatagagcattcaagtaacatagaaattgattcaaatgtaaaaggagaatccttacagtgggtcgttttgatcttctgtaaactttctctagcgtttcaatgtgagctttcttcactcttttctgagcagaccatctctgttgcatcacatgaactgcttcatcttttactttttccttaggttcgaccacaacatcttcagctgataatgattccacaggacttggatcaggtgaggagttctcaggtgctgctactggcggtttttcatctggtagtgtagcacttagcattagcagctttggaggcgggtcacgaagcaattcaagaacataagccctgtcaagacaaacctcagctgccagatttttaatctacagatcacaacaaaaccatccgttatcaattatgcatttgaaaaccagagaactacttgttctttgtcaactcttaaacaattcgtaagcaaaatctccaaagcagacactaactcaagcactatgctttacacaatgtattcaacatcacttcaacactgaactaaaacttacactagttttacgacgcccagctttcaatgcataagccagtcttttaagctgccaattcttcagcttagtcggtctttcatcttcttcgctgtcatcatcatcatcatcattatcatcatcatcattatcatcatcatcattatcaacatcaacatcaacatcaccagtgactgaaccaaacaagtcgatgtcatcaacatcgtcaccaacacccaatgctcgagctaactcatcggctaatgcctctaactcttcctcacttatctcctcatcatccgagttatcattcttcaaatcttcttctaaaagattaaacaatgcctcaaatggatcctcctcctcctcacctcctccattatcagctccatccaaacttttctgccacaaaccatgaaatcaaaggctgatacaaaatcaaaaagagccaaagtctaattcgaggattcaccaattctaaccgataatagctcacttagttagtgtatccaaattctagtcaaattcggcgaaagcagcaggtaagagcaattgcgaacataaatcattctcattctgattttcttacctttttgtttttcttcggagacgaagaagacgaagacacgaatccttttcgattcttgccacgagcaaaaacaagtacagaccgagacggattgagaattggaagagatagaccacaaggactagcgttccgattccgaaacagaactctgttgacggataatcctgacgacgaagaaaacgacggaggatgaagatgagagacgacgccggcagaagatagagccatggcttttatcatcaaaactgtttgctgttttcagcagcagtgagaaaaataatcggatttttatatgaatctttgtaaacgacgtcgtttatcccttaaagatctaaacactgactccgttttgtgtttacagtgtagcaaagcgtgtcgtttataaagtatttattttgttcttcgtcgttatcgtctggtaacaacgggtccactctgcatctctctctctctctctagatttgatttctttgcgggcttgttaatggcgaacccagggcaatcaaagggatggataaagaaatggacgtctatggcttcatcggtttacttcgtcttgatcttattccagatccctctcttcaggtaaattcatactaaaacaaactctcagctgcgtaattcgaaccctatatttcgttatctagtgatgcgtctatgaatccgatatgtggacgacgcttagtctttctcttgcgtaaggttgattaatgaaaaacttgatttctgattcattttcaagtttccgcatttttgtgtagctggttttagtatgaaactctaagctgattcaaaattttatcagttgattagaatcttaataatatggatcattagtcattacttggtttgtttgtctctctggttgatctgacttgaatcgtaatcttaaaaacagagttccatgtagatctggtatgtgttcatcgccaatccatgtgacatcgtctcagttgatttctagtgagatctttcctgttccgatgattaaggctctcttataccctggtgctgtagtcaatggccttgccatcaacatgacatttccaaagtgggaaaatgtgttagatatctacaatctcaccaatgtgaaagaagcttctgcagtgaccgatcttcaacgcctagaggttcgcttattctatctcaagagctcctaacacagttcacttaagattctactaatagtctcacaagtgatacattttgtacaggttcttgcagggagctacttttctgtagctggggcgtttgtgggtttgctaaagcctggaaggatgagcatgtttgggtcattgctactagtatggggtcttgttaaagaagggatcttagggaagccagtaaatactgacccagccaaaactgtttatgtgtacccaactatggtgcttgcgatgatctgcgctttctctatgataaagtatgacttgaggaaagccacgagggcagctccagctcgtcccattgctaaacctctaatgagctcttcaaaatctaagctgaagtgagttttttgagacttaatagggcttgtgtcctgtctttgtaccaacacccgggaaaggaaaatgtcccggaaaatggcattgtcactatattttgctctcagttaccttatgtttcatgaattgtctattttctaggacactgctcagtagtcaatatcttccaatatcaaaaaagcacataaatacgaaaattgaaatgagtagcaatacaaggggttccaatgaaaaaccatcgtattgcttccagtttcataattcgtccatcttgctcttcaacttgttcgtgtaacagcttattaactgtagtttttgaggaatgaatccttgataaagtcccccctttccccatataatatagcgtctctttacttaaccgaaaagcctataacattcaccacgagaggttcggatgacttggttaagtcctaccaatggtatgcgtttcttggtcaaatgaaatagtgtttttgaaaggcacaaacgatttgccattgacattttcaatttctgactaattctttatcaatttctttctccagtagtgcaagaaacaagttttctctcatctttacagaattcaaagctctggtgtagttgaagtcatataagacatggatcagaatcagggtattacagtccttccaggtgatgcccttgtggattccatcaaagagaacttggaatctttgtcttctctttcaaccaactgttgtatctataaggcacctgagaggctgcgcagattgaaccccgatgcttattcgcctcgggttgtgtcgattggacccttacactacggtaaagaagaacttcaagccatggaagatcataaacttaggtacctacagagttttattcctagaacagccttaagtttggaagacctggtaagagttgcaaggacatgggaagaaagggctcgcttttgttacacagaagatgtaagacttagtagcgatgaatatgtgaagatgttaatcgttgatgcaagcttcctagtagaacttcttttgaggtctcagtttgatgtatatagaggtatgctagataggatatatgggaagcaaaagatgattgtcgatgtgaaccatgacgttatgttacttgaaaatcagcttccatattttgttgtcgaggggatgtttggattgctacatgttgactaccatagggaacttccccctctgactcgaatcattcacaaccacttcaagaaattctggatgagcatcccttcattttcgagaagcatttctgattcaaagatctgtcattttgttgaccttctgcgatctattcacctgcctttggttttgagttttcctggaggaagcatgaggatgatggactctgtactgagtgcaaaagagattcaaaatgccggtgttaagctccagcccgcagataacaacacctgcgcacttgacataagctttgcaaacggagtcctcacgattcccaaaatcaagatcaacgacatcacagaatctctgtacagaaacatcatcttgtttgagcaatgtcatcgtttagatgcttacttcattcattatatgaggttcctcagttgcttcataagatctcccatggatgctgagttgttcattgaccacgggatcattgtgaacagatttggaaatgcagaagacgtttcgaggctgttcaatagcatattgaaagagacaagttacagcgggttttactataagacagtctatgggaatctacaagcgcattgcaatgcgccttggaacaagtggaaagcaactctgagacgtgattatttccacaatccttggtcagctgcttctgttgtggctgcctgtgtacttctccttcttactttcgttcaggctatatgctctatattagctttatgacttgtgagacagtaaaggataatcaaatgttgggaaagaggaatgttatatatgcagagaatcttgtaacagaagcaacataagattaccagttatgtgtgtgggtttgttgaatgttgtatgtgaatccagtcgccattagactgagattagggagaaaagaatctgagggatgtgaggaaagcttctaaactcactgagattagggagattagagtctgagggatgtaagcgaagattctaaacccatttgtttttttgtgattcattgatactttcattgtttctttgtttttcatcaatacaattgtggataagcaaatatgcatagagtttatatgttgaaagcttatcagtcatttaaaagaaacgaacaacatagttgtgtccactgaactagaacagacattaatttaccccaatagttaaaaagtccaatagaaagaacataaaaacaagagaccatcatttttaagaaataaaacacaaaacaccgatgagccgtagtatggtatggctagagctcaactggtcttagcttgatctgtggttgaaggcttgcagactcttaaagaggaaacagaggagggatgattagtagtggtatccctaagttacgacacacaagctcacatccatcacaattgacccataaaaaatcttataataaatcatccaacacaaattcacgcttaaacaaactcaggagcaacagttgtactagtaaggatgactagcataagaagagaataagtgatcatgtaaacaataacactgtttttaccattttatagtgagaagttaccggtttaggcgtcctgatctttgtaaatgaatctcgtgcgcaatcacggcggtagaggctattgccatacagaaaattataggtaagtcgactttgagaaaagtatctgaagcggttttaagtcgagctacagacttagggatttcttgtttgtttagtggaggactatataaggaactgtagctgtgataactcaacttaaggaactgaagtgggtatagttgagagtttttaaggaggaaaagtgttggcgtatcttcgaattttaggatttgattgaatttgtggaagattgaagaacttcaagccatggaaatacatacattgaagtatacctgaagactaatttgacgaataaaatcaagcatggaggaatcagtaaaaaggggataccaaatgttacacgggagacgttaattgtagatggaaatgtttccatatgaatatagcattgcgaaatcagaacaaacaacataacaatccagccatgaacagtgaaatttatattaattaacacttttgtattcgttttccaagtgctcctaggtacaaaatcccgcaggatagtaaatagttgtagcaatgcgattagaaaaattccataacatttatttaaagctaagtggtgtgacaagtaatggcctacaattaaggcgccacacaatagctacagaattacagacagacaaaactggcaaagagacgacataacatccaatgtctgaaaataggtattttgatcacctgacttgggctctgttttcgatgttgcttggtgtcatcttgagaatagtgatgtgactcgtttgggagatgtcagctttgccacgctcttaaactatcaaagtcatacagaattaaaaccagttcaatcattcattcacttttcttcaacaatcagtagtttgatttaacggtgttttgtagagaaatgtacctttggttggttgtatttctcacgggtggcagcgagagtacagccactggtgttgagctgcaagtcctccatggcgagaactgtgttcttcagctcagctacctcatatctggtgtagtgttgcagagtagggttctataaccaaacatcattctttttatcagcacaaaaaagaggcaaacacaaaaacaacctttttcaagattcaagaaacatgagctgacccaaggatggtcagtttggtcgagtgtccatcgggctaggaaaacagctgaagcagcaattagtgatggcaggaaccttaggaaactatattccaccagtgtcaattcggcgagatagtttgctaaatactccagttcaatgaaaggcacctgcaaaataattataagaaacaacgcactacattcagattccaagtttctgtagaagtgagggttgatgataaatggatcatggtttcataccttgtacgaagcttgagctgctttaatgaaccgcctgaaaaaacattggtaagatgaaaactcagtggtactatttttaaacaaagttggaaagatatgatgattcatagttctgccctttagtatttacctcagaaatgttttggtggtaggaaccgataatctaaagtgcacaaaatttagaatttgaatctccatgctcagcacctgaaacaaagattccagtttatatattttcatcaagaatctgtacacattaaagataccgagagatgtgtgatttgaatgttaattacttctggtcttgtgtatgtgttggccgtaatgaagcaaaactcctccacccctggtgcggaaagctcttcatattttctacaaggttcaacaaaaatgtataaggaagataagccttacttgtttctctacttagcaagtatacatatatatataggttcgcgctctcccagtgatggaaatgctgttctcattgctataacctgaaattgacaaacacacacaaacaacaaagtagggacttacgaagctataagcatgcaagagacaccaaggagctggagtctttgcctttcaatgtaactgttggacagaaaccggtcgataagattcactgtaaggtaaagcgtatctggaaccagcttgtagtcgtcagaaacctgaaaataccacgcacttcactattttactcaaaagtactctcagtttttgctctaatttttgtaagaaagctatgtatagtaaggtttagtgtcctattcaataagaaacataataagatgatgccgttatttatatatatgagctaagtttgaaggtaactaacttctacaagccagtcaatcagaatctttctcatgtctgggtcgatatctcgctgcacaagctccatataattagccaagggtcgttgttgaagctgcaagaaaagagaggttataactccaacagtcttcatataagtagttatattgagattagttacaagaagttaacagtggaaagatgtaaagcaaatatttggatcatgtaattcaatacctctgcaacatgtatgttgtcatatatatcagcagcatacaagctgcaacactgtggatcttcgacgttggaatcaatatctacaacttgaagtaactccatgacacctgatccatcttcttctgcacaatccagtataagatacataccttaagtaagtttgagaaattcatgttggtatagagttcacttgtttcaacccttgacaacacaaatttaatgggaataactaatttcagcattctggagtccaatgcttgatttaaagttagcgagtgatcaacatgacctcggaaatgaggagaaggtggtaactatcattattttcacgaacactgtagttcttacgttgctcagtaatttcttcatctttaaagtttgaaagagagacatcttgggcttcagccatcctgatcttggacaaatcttctgctaattttgatttttctgtatgcatatctaccagaatatccatggcactgttagcaccttcctttgctgcttttttaggctcttttagacattttctgtttgcctgcaacgtgatgtcaacagtaataagcccaaagggaaagtttgaaggctatattaccaacataagatataaaccaaccaagacaatgaaagcgtatcatctgaaatctttaccttgatgttgcctccctttcgaagttctgaataaataatatctgcagaggtattactcacatccttaagtactgcacgtctcttttgctgataaaccagaggcaggaaattagagagtttagcatcagctcttgaaattcatgactttctataagaacatgtttcagtacctgtttaaaagaaggttttgttggaggtattgatactcctcttcccatggcttttttagctcgtgatctcgttattcgtacaaaactctcctgtacatctgaagtagagatattttctttgtttgcatttggatgcatcgaagaagagcaatacataatttagtctggaaaaaggccagtggttaagccaagcctgcagaacaacaacagttcataatcaaatgtctatccttgcctccatcaaaaagatcaagcaatgttcaaatgcagcataaatttcaggaagaaacaagcatatagtggcaattaaaacgatttcttcatactcaaatttagccacagatctcaattccacacgattctaactattgagtaaatgtcagcttaaacaagcaacccagcttatcacaactagtttctatgtttccttcacattaatctgcatcgatagatccaattttcaagctagtcatttccaaatcgaattaagcattgttcttcatagcaaaaatcctttaaaagaccgattacttaaacaaacaatgagccatagagtacacacacgtttcataaaatccagtcaaacagataagaacgatctcaacaatttcaatttcccagtgattagccatgcttgaagaacaaatacgcagaaaccaaatacaagcggaaacaacaaagaggaatcgatcatctcaatcgaagaccaaaaaacattcgctagagagatcgattagactaaaatccaaactactattagctccgatcgatcaaaacgcagagcaacaagctacgattcagagaatcggtaatcaaacaggaaattgtgagcagacgagaggtgatgatgatacctggctcaacaaataggtttatgagtttgtgaaggagctctaatggcggtaagagaagctcaaggagagaagagaacgctccagagagagagagagtgttgaaatatgtgtaggtgggggagagagcggagaggagcgggggaagcgactgactgaaaaaggtactgtttgaaattcggatttttttggatataacaaaaaaaaaaaatcggaatttaaaaaatctttctttgctttttttggaaaaatcttcaatttctttggtaaaaaattgtaagaatgatttctataatttggtccaagttactatacaaggaatagtgcaactgtcttttattactacacatatgttggagctgtcaattaacaaaaaaaagtttatatgttatggtaatttgtttgttttttaagaactacactacttcgatagatagacaaattattggtcgagaaatttccgacaaacataaaatggtaatgactattattttgaaaacaaaaaatatatttaccttacgtaaattacagtaatttctaatttggaaacgaaaatacattaatagacattatatttacattaaacgattctgtacgatattatcaccgcaatgtatctaccatcattcacgtttttaatcgttgatttacttaatcaaattaaaagatgttaatttaaaattcatgtatctggaaaatacgatccaaatacacatcaacaagtgctcgagttcagatcaattataaatttttgacatttttctaattatacacatattttccaactattttaccttaaaatcaatttaatatatttggtcaataatatttatatgtttatttctttaaagggataaaataaatttgaaaaggaaatggagggagaaaataaccacatccattgccttgcattctcacaattatttcgaaagatatttattcacatatagaaattcaaacattagtcaaaaaggcgtttctaccaatttaacaacattaattatatgtatttggacatatacgaatcacacgcatacacggattcttacttgcaaaataataaattgtaaattatccaaaaaaataaatgataaattgtatatacatctttataaaaaacaaattaaatacgtgtggagaaggactagaaagacaatttctaagttgtatgaggatatatatcaaatattctatatgtaacttcattttaaaataatgggccatgttgatcgatattttcagttaacaaacaaaagcccaaatggcgcgtaatcggagtgtcctaattttctcggcggacacttaattctaataaacggcggcagaaaatgaactctctgttcaccgccttccgccgcaacctcctcttaaaccctaatcctcaccgcaacttctttcttcatagattgttatcatcatctcgccgttcatccccgctcattcccgtcgagcctctcatccaacggatacaatcacccgccgtacccgattctacatgtactccaccgcaacaaaacaccgtctcgaaaaccgatctctctactatatcgaatcttctcgagaacactgatgttgttcccggttcgagtctcgagtcagctttagatgaaaccggaatcgaaccgagtgttgagttggttcacgcgttgttcgatcggttaagttcatcgccgatgttgcttcactcagtgttcaaatgggcggagatgaaacctgggtttacactttctccttcacttttcgattctgttgtcaattctctatgtaaagctcgtgaatttgaaattgcttggtcgttggtttttgatcgagtgagaagcgatgaaggatcgaatttggtttctgcagatacgttcatcgttttgatcagacggtatgctcgtgctggtatgcagatttcttgtagcttcatcaatattgctgatacaaagagctagcttagagtaatagaagcataaagcttttgactttaatatagtttttccaatttgcttgtaggtatggtgcaacaagctatacgagcttttgaattcgctagaagttatgaaccggtttgtaaatcagctacggaacttaggttgcttgaggttttgttagatgcactttgtaaagaaggtcatgttagagaagcttcaatgtatttggagagaataggagggacgatggattcgaattgggttccttctgttcggattttcaacattttattgaatggatggtttcgttcaagaaagctaaagcaggcagagaagttatgggaagagatgaaagcgatgaatgtgaagccgactgttgttacttacggtactcttatcgaagggtattgcaggatgcgtcgtgttcagattgctatggaggttcttgaagaaatgaagatggcagaaatggagattaattttatggtctttaatccgattatcgatggtttaggagaagcggggcggttaagtgaagctctaggtatgatggaaaggttcttcgtttgtgaatcaggtcctactatagtgacttataattcactagtgaagaatttctgcaaggctggagatcttcctggtgctagcaaaatactcaagatgatgatgacacgaggtgttgatcctaccacgactacatacaaccatttcttcaagtatttctcaaagcataacaaaacggaagagggcatgaacttatatttcaagttgattgaagctggacacagtccagaccggttaacgtatcatttgatcttgaaaatgctgtgtgaggatgggaagctgagcttggcgatgcaagtgaacaaggagatgaaaaacagaggaatcgatcctgacttattaacaaccacaatgcttatacatttgctctgcagactcgagatgttagaagaagcctttgaagagtttgacaacgcagtgagacgagggattattccacagtacatcacatttaagatgatcgataacgggttgagatcgaaagggatgagcgatatggcgaagagactatccagcctaatgtcgtctcttcctcactcgaagaagctgccaaatacatacagagaagcagtagatgcaccgcctgataaagatagaaggaagtctattttgcatagagcagaagccatgtctgatgtgttgaaaggttgcaggaacccgagaaaactcgtgaagatgcgtggatcgcacaaaaaagctgttggtgaagacataaacctgatagatgatatcaatgaacgaaatggagatgcaggggattttgagtgagagcactctcttgtaagttgtaaacttaaggttggaaataggctcgtaatgggccatttagtcctagacttcaagccacaattttgattctaagaacccaagcatcttgatttctagcgagatacaaacatcttgttatcaaggacatacaacctgaagcaaatgggattcaaagagagaaaaaaaatcaatttttttaataaaccaattgattttactttgtttatgtcaaataaatcaaaattaaactagacacaaaccaatttagtgtaagcaaaactatgtaagtaaacaaaaaaaaaattgcattcaagtttcatattctttagttagtccgaacaaaatttcaggcaaattaaaccaaaccaaaccaaaccataaaaacggtcatatatttgaattgaataaccaaaacaaaacaaagaaaatgtcaatctctacatatatgtatgtgtgtgtgtatataaggtcgaatcctgctaaattttgatcacgtgccatatcatatctttcttacatagacttgtcatataagtggaaacgtaaaaaaaatcgacatgtaaacatttagaccaaaaactataaacaaacaaaaaaaatgttgctaaaacttaaaaagaaacaagaagcaaaataaaatttgagaagtgaataaacaagaagacagagggaatcaaaagacgtaggagatagggagaggtccttttcttcttagtgaagcctacgtaataaacacagaggatgatgacattaaaacaactcttaggttttgaaaaataaaatgtactgtaaaaaaataagatagtttgtcagcgaaggtcaagctgctcttaaaagcaacattacataccactgagatgtgttcagatttggggccactcttctcttcttattagtatttctaaagtttttttttttctttgataaacgttttggttttgtaatcgaggttctcaatcatatttcaatatcatcatcaaatcatcactacccaaaactgggattcaaattccatgtcaatgaataagaaaaagaaaaagttatatgcattttaaaattattaaaatggactcaaatccatgtggtcaattggtcaggcaatagatagtgactgaaaaatgggtcaatcgagaatagatattaatattgtaatagttaatttgtaatggctattatttataattcttcaaaacacttatttggagtgctattttctttcataattattagaataaaaattgctatttcatgttatatttttatttacaccttcaaaatttggttgttgaattgagatgagttagatatattcttctttaaatcacgtttgtttgaattttgtttttaatatattattcatgttaagctgggaactaatttatatttatatgaaactgaattgtagctacacaacagtatttataaattccgccaaaatgtttttagtaccatataagagtcaactaaaatttatatttggtaatcgagtagagtgatttatataattagcaaaaacattactggaaagaatcttctaaaattacttaattttcagaatcttctattaacccacagtatctatatgtacttgactttactaaactatcattaaataatcatcacaattttcaaaacctttcctttataaagctatcaatcttttctcattaaatgttgcttctaactaaaattttacccatctggtgatacgacctttagaatacgatgcacacagatacaaaacaatttgcttcttcgtgtgtatatatacatacacacacttatgtattttttttgaatatttatgacgtaagtatataaaagagtgtgagagaaagatcttgtctgatagttctcgtacgaaatgatccaaaatctgtcagagctccatcattgtcgccctcgtggacaactgatatcttgaatttttatgttaattcatttaaatttaatattaactgactaatattgactgacttctaaaaaaaaaaaaaaaaaaatcaaaacagaacaaaaaaaaacgctagattaatttttgataattaaaaactgaggacaaattggttgaaaaaaaaaaacggatggcaaagttatgtgtcaaacgcatcgtcatcactctgtcatggtcctaaccatttgtcaaaatgatggccaaatcataaactctatttaatatttttagtttataaaaactgacggcgaggtttaatactaaaatgattagatgtgtgaaacaaaaacttggcaaaatgaaagtaatgggaactggaaaatggaaatagcaaaaggagtaatggtttagtgtgaacttactaagcaagtggaaagaagaagaaaaacaaaaattaaatgggtgtttacaaaatttacaataaacttttttactatttatcttactcttgatttttttttattgtgaagccagttaaacaatatcaaatttctgtatgtaaaaataaaaaaatcagtatgtcaggtttacagcctaaactaaatatatgtttgaattaatttagaaaagagggttaaaaaaattgatgttgtcaatcaaagtaaatctttgtggactccatgcaatatcttaaggacaattcagagtggctactgtcaactataattaccaattttcaataactgtatatcatgtcgttagctattcatagaagcacatattatatgaatgtcaaaagtcttcactcttttggttaagaaatcaaaattcaaagaggcagagacaaattattgttacattcttaaaattaatttgcttcagaaattaagagtataatatcaataaatggaaccaaaattcaaaacaatattttactaagaaattgcaccaaaatttagatattattttacagccaaagaagtaaatattaccaaatttacaacgcatggaagcttggaaaatgaggaaactactcaatattaaataaacaacaaagctaactaacttcattagcgaccatgaaaaaagatacaagtcaaaattgagaacaagaaaagaaccaaattattaggatttattgaaatgaagatgaataatatgggaactacaaatattcctacaactcaacggaccgttaaatttcatccattggtctgttatatcctcagcgatcttaacggcgtcataggctgttcccgaaagtcctcttctcgtgaaacccaccgtgtatagtcccttctctcctttccatccgttaggaaacggcgtttttggcattccttcttttgtgaaaaaactattctcctggaaaattcaaaagatgatcatatatattatttttaatttcttaaacaaaactataaagatatgaggggagatgagacaaagaaaataagaaaaaacaaacgagctttttagtagtttttatatagtgaagaaggtttattccattttgcatggagaaaagaagagttttggagtcttgcttgttccctttgttgcatgtgttgtgtccatatcatagaaagcgatgtgtgattcactaaatgataacactacaaacgtattattgtttagtttttagtctatataccatatctttatcattttaccatcagcatcaccgttattcttgaaaacgaagtttttaattgcatgcatccgtatgttgttgcttcacataatttcatcatcatcacatatacatatacacattgacatatatatagcaagagagagaatatgataaatagtatatgcttaaaagtaccttaagccaatcgggtacattactcttatacccagtcgctaatattatggagtcgaattcaatttctttcccattcagaaactttgccccgttcctcgttatttctttcacggcttgcgtcacctaatagttaatacccacaagacaaatcagttcaagtacaaacgcacgcatgcaaacttttcatatatctaaccttttagctaaaaaggtaatttactctagatggttagtattactttaagaagaagaaaaattatgaacttactttaatttgtcctgatcggattaaagaaatggcaccgacatcaagaacgggagttttaccggtgacgttctttagctcaattggtccggtcttaggtcgtcgaaggcctaaaaggtcggtattgcccaacgtagaattagcaagaagtaggagaaatttgtccaccagctttagaggaaaccatttcagtagtgtcatggctattccaaatgttgatagaccaaaaaagtctcttggtaatacatgtacctgcgtcattaattagacccggttactacttatattaacaaaagcttatagagtttaataatgagcatgattaatattttacttacagagtttctaacgaccatatgaggcagagcattgtatctacaaagatccaagctgacctccataccggaatttccacaaccaaccaccaaaaccttccggtttgcgaatgccgaaccggacttgtacgcactggtgtgaacaaccggtccagtaaacttctttaaaccgggtatgttcggaaacaccggttcagcgttttcccctgtggcaaccaccagccacgtggatgtgtatacaccgtcttgcgtcttcacattccatagaccagatgcgtcatcgaactctgctttctcgacggtttggttaaataccggtttgatattaaaccgggcagcgtaggactcaacgtaggagatgaatagttgcttggatgggtatttggggaagtttttagggaaaggcataagaggaagctcgcaaaagtgtttagggagatggagtttgagacggtcgtaggttcttttttgccataaagaagctaaacaatcggttctctcgaggataaccgatggtacgcctcggtttgacaaacaagccgctacggctagaccggaaggcccggctccgacgatgatcggaccaggaacgaagatttgagtaggttctgattctctacaagtgcccatgtcgactaataaaagcgaaagagagagagagagagtaagaaagaagaagaaggaaggaagaggaaagtgtctttatctttctctgacgatcacacacacatgcacctaagaagtgtcctgttttagggtcttcttttgattgtttctcgggaaaaaccaagaaaccaagttggaaattatatagagaccacgtaagatgaggtggtgtaaatgctcgagagtgagtgagagagagagagaaggcgtgagagaaaaggaaaggatttgtgtgtgtgtgtttctcaataagtaatgggggaggagagagagagaaaagagaagaagtattgtgatgtgtatagtgtagggagtagagtaggtctaagaagggaaaaatggtggagatattaaatattaccactggaaaaatctttgccatagattctttactattagtcaaactaaatttctttctacaattaatgactatttttttccctttataatcactaagaatttatttatatgcgataatgcgatccaacatgattactatatattatggttaagattttaattactttgatactttcgtgagcaacatatgttaatagtgcattatgttaaatataattcaattatgttgtgtatagtgtacgtttattaaaaaaaaaaacagttctatgtttagtacaaaaaacattaaaacagtgttgatgtcaggatgtaaaagctaaacatgtctttaaacactaaaacgaacatccgctaactatattgtagtatatgatatatgcgttgacgtgtttcatgacttccatgatcacattcacatattcacattcgtacaattgttataattaaatcttttaccgaaagtttgttggggtcaagtaagtggaaacagaagattcatgtcattaaattatcaattaatcaaatattgtttactttaacaaaggtttagatgaccttctttccatcataagtattcatcttctttccaacataaattatagtataccatatagattattacattttcgtgagaaagaaagatacataatcaaaagataactacttctacgctttgattttgaggtagctggagggatgatatattcaagcacaattaatgagaattgcaccaaacacataattaataagtggatatgtggaaaatgtaatttgacttgccactccttcgttaaatgtcaactaatgcagccgacctccacttcccctatgatctctataaggttgcaatatcaatatttaacatattttatgcgaagccatattcttcaaagcaactaattatggatcatttaaatctagattggattttatactggacgcaacaacatcacatttacttataaatgtacggctgattaaatagctgatatttcgttttgttcaatagattctataaactagttactaacagatatgaaccaaaattacttctatgatatcttaaaataatatgcatatagaatcaaaaattataaaaatacgagatatcattactaaaaaaatcctaaggatgaaatatttttgtatatatatgtatatagtttatactttataggtaaagaggaagagaaatattgggacttaaatgttattttaatgtgacttattttagtcagaaatgtatatatgcgcatggtagtttaagctgtaaatttaatgatgcattgcatgctaaacctcatctcatcgattaacgtttgaccttattatggataccatttcacacagacacaattgattaagacgtaaacgatatccaacgtaaatgttttaactatattaacttgctttctgggtattatttaatcgaaaaataaactgtatatacgcttgacttggatgcatattattactacatagacccaaatgttttgtttgctccaatcaaataaaaaccttattatggtcaagagatgaatgactttatcaacaagatttaattaaaatgccattttttcatgtatcattcctattatttacgttagtactccacttacatataatcatgacatgttcaatttcttttacaatccttatagtaagcaaataatttctaattaaaaccaaaaaaatattctaattatacgtgagaaaatcaatatattggaatatgatatttgaaactaatataattatctttctgcatgcatgtatctctagctagttctagtaaacacaaaatttgtgctaaactaaaacgctagctagtttcaatatatacatattttattaattaggtaaacgaaagatacttattcaatagcaaaaattcaatctagttcaaattttctttaactagcactacataaccgttttaaagatcaggtgtgcataaacttacttagcttggacgagaatcaaatgtttcttacgtaaagataacttcgaaatcaaacgattctatagactcattatttatgcatgcttggtataatagaatggtccatacattttcttttgttaattcaaatggtcctaaaattcagtttaatagagcctagactcatgactaagctggaagaaaaatacaagttatacaagtgtatcggctatactattaatctactctatatgcatgttacatagtgtattgatggtccctttggttagacgaggaatattgtggtccttggatggatcaccatcagcaatcttgtttacactatcgataatggcaaaaatatgaatattacaatgtagacaaaagaatttagggtcccatgaaaacgtcatcttgctctggcctcttcttccaatttctccttctgcattatccgactcaatgctctttggaacttttctgtcaggcttgaatttgccctcaacctcaatttttctcaccatagttacatgaccacactcatatataccatatatagacgcatgcatgttggacatctgagatagcttaaccataaattggagatgtacgttaggattaccctcgacatttgtattcagtatgtgtgtaagtattcaaataagtcatgtaccgacataagtcactgattcattacaattagattaattcatggtatttgatattgtattatttgaaaccactaaaaataataattaagaagagacgatggaatcttttttccttttccttttttttttcttctgaaaatcttaaactgttttcactttttctactatattttatcttgcaaggccatgttaaatgtgattttgaaaacatgatatttttttacataatatcttatccaaagtatgtaggagctaaaatgagcaacattacgtaaaatcagcaactcgactcctctcatgtctttctttaaacatttgtgattttaatttcaattacaattactgtagtattactaattttagttcctacaactatgatgttctttttaattgtagtagtaagataaacaaaaaataaaaagaagtttaaacgatggtccacactccacataccacataccacattctttactaatgcattttgtgcgacgcatcacatgattcacttagtgtttttgtttttctccagaatgaacaactgaaaaaggtgtataatacatatgtataattgtcccaaaatataataatatgtctaaaaatagtatccaccaatcaccatgtaagaatcaacggcttctgcgttgaccattatatttaaatatgtcaacctgtaaatagaagacaaaagcgtctgtagtccaacggttaggataattgccttccaagcaatagacccgggttcgactcccggcagacgcaattttttttttttccttcctttttgacagtgaaaacaaattttctcctgctttgtggattctagggtcacaaaactgatttttttcatcatttttatataacttgtatttgaagtatccatagtttctacattaacgttccaaacaatatgttcaagtctattaaacacacaattattaacatacaacatctctcacatcaaatatttatcactagataaggggagcacaggaaaagaatggcatgtttctctgctccaaaccaaaaacgccatctccaattccgtcatgatccagaccttgcttgatacgccccaaacgccttgcatacaaaacttgctcagaaacaacaggcaatcttattctctgatattcctcaagacccaaacttacattctcaggtccacagttctctaagcatttgcctagcacttccgcatcaagtatcgacatgtttgtgcttcttagaccatgaggggtcgtgggatgagccgcgtctccaaccaacacgatgtttccccaaaagattcgttctaaagggtcagagtcgtaaataacattaaggaaaggatcctttgtttcactcatgagtctcgctagttcggggatccaaatggtttctgcttcttgatgcatcttattgatcatttcttgactcacttttagagtaacagagttgctctgatatcgtaattccataacaacaacaaaatagaaatcaagaaaactacacttgtagacgcatcctaatcaaaaagagagaggaattagtcttcttactttcaggtcaggctctggttgattgacataccaaatccagttgagtttcttgttaaaaagctcgtaaaacacgctatgagtctgttcaccgagatcaaaatacaagcattttccaagatccggatacactttcttaatcccactaactgtttccgagttctcattccctgagaaatcaaatacacctctccaagcacaataaccagagtacctttcacataaaacgaaaaaaacaaaatcctatatgatcaagtccacaaaatatcgataaatgaagatcacactcttatttcaaacctcagtttaaagtcaggcaagaaagttttccgaatcgaagacaaacacccatcagctgcaataagtaagtctccttcaatttcaacagtttcttgagtttccacaactaaagtcttaacctttacattagattcatcttgtgacattgtgaaagacagaaacttatgtccccaaagaaacatggtctgaggcaatgcgttatacagaagagattgaatatctgaccaataagctgctcggaaatcaaaatcctcatctcttgttaaaatccttgtcactttcttctcactatcagttgtctgattctacaacaaacccacaacacacaaaaaaagttaaaaactttaggtagagctggaaaaactaaacgccgattgtttcaattgtcgaactaaactcagtgttcttattacctgatcaatcgagagaggcaaggtgatttcatctaagagctgtggagtagtaagccatgatttgatgatctgccgagcctgagggtcgagtccgagcccagcaccagtaggactcccaacaggaggttcggaagatttctcgagaaccaaaacatcccagcatgctaacgtgagcgagtgtgcgcaagataagcctgctatacttcctcctactatgatcgctttccctttcttcttccccatctcatcaaatcaaatgtttcttctgcttcacaaattgttaacgataagagagagtttcaacttaatgaaacctctgggtggataagaggattagaactatgtgggatgattccaggcccaatattccaagcccaatcgtttggtcatataaataagaaactgatctctgttgtgcgtcaaaactatgtattagaatttcattttgtccaggcccagaatgaattataggcccaatagtctattctctctcccacgaacattatttatagatttttgggtttcccctaaatctcgagctttttcttcccttgatttctttggtctctgtccgtacgacgtcgaatatctagattgttcgacggcgatgggagctgggagagaagtcagcgtatcgctagatggagtcagagacaaaaacttgatgcagcttaagatactcaacacggttttgttcccggttcgttacaacgacaagtactacgccgatgcaatcgctgccggcgaattcaccaagcttggttcgtcttcttcttacttgatttttcttaatttctgtctctctttgctttccccagtaattcctgcttaaatttcttaatgggcatgtgctattacgatttcacgggaatgtgcctctgaatcagaactaaaattcatcgaattttggtatttttgctctcagatttctgtctttttacctgagcgagcattagtagtcgagtttgttcctttaataggaaaagtttgctttggggggtttatgatgaactgttctgtgattaggcttggtatactctacaaagaaagtaccttttgcaatcctgctttcctttggttgtttgtttagttggttcactggtcattgtaataggtgtgattatctgtgtcttctcttttgttcggttccgtgaatttatttgactgagccatgttttatttaggttcagtactagtgtctgatactaggaagaagatgattttatcggtaatattggtagaagccttctttctaagccttgaatggatcgattttgtttgctttctattgtctgttgtttcgtaattaccgattcatgtttgaactttgtggttgatgacattgatgttgacaaagtatcatcttgatcgttgttttaagttgtttgactatatgaatactgcattcttttgttcaaccaagcaaaattttttgtatgttaagcatgtgtaccttgtaatctatcgctgattgacttatattatctttcgagaacatggtccaagactaattttcgtattcacagaattttttcaagctcacttttgtgaaacccttggttggaacatcttttgcgtcaactagttctttaaatgtacaataagatgtgattatgaaagtctaaagactgttaacaacgtcttaaatttggtactaactatttcattgcagttgcttgggtagttatgttcttggtgttacatatattttctctaatttgtgatcaaggaaaattcttcatgttctaataatggattgacttcctctcagcatattacaatgacatatgtgttggagctatcgcctgtcggctggagaagaaagaaagtggggccatgcgagtttatataatgacgcttggtgttcttgcaccctaccgtgggattggcattggtaagtcataaatctgctgtgcaaaacttgaataccgacaaaacatgaataatgaagaaaactgttagcatgttgtgtaattctgttgttttccttacgttttaacacatgaggccagctgtagtatgtttattctgtagttctctatttgaagtgtctccatttagagattcaaaccaccaagaaatagtccttagggttttatgcatatcgttgttttaccgagaaactggaattatgattcctcctatatcaagatttaagatcgaattccctgctttagaaagaaaaactcgatgtctataatttgtgtatcttgtttttttcgtcttttgcaggctcaaatctattgaatcatgttcttgacatgtgctccaagcaaaacatgtgtgagatatacttgcatgtgcagacaaacaacgaagacgcaatcaagttctacaagaagttcggctttgagatcacagataccatacaaaactattacatcaacattgagccaagagattgctacgttgtcagcaagtcctttgctcaatctgaagccaacaaatgatgaaaaataccaaacttggggaagccattcctccccagtttctttgttgcattcagttcaagatctattaatgttatgatgatccttcggtttccgagttttgcttgttttgttgaccttaatttttcttactgattctaaatttataaattcctggttatatacttgcatgatttctctaatgtcctcttggctttggacattttcgtttggaaaagtttttaactttgcaactcaaagctttactaccaagtatcatcgtgtttgtaaatgttggtctatgaatttgagtaaagagagacaatgattcttgttatgagctgtagaataaagtaaagaaaaaaatgaagaatttatgacttgcgttttggcttgcgtgccatttattcacagtgaagactggaagatgtgttcttcttgaatcaaaaaacggcacgtcttatgagtctccgttcatcggtgtctgcaattaagcaccggttcctcgagcttcctcactcaattcgattgaccaatgcggcgttctcgttttgttgctcaagttttctccgacgttaccttcgctgacgcctccactatctctgctccaatcttcaccatgtctactcgtgctccggtaaattttctcagctattctcttgttctatcactcccgctgcgttgcttcggttactggaatataatttgtttcttacgaagcagtacagaggtgcccgaggacgaggacgaggccgaggtgggagaagtttctccgatcgtccgtacaatgatgacgcgggaagagatcagttcgttactggagattctcattttcaatcagttcatgacgccaatttccgattccggcatggtgaaccttatcgacaacatcagcctccgcttgatcagcggcagcaaccaccgttcaatcagaattacgaatttcgacctccgccgccgtcacgaggtcagtggcaacaattccgtcaacctaatcagtttccgtctaatcaaaactacgcggcttgccctccccctccgttctatcaaaaccagatgtcccggccgcctccacagcagagctttcgtcaacggccacggtcaaaaccttcagattaccgtgaatgggaatatgccaaaacgccaccgtctcctggctccggtaatttatgcgtgaccatctcatttgctccggtatacaatttttgatttgctttctcttgtctacagaaaagtttgttgttttatcgtataatatattggcggattaccttgcaaatgatcactggagaagtctttactttcacataccgaggaatatgttgagttggggatggagaaagagcaaattagtgttcgagcttagcctatggtctgcagatataatgtgccttcaggttatagtttctgctatatcttcttggtaattgcttgtatgagggactaaggagacaaaactttcttgctttactatttttttatcatatgtatacagaatgtatcttccatatgtatagtaatctaaaattattttgtatatgtcaggaagttgataaatttcaggacttagaggaggagatgaagcaccggggatatagtgctatttggaaggtaggtttgttgaaaacttttagttgtcttgagtttgtattctctacggactctcttggagtaaagattaaatggtatgcatcataagaactaggcttcaaatgtggggttaactctattttataaaactgtagatgcggactggtaatgctgttgacggatgtgcaatattttggcgatccaataggtttgattcccttgctcttccttgtgtggatcagtctggaatcttgtttaggatttcattgttatcatattagattcaagttggttcacgaggaaagcatccagttcaatcaacttggtctccgagataacgttgctcaaatatgtgtgcttgaggtaatatggataccttatgttgatagtgacttatatacatttgcctctttgccctaaattaaatttgctctgtgtagacattgttgacttcacatacaaaagaaaatgagacccctccacctgaaaggtaacttaaaagtatctgtaaatgttactatcatatcattttatgggtggataatttcactaggaagtggccgattttcttcagatttcagtggttttctgtatggactatactttgtgggtgggttgaagtgaattaccaatttcttttacagctctgctggttcccatcgagttgtcatttgtaacattcacgtgctttttaatcctaaaagaggagactttaaacttggtcaggtactttcctttaatgccatattctagtttgtagaaatcttttgccaaacgacagttttactctctggtttaactctgtctatacgctatgaacatgtataagtgttaggtgtttgagataaaacttttgaaaccaaacgcttcgccccttgcttaacttggtttctttaactgtttccatttatcatctatgtatttatctctgttacgtaggtcagaacactcttagataaagctcatgctgtttcaaaactctgggatgatgcgcctattgttctttgtggggatttcaattgtacaccaaaggtaggacaatcttaccttaaccagtttgtataccccaaaaaacttgttttgtgacatggtcataacattcttccacctggttgcagagtcctttgtacaactttatttcagaccggaaggtaaagcttcattgttaggaaagtccttcacctattcgcaacattatatatatggttcacattgtgtcttgtgctgctctctgcagttggatttgtctggtttggccagagacaaagtttcggggcaagtttctgctgagtttcgtccaccaaggccagaaaattatacaacgaggtagagcaaactcaccaagttcttcgacatcattaagtatatggttatgcaacttaacacctccatgtctaccctagaatatcgggttctactctgcttttgcaattgtcagcatggttgataggcctcctcaattttccaggtatcagtccgccaacaaatctccacaaggtcaagttcaaccaccaaatttgatcacaaatgctcatatggagaataactccaacatagatgttggaacggccccctccgagaagacatctgagcttccatgtggtgatacaattcttgctggtcacgaagccacctccagctctgaccaagtattaccatgcgagaatatggcctcagattgtcagtttggaatagaaaacagaaaacctgatgattccgggaatctctcgacagctgaagatctttcttcactaaccatatcagatacagaacctcaacatgcttccagtgctagagaagatttgaatacagatcgttctgtaagttccggtttatcagaaacagagcaaactcctgaggaaatatgttccagtgatcaagatatttcatctagtctctccaccaaggttgacacttttgtggctgaaatgaaactagatggcttaaaattggacgaaccagtagtattcgcgcaagatgaagaaagtttaggtgaagatggggaaacctttttggctaagctacacgataacaatgaaaacttgagtcaaaaaggggaacttgtgagtgaagttccacttaaatggagttctgaagctttaaatagtgacaaaatcacttatagtccatcctcttggactccaatggagatagcaactgcaactggtgacccagagagaactacggttgaacatgctctggagcttaaaagcacatactcagaagtggaggtattgtaatatatcctccctacagtttttcccttttatcttctgtttcttgagaaattatatccttaggaagctgttgaaatttgtggttagggtcaagcaaacacaagggatgaaaacggagaacctgtagtgaccagttatcacagatgtttcatggggacagttgactacatatggtattagcattagaagcaaaaccatttgtgacaaaccttaaaattagattacttcattattgtaaattatgcgcgttttgacatattctcatgtttgatttctggtttgggttaggcggtcggaaggtcttcaaacagtgcgtgtgcttgctccaataccaaagcaagcaatgcagtggactccaggcttcccgactcctgtaaaatcccatgatattcttatatagcctacctttttaactgaattgtttacaaaacttttttatgtttgtatttctggtttgttacagaaatggggaagcgatcacattgcactggtttcagagttggccttctgcagcagcaaaactctgcccaaaagctgatattaaactggtggtgagttcattagaaatctaagaaagtgtaaagagattagatggttgaggtcttgggttcaaagcacatccttgttgcaatgtttgtgctctgaaggtcgccaatagcttattttatatcccagcaaaacatctaagagtaaacttttacagaatctcataggctctagttttgtatttttctctatcatattttacagtgacaaattatatttgagtttttctttttgggcgacactcgatttcagaaaatctgctataaaagtttaaagcatgcttcttgattttaaatagcttcaattgttaacccctaactctttcagctttagtctagactgactctttcaattattacaaataaacacctagcatttatccatgtccctgtgtccaatataaggacatctcacattaggacctaatccctgcaatataattcagagcatccaaaacttcttgcatcaatggtcgtttcttcttgtcccgattggtgcatctttggatgagtgtgacaatctttgtggccgcatccacaggataatcgcttcctattcgggggtcgattatttccccaatcttataattatcgggcaagaaagacccagtccaatctgagctttgattcttcaaagctgttgatctatcttgtgaaccaactaaaagctcaagcaagatcacgccaaatatgtcctatcaatcaataagtacacaacacatatagagacaaaagaaaaatttaaatatgttgagtaaaaaaaaaaagacagactttacttaccacccactcttgtagagcctgtgaactgccatgaagatattcgacaacagaaacaggggtaccggttttagttcttgatggtgcaaatgtggtgttatcgatgtagcccttgtagaatgatcgaatatagtgatcatcgcgaattacgaccctgtcttgtctggatttcttcgttgctttcatccattccttgaaactgaagactctcagattctcgctttgtgcctccacttcttcatattacatatatagacttgagttacgtattttaaaaacattacatgtaaacaattgtaaagtgaatttataaaacagagatgtacctggaattagagggacggtgagaggctggtaagcaaaagaagaaggttgttgcttgaaaggcttgacaatgtttcccattgttgaagatacaagggttcaaggcttgtttctcaatctctttggctctcaaaatcggaatggaattcacaagatacttacttctggtttcaagacatcttgttggattttaaagaggtcaaaaaaattcaacgctttgaaaaagttatgttgagacagaaaaagaaacaaccactattgatgacagcagtactagttactaagctcggggaaaaattcttaaaatcaagtaaagaatctcagaaaagtggcaagactcagttttagtaagttattgacttatattgctttagttgattacaactttttctgtaagacacaagtaaacaatttcagaaaaagtgttgtcaatttcagtaagttattgacttattgcttagttgattataaatacagaggctctaaatggaactttgaaacgtatagggcacagaagaacagttgttatttttgagtaaaaatgtacaaaaagacaaaaccaaaaacgcgtttatttgctttccttctcttctagtaagctgaactgaaaagctatttgaatatatatttttactcttttttctctttgtaaattctaataatcgaacaaaatataacgaattttccatataaaaacaagtcattggtgatatattaatttgtctgtaaaacgtatttcattaagatttgtgttttttcaagttacaactgaaaaaataaaaatatagcatccatttgaatttattttataaaaataaataattctttattaaatagcaaataacttttctcatttttttttgtaaatattctcttttctatacactaaagtctttacaatatcacatatttcattgattttatttcattgactatgtaaagatattcatttatatatacaattagtattttttttaattgaaagttagtactagtatgtgactctgtgggtcgatccattggctggcccacgaggtccactacttaaccggtctgaaagttttatgtacataccgcataagagaccggtaaacagagcgctctgtttttgtttcgttcctagggttttaacaaattgaaggattttctagggtttggttccattggtctgtttcaattgtttgtgtacgtaagatatagacaagatcattgggtattctgatgatgaattgctcgtgaagatcttatcgtttcttccaacaaaagttgctgtaagcacgagtattttgccaaaacttgactacgataacaccgtcaattttgatatggagaaaagcaagaggatggagctttttattgacaggaatctgccagcttgtgtctcaagtctatctgttcatctaatcaacctaaatgtatcaaattttgggttgacattgcagtttcacggtgtttgcgtgagctaagtgttacttattataggagaacattgatcaggaactatgcattactgccgagtagtttgtatacttgcaaatctctagtgacatttttttttttttttttttgaataaaatgtaaaatttattcgaaaaaacttttttacatcaagtgcaacgtttgtttagaagatttttatacaggtcagaagataagaaaaaaaacctaagcttttgcaattatcttgaggcaaaccaagcttgcatacaacgatcatatcttcggtcaccttgttcacggatcgaggatatccggtttcggacttgtttgtcaagtagtctggtcattgaaactgaaagacgagattttcgtggacgttcctcgtatggtttgtctcccctccttgaaaactttgcaccttaaaggtgtgatgtatgtagatgaaggatctcttcaacggcttttatccaattgctctcttctcgaagaactggttgttgaacgatgtaatggtgccaatatgagaaagtttgccgttatcatcccgtcattgcttatatcaattgagatttatggttcgttatcatactgtatgtgatagacactccttctttgaagtatttcaaagctaagtttttagtcagagtagtctctcgtatttaattgtgaatatgcctaagttggaggaggccgatatcgctcgtggatctcatgatgtcaagaagcttctcaaatctatctcttctgtcaaacgtctttcgttatatttagaagtcaacaataatgaggtaatattacttgatgtctcttcagtctcactttatcatttagattactaaaccttgctttgtgcaggatctatatggtgatgatattgtctttaacgagcttgagcatctcaagtttcgcataagcagagccgtgccaaggtcaatggttgccggaggcggccaaatgaaatttgccccaattcacaaacaaagatgcttataataatagaaataaaagtgtttacaaaaataaattgtcatatgacgaaagattcaaagttaatttttttaaccaattctatatcgaatgctttaacctaaatttataatgctttgttctgttttgtttctttattctgtgaatatttttccatttttaattctatttttttattacttaggtaaatgtaagtgatttcgcaaaaaaaaaaaaaaaggtaaatgtaagtgatctgtcaatattaaacctataaaactaaagttatcttgtaaaaatatatgcttctaagtttttttcaaaaatttgaggacgtaggtgaatgtttctttcttttgtcttgaggcacggctctgcgcataagtaaaacatattggtccaagttactattctgtttactcaaaggttctcccaaactacgtgacttggagctcatagtaaatttcttcgatcgtcgtaaggcaaacgttgtaggagatagtatggatacattgttttgttggaagcaaatgattgatgtccctcaatgtttgttgtcgagtctccaaactttcaagtggagaacttattttccaacagaagaagagaaaggtctggcgacatatatcttggcaaaatcttgccgattaaagactgcgagaatcttgattgtttcaaagttggatccacaaaaggagcttgagatgaagaatgagttattgtcttcatgtggttcaaccacatgcaacctcgacctcgtattcaaacaattcaacgatcttctttgaatcattatattttatatatatataatactcgtctaacaatcttgcaataacatcattggattttgatctgtttaaagttgttgttttatatattgatgatttttaagttcaacgataaatttttaaatcgtaattataaacatgtcgatgtgaaacaacaaaaaaataataatcagaattatggattaggcccaactaaaatctaattgggttctttatgggctttaatttatatctgaatgaaaaatgttcttcctcttcttcttcttcttctctctttaccaattgctctggattctctctcgctaaagcttctccattctccacatgtcaacattttgggcgtttttcgcggcatttgtttcgaatttcttgtaattttttcatttcttcttcagaattatatcatcttcctcgtccgttgtaattgattttcgaggctttttttctcttaatgggttcggcttcgattggttaccaattcggaatatcagctcgattttacggcaattttaatctgagctcagatattactgtctcctcgcttccatgtaaacttgatgtttccataaaaagcctattctcagctccaagctccactcacaaggtaaaggacccgtctttgtttatctctcttaatctcgtttatgccaataacactaaagtgccaaactttcaatctgggtctcgtttatgaattgcggattttggattttttttgccatcgatggaatctcctaatgtatgcgtttgatatctaggaatattcaaatcgagctcgggtatgttctttgccaaacactgatggatactgcgatgagaaatttgagacgccaatactagacagcattgaaactccattgcagttgaagaatttgagtgttaaggtggatttcttcatgttcttaacccatatgtagttgaatgataacttgaagggcttgagtttaatggggatggtttttcttctcgtaggagttgaagttattagctgatgaaatccgtacggagcttcattctgtattatggaagaagacccaaaagtctatgaatcctagctttgctgcaatagagcttacccttgctctgcattatgtttttcgtgccccggttgacaatatattgtgggatgctgtggaacaagtaagcttatgttttcaaattcaggggattgatgattagattttcttatgttttggtacaagggtttgatgagtttcttgtggtgttaacagcattttttttgtcttttgtagacatatgcacataaggtcttgacacgacgttggtctgcaataccatcgagacaaaacagtggtatttctggggtcacttctcgtttggagagtgaatatgattcctttggaaccgggcatggctgcaacagtatttctgctgggctcggtaataatttcgtcaccctttttaaagagtccagttgcctatagttttagctttttactttttttgtaaaacaagaagtagacttagctaattaatgctattatcgatatggtatgctgaacgtttatttctgtttcttaggattagcggttgctcgagatatgaaaggaaagagggaccgggttgttgctgtgatcgacaatgtgacaataactgctggtcaagcatatgaggcaatgagcaatgctggttacttggattctaatatgattgttatactgaatgatagccgtcactctttacatccaaatatggaggagggatccaaggcatccatcagcgcactttctagcatcatgagcaaaatccaatctagcaaagttttccggaaatttagagaattagccaaagtatgcattttccatactctctttttgaaactttgtagttgcttacaattatgaggctggaaatttggtgtttaacaattaatgttgactaaatattttgaagctccaaatttggtgtttaacaatttggtgtggattttgacaggctatgacgaaaagaattggaaagggaatgtatgaatgggcagccaaagtcgatgagtatgctcgcggtatggttggaccaacaggatcaactctctttgaagaacttggtttgtactacattggtcctgttgatggacacaacattgaagatctagtttgtgttctccgagaagtatcttctctagattcaatgggtcctgtgttggtccacgtgatcacagagggaaaccgagatgcagaaaccgtaaagaacatcatggtcaaaggtatatctgtctggttatgttattttttctgagaatatatgcttatccaaaatcttgactttgtagtttttttttttgtctcagacagacgcacttacagtgattgctttgttgaggctttggtgatggaggcagaaaaggatagagatattgttgtagttcatgcaggaatggagatggatccgtcacttcttacatttcaggagagatttccagacagatttttcaatgtcggaatggctgaacagcatgctgtcacattctctgctggtctttcttctggaggtctcaagccattttgtattattccctctgcttttttacaaagagcttatgaccaggtttcactttcctctagcacaaaataaaattgttctaaaaggtttttattacaagcaaatggccttagtgtctttgatggtttctttaggtggtccatgatgtagatcggcagagaaaggcggtgcgatttgttattacaagcgcagggcttgttggatccgatggtccagtgcagtgtggagcttttgacatagctttcatgtcatccttaccaaacatgatagccatggctccagccgatgaggatgagcttgtaaatatggttgcaactgctgcttatgtcactgaccgcccagtatgtttccggttccctagaggctccatcgtcaacatgaattatcttgtccccactggattaccaattgaagtaagttccaatctaatcttcaaatcttttggttgcaaaaacagaccgtggtgacacaagaactgctttatcatattagagtagatcggaagaggaagagttctcgtagaaggtcaagatgtggctttacttggttatggagcgatggttcagaattgtcttcatgctcactcgcttctctcgaaactcggtttgaacgtgactgtagctgatgcaagattttgcaaacccctagacatcaagcttgtgcgtgatctttgtcagaaccacaaattccttatcactgtcgaagaaggctgtgttggagggtttggttctcatgtggcgcagttcatagccctcgatggccagctcgatgggaatatcaaggtagagagacaaatcaaaacctcatgttctcacctgtttttggttttaagttgtaattttgctcttaacattgtgtagtggagacccattgtgttaccggatggctacatagaagaagcatcgcctagggagcagcttgctcttgcagggctaactggacatcacatagcagcaaccgctttgagtcttttgggccgaactcgtgaagcattgcttctcatgagctagcttaaccttctcatatgggatttaccttcacaagagacttaaagaggagtttcttaaacagaatttgtagataatacattctgaattcaagagcccatttgatatcctgattttggaatagcaatctgctatgtattgtaaatgtagagttgagaattgactaaaataaattcaattactttttaggcggtatctcagttttcatattctcagttagttgttgttgttgttgttgttgttgttgttgttgttgttgttgttgtcaagtctatttggtgtaacagtcgcatgtcccaaatctggaaacaaacaaaatatagaacagagacgtgtattttcgatactcgagtttttttttaataaaagcatcttaaaaaattagtaaagagttactgtcaaacaatattcgtttaattacaaatccgagtccttcttcttcttcttcttctcgatctctgtatctctcgatcatttccttctaaaggaagcgtctttgatcttaatcgtcgtgtcgttcgtttctaactgtaagttttctccttttcattcattttgcttcaatctcgatcggaatcaagtaaaaaatcggaacttttacctagatttcctcaggaatcgaaaagttcttgtgatttagcagaacctctattgtttccgatctcttaattcaattacttgacaaaagtgattatactttctctgttgcagttatattgaaagatggaaacagaaacggaacatgatagaactgtctctgtcgatgacaacgacagccttgtacctgagccaagctcaacgaaagaaagcttttttgaagatctctcgcttactgggcaagttatgaatcctcaactttcaagtgcaggcgaagttttgacaaaagttgaattggattttgcttttgtctctgagaaattggtcaatcttagtcttcttactatgcaactcggcacgagggaaaatgattttgagtcttttgtttctaagaaagaagaagatgaagaagagccttcgagtaatgttgatgatgatgatgattctgctgagaaggcattggagtttgatctcttgtcttcaattctcaattcagaggtgaaagaacttgaatcgcttcttggttttctccagaacgagattcaaagcgcccgtgtcatgatatctccgtttcaacatgatggagaagctttcttggatttggaagggaagttgaatgatactgaacaatctttgggtcagttaatggaacaagtagtggaaatgaagaagcaatcttctaactttcagaggttatcttctggtttggatgaacaaggaagctgtaagtgaccaatctagctttctttttaaccttgttgtgatgatcacttggtgagaaaaatttcaggctttaatgaatactatataactttgtttttgcagggtctggagggcaaacttcagtgtctcaaaacgatggtgagtttggtgatctgagcgctaagatcaatatgcagactgctgatcagcaaaggaatgttttaaggatgcttgagaaatctttggctaaggagatggaacttgagaagaaactaagtgaatcaagaaatactgaacgagaactagagatgaaactgtattcttctgagcaggatgttgtctacatggaagaagtaaccgaagatgcgttctccaggtggcttgaggcagataatgctgctgaagtctttaagggaacgtcaaaggagatgtctggaaaactccagattcttcagttcaatctaagtggctcttttaagcgggaagacaacttgaagtctaagcttgttgattcaaaggaacgtttagaagctaaggaatgcgccttgcacaagcttgatagcagcaatgcaagacttgctgactttcttgtggcacaaacagaaggcttaaaagagagtttgcaagaggctgaagaaaaattgattttgttgaacactgagaattccacattaagtgagaaagttagctcccttgaagaacaactgaatgaatatgggattcaaacagaagatgcggatgctacttctggtgctctgataacagatcttgaacgtatcaacgaggaactgaaagataaattagccaaaactgaagcaagggctgaggaaacagaatccaagtgcaaaatcctagaagaaagcaaaaaggagcttcaagacgagttggggaatttcagagacaagggcttcactatacataagttagcatcgcttgagaaacacttgagggactcagatctacaactagaacatgcagttgcagctgttgaagcaagtaaagaaaagcagaacttgttatattctactgtttctgatatggaggatgtgatcgaggatctaaaatcaaaagttttgaaggctgaaaacagggccgacattaccgaagagaagttgatcatggtatctgagtctaacgcagaggtcaacgaagaactgaaattctttaagggtagattgaaagaaggggagaaatatttacagcaagcagaagaaagaaaattgcgaaccgccaaagatatcggggtacataacaagatcatgaaaaaactggtcatgcaactagctgctgaacgagaacgacttcataaacaggtattaccatattcgtaaaaccccagttcgctgttagttcatgtccttgtagcttcatcatcatcacagtggattcttagatatagtgacttatttgcagataactaacctgtcaagagagaattgtgtgttgatggtgaagttgaaaaaggttggaaaaactggttatatggaaagtggcaatggaagtgaagtttcaccaaagtcggaccagaatgcttcttcttgccatcaaggaagtagacttcaagccaccttcatttcattaactaatccagaggtaacataattctaccttacaaaaaatctgatcttttgctggcatctaagtgagttataccattaagctttagtccaacaatcgaatattatgaatctaagcttgacgttagtaaccgtggtcacctttttgtaggaggaagaaacaggttcaaaatcagatattggaagtgtaaggagattagatgttggagctcttaggttcaaacacattctcgttgcaatactcgtgatcttaatatcgtcgatagcttatgttatatcccagcaaaacatgtaagagtctttaactttttccaaaatctcagtctccagttttgtactctctttgtcatagtttacaatgacagattatattttagttctttttggctacccagttacagaaaatctgctatataattaaccccgacactggtattttgtgttattacaatatctttttcagtgtcaagtattagtacctctctacacattagtccttaatctctgcaatatgattaagaccatccaatacttgttgcatcaatggccgtttctttgtattatgcgctgtgcatcggttgatgagtgtgcccatctgtgtcgccgcattcgcagaataatcgctcccaagtcggggatcgattatttcctcaatcttataattatctggcaagaaagatgaggtccagtaatctactaagccttgctcttccttaatcttttttctatccttggaacccattaaaagttcaagcaagatcataccaaaaatgtaaacatcggtcgtcatatccaaaatacctaacacatacattacacaattgtcttaacgttgaacaacgaaagatttttcagaatttgtaaaacgaaagttaatgctttcgtgtacctaacgatccccattcaggagataggtatgtaaatcttcccctcttgagaccttcatctaccaagcttcgtttggttggttcgagatagaacagtttttgcattgtattgctgatgaaatccaaacttagatattaatttctaagatcataaacaaaaagagagaagaaggatggaaataaaacaattaccacctcgtcaagcataatgttatgcatcctgagttctcggtttagggggctgttcttgatcgagtgaagaaacgcgagaccttgagctgttccaatggctatcttaacccgtatttcccatggcaatgcctcttcttcttctgttgagggaaacgtaaaactataggtaatgcaatagttgtctatatcttagaatggacccattagctagaaaagatcttaacttccgaaaatgtgactgtccaaacttcctttgtgcgagtattcaaataccaagaagaatggtttgttgtcttcacaacagtaacccaagaaattgaccaaattctgatgagacaactgtccaagagacctcactactgcctgcaactcatagtttttgtacccatcagataagtacacaagactaacaaggaataagagataggtatcaatattgcgtaaaaatgaacagactttgcttaccatccagtcttgtaaagagcgtgaactatcacattccatgacagaaacagcgattccggttccagctcttgatggtgcaaatgtggtttcatctatgtagcccttgtagaattttcgaacagagtaatcctcgcattctacgaccctgtcttgtctgaatttctttgtcgctttcttcaatccgcgaatctgaagactctcagattctcgttttctggctccacttttcatatatacgtataaatcgaacaatgtatttagacattattcgtaaacaaaaagtatagtgctttcaaaaacagagatatacctgaaaatattggagggataatgagaggcttgggagcaattgaaggaagttgttgtttgaaatgctttagacagtttcccattgaaggaaagaagaagatgattagaaagatatgtagatttctggcttcaagattttaacaaatctttatagggttttaataagagtttgtaacttattaaagaagctactaaaaaataggtttagactggcctcagaattcaaccctttgaaattttcaatttctcattcaggcaaaacaaagcaaaagacatagaaggcaagtttgggtatgtctgtatccatataaggcaagtttgtggaaatttttctaggactcatttatagaatgaaagaaaagagttgatgcgacatagaaggagattttatcttctttgtttcaaacttttattccaaacttgttcagcttcaaatctcattaactcttacacattaatctttaatctctgcaatatcattcaaaccatcaaagacttgttgcatcgatggtcgtttccttgtgtccaacttgatgcatcttttgatgagttttcccatttgtgtcgctgcattcacaggataatcgttcccaagtcgaggatcgatgatttcccggattttagattgatcagacaagaaaggtttagtccatacatgtaagctttgcatgttctcattctttttaccatctgaagctttcaaaccagttaaaatctctaacaatatcacaccaaatgtatacacatcactcttcgttcccaaatgacctaagaacattacacaactgtcttaaacatcgaaccacgaaagattaattagagtgttcgttaacaaaacttaagattttggtgtacctgagattacatattcaggaggtatatatacagttcttcctatgaatgcagtcgtcacgctttcttctaacaaacatagtttctttgatccaagatagaacaattttgtgttgtagtgctgatgaaatttataagttcaggcattattgtaaggttataaacaataagaacagcaagaagagtgttctaaagtcatttacctcgtcaagcaaaatgttatacattctgagttctcgatatagcgcgctgttcttgacccaatgtagaaatgcaatactttgagctgctcctatggctatcttgacccgtgtttcccacggtaatgcttcttcttcttctgttgagaaaacatgaaactgtaaggcaatattgagtatactgattttataaatggacccattgattagaagagatcttaacttccgaaaatgtaacggttcaaacttcctttatgcaagtattcgaaaactaagaatgatttgttttcttcacaacaatagcctaaaagtttgactaaattgggatgagaaatacgtccaagagacttcacttcttcctgcaactcaatagtttttgtacccatcagatgcataagtaactaaacaaaacatacataaataagatcaaagagatagaaatagtagttgcgtaagattttggttaccttccagtcttgtagagtctgcgaattatcttgataacattccatgacagaaacagtgattccagttcttgatggagcaaaggttgtctcattgatgcagccttcgtagaatgttcgagtaaacccattatcattaccttttatgaccatgtattttctgaatctctttgttgccttgttcaattcggcaaatctaaactctttcaaattctcctttactggctccactttttacatttataagacgtattaagatattattatatatgtaaacaaaagtagaaagtgcatttgaaaacggagatgtacctgaacttgaagggatggtgagaggcttgggagaagctgaaggaggttgttctttgagaggctttagacagtttcccattgttgatcataaagatgataaatctgtagattttgatttttatattttaatagatcttgtaggtttttttatgaggttgaaaatgatttaagtgtgaaagaagcttcaaaaaaggttgggctgtctcagaattcaacactttaaaaagtcaagttcacattcaaaagccaaaagaatccacagtatttactatttactatgccaatgtctatataaatgcttataaggcaaaatttagaaacattctagaataaacagggcttgaaaaattagattcttgttctctgtttggaacagaagagatgcaatgtatataagaaagtaaacataattagattagaatcatgcagactaaacagcctgaaatcagaaaatagaacaacaagtagtgtctcagacaacagcgaaagagatggctcataagtcaaaagccaggttggttcaagtagtaaggaccaggttggttcacgtagtaagggccatggggtgtccaataaccataaggtgtgtaggtatgatattggggtggtggaaactggtcccagttgggtacataggtagtacttgttgttgttgggcgttttggttattgttaaccctaccaccaatataagcaagattgcacttggcctctcgtccgtctatgaccggttttggattctggcaagctctcgttgcagattcagcatctctaaacgtgacaaaaccataaccctctgatcgtcccgtttctctatcgcaaaccatattaacatgtataatatctccaaattgttcgaagtaacttctcaaaccttcgtttcttgtttcccaaggcagacctcccacgtatatcttagtgtatctagtgtcaacgttttcgttcgcgtaatgttgagccacgtctctgtcacaagtatcaaaaaaaattagtgacaagaaagttccaacaattagaaatacatttagaaaatccaacaatcggagaaaagtactagatatgaaaatcttcattatgcatacatactttgtccaataaaaaataggaattagatactagaaaattggaaattaaatagagaatttaggggatgtattgaaagtggaattttaagagatttgtgtagaatttataaatcctatattataatgattttaaaaagtttcatgaaattcagtgttattgaactaatgatttcaaaatccataatttgtggatttgaattttaatgattttggaagatttgagaggatttccttagttaaaaatacagaaatctaaatctcatagtttaaggtgaaatttgaatggattttacaaaaatatatgaacttctctaaaatcatcaaaatcattaaaaaaaactcaagaaaacacaaatcagagacataaagataataagtaagagaggattccacgtattagaaagagatgaagataataagtaagagagaatagatatgtttttaatgcacgagaaacaatttcattaccatatatctgcagagtgcgtatatgtgaagtgagaaacaaaatcacaataaatatatatgctcagtcgctcaggaacagagagacaaaaagaaacaaccgaagaacaaagaggaaaatttacccttatctctaatatatcatgtgtcagggtttagggaaattatagaaaagagttaagctcacttttccttttataggttagttgatgaaaaatttgatggacccaaaatgaaatccaagcccaagcccatacccaaagtctttttatttcactcaaactgctataaaacgagtctcttttgtatctatcaatttcaatttctccgcacacaatcaatttttcacattagctataaaaagcattaaatcagatgatttaagaagtcatctctaattactccttaagcttacatcatttaaacacaaacacgaaaattataatttacatattataatggcctattaattatagtaattttgaaatttatgagatcaaagtggagaagtgtatctagaaaaggataggcatggagggaaagagagtgaaggcattcccatgtgagtcacattcacacgagggtcctaaaaatattgatgagcttatcttccttgtcttctattaatgctttttaagttcccagctaatattgttagtagtttgatagtgatataccacatgtaaatatatatatttttttgaaatatatgagagattgagagttcttgaagatacttcatgagatgatgcaatggataattaatcaagatcctaatttattttcttaggtaacatgcttttgtagttaaattcttaacaacaatagcttaccatcacaattttaatcaatcaaccctttagtttttactttaagtgaaaattccaacccttttgactatatcaacttgtctatgagttaattcgtctatatatatgatgagaacttagccaatatgactgaataacctcattcttcttttctttttggtttcttggaaaactagtagctcattaataaaagagcaaccaaaaaaaatggaggatcattaatttgtcatatgattagttttctgaactttctttcagtcttggattttgttaagaagactgtatcggctccttgtgtgttggcacgtggttcaaaaaaattggacatgatgacgaacctgattttggatgttcatgggaaggccacatgacacgagagccgtttaagccgccgttaaatatggatggaagacaggttttcctccgtcagtgcctgagaagttgacgtcaattgacagagtcaagtgggacgttagccgcaaccggaaataagcagaagactctccacactcacatgcccacactcttaaccttcttaatggattaatgcacacttgcatcttcttatcatatagtatacgataaatgatatttatctataagaatttgtcattgaatgatataatatatgatccataaattgtgtctgctttgttataagtggtgtaagtcgggtcatgggcccgtgagatagtaaaagaagtgttgcatgtaagagaagggtgatgagagacagtggcacgacggtagcttaagcgctctgtttctctaatttctgccgtctccttttcaaaaagaccccacccacgttcctcttcttctctcatttacccttcttgtctctatactcactgctcatgagattattttatatgcattaagaaatattgggcaaatatagtttatattttttgtgtttttgaccaagagtaacagagtattatggtcacctgtaaagaataaactttttctaaagtagacgaaaatgtataatactattttggcgatcatagtaattgagtaggttttccaaaattttgtatgttctgtattaactcacaaaattacctaagttcggcttcgttgcgagaagccgtgaataatgaaaagaagtatatttgacttttgaaaaaaaaatagttaccacaattataatctaataaaattgaaagccctctaagattcaattattccacgattctaaatcaaaacaaggctaaatttttaaataacgatatacaggatctattttaagcatatattagggagatgccgacaaagaaaaaaaacatatagcggaactgtagagtatattatatcaagccgacaaagaaaaacatgtattattttagttatactgttttgagtttaactcaagctaaaagacgaaagagctaattggcaaagcctttcagaaaatataagaacaaaagcaatgctaaggccacgtccagattttagccgaacaatggtaaaaaaacacaaagcctgaacaaagacaataactatcaaatgttgtcaaataaaataaatcgaataaattacacgcaaatctaaaaaagtgagatccaacagcttcgtataactttagtgacaaagaaagctcacacgatcctccccgtagcaactccaccgcatacattatgtatctcgaccaaatgactaaatcaacaaactacccttttcactcattgcaattctactaagaaaatattctcaagactagttccaagtaatgatttacgattaatactagaataattagcagatcaaatagtattgtgtaggtataaagacagataatgagatatgagatcaaatgtctccatgagttggcatttgtgttgatacattgaccatgcatgtggatatatgatcaacacaaacttttgttaatgctcttttaattaacacatataacatgcaaaagttgtctaatgttttattttgtctacgatcatgcaaaagaaatactagcagtataagtttcaaaaataaaaggagattcggcgttaacattaacaagcactaaatgcaaatgtatgcatagtaacaactaacaacgtcgaaatttgtcattaatatatatgttaactattaaagccatatttataaacataatttggtatgtccaaaaggtgttttgtactactggccttataatttgtttttggtttaaggatgataataatcagacggcagacaaaatcattgagaaaagaaaggagtttccaggaataaccctctctgatcgatcttctgaaatcttagctaaaccccaaaagagtgagtcacggccccacgtggatacgtgaatcacatcagtggcataaatccgtaaattgtagtaaaatctagaggtattttccaagttagacttccatataagctattgctggctcctctcccaatttcccataatttactaaatatcactttctagtctcttctctttactttggtcgtccacaatgaaaggaggcagcctctcgtttctcttcgttctcctaatcgccaccatcacttccgtcatttgcttcagtgacggtaatcatcatcacatacatagacgtacttaatcatgtttaagcgtatatatatgattttgcattttcagtgacatttttctttaaaacctaaattctgttttagcgaatcgaagcttaattctgtcgagtttctatccaaagtccctgacgagacattttgacaaaaaagtttggttgtgacttgtaagtagtctagtggtcttagagtaatgttttgcaccctagtttgaaccttatttgtaaaagatgtacgaagcttttaatagaggatagtttacaagttgaccccgaactgaggaagaagattacgatttacgaacctagaacttcctcccgtgaaccctcgctcgatagccacaaaacaaattggtcgcctggtcgggaccattatgctctctattactgtttttttctttctttaataattattattgattgattttgtaagtcggtcaagagtctaatttacctttttgcccatttctgacacaaacactctggacatttcaatcaaatgtgacataaaaatggtccaatcacgaaattctcttttatttgccgatcccagtttatgtttcttttgggatataaaccattcctcatatttattcggatccatgttgttgtgtttttgttaaccctgcagaaaatactatatacacataatactataaatgaacatctataagtactagaccacttttttatatgagcgttgaatcaaaaaatttgggcaattttgtaatttcaacgcagggatgttaccaaacggcgactttgaactaggaccaaaaccatcggacatgaaaggaacgcaagtaataaacaagaaggcgattcctagctgggagctttcaggcttcgtcgaatacataaagtccggtcaaaaacaaggagacatgcttctcgtagtcccggccggaaagttcgcaatccggctaggcaacgaggcatcgatcaaacaaagacttaacgttacaaaaggaatgtattactcactgacgttcagtgccgcaaggacatgtgcccaagacgaacggctcaacatatcggtggcacctgactcaggcgttattcctatacagacggtgtacagtagcagtggatgggacctttacgcatgggcgttccaagccgagagtaacgtggcagagatcgtgattcataatcctggtgaggaggaagatcctgcttgtggaccactcattgatggtgtggcaatcaaagctctataccctcctcggcccaccaatagtaagtattcatttattatatgaattgagtttgtataatcaaatcttttttcagatatcacgcaatgtgatccatcatgttacaactatatgtagttatgtattaactcgttatcgttaggccttaggggttgacatttgacactccggtttggtttgtcaaaatttcagtttggtttagtccagttttgatattttcaaattaatcattataaatctatttttaatatatgtactagatacttgtaaataaactttttggtttgggttatttggtagacctgtaaagtatttctatttccattatggttttcaaaaaattggcctggttggatttgatttatgtggccacttataagtatagtcattttggtgttagaacatattttaatggatcggttacatgacgtgacatgtgttagccaagattcagaacaataaattaattgatatgattttgctattatataataaaacagagaatatattgaagaacggaggatttgaagaaggtccctacgtactcccaaacgcaacaaccggcgttctggttcctccctttatagaagatgaccactctcctttacccgcgtggatggtcgaatcactcaaagccatcaaatacgttgatgtcgagcatttctcggtcccacaaggccgtcgagccgtggagctagtggcaggcaaagaaagcgcaatcgctcaggtagctaggaccgttgtgggaaaaacttacgtgctttcgtttgcggttggagatgctaacaatgcttgccaaggatcgatggtggtcgaggcatttgcgggaaaagacactctaaaggtaccttatgagtctcgaggcaaaggagggttcaaacgcgcttctctacggtttgtggcggtttcgacccgcacaagagttatgttttacagcacattttactcgatgagaagcgatgatttctcatcactgtgtgggcccgtgatcgatgatgttaagctcctcagtgctcgtaagccgtaagatggccattgttttatttctaaggttcttcgtataagccagtgtggttttttatataaatatgattttcttaatctctaatgcttttgaaatgagatgagtaatactgaaagggtgtttgtggtgtagggttttatataaggcaaaaaggtcttgcttatatatattttcttgtatgagaaggctaaagaaatgttgtctgtttttactaaattgggttctttcaaggagatcgggtgattgtgagaataaaaatgtaatacagatatatatggtagagaggaatgaggataataatttaactttagcttcttgtgtactaccaatccgtgttaggatcaagcttttctaatcagtttcaaactgaactgccttgaaatccatgttagtagctgaagcaatggctcaaaattttaaaactatagtgaacagttaaaacgtagcaaaaaggaccaaagggtgtggaagcaaatggttacagttttgagcattattaaacggtttaaacgatttaaacgattggtatatcgattaacatgcgttttttaacatctggatttattatatattgcaaattatgagaagtatggctaagatgcttttatgagatgcttttgactgtttgatagcgcatatggtaattgttaaatttccggaaaaggatgtttatatgcaatttatcatattaaaaagaaaaaacccaaaacaaaactgtagtctcgttgtaacaccaaaacggtggcgcttgcgcacagttgtagtcttgtagatattaagctgagaagttattaaaaatgtaagtgggccttttcatcatgatccaatatatttttcgcataagcccaatagcccaatatgtgcgatccacgtcgagcacagagtttccttttatcacaaagcaaagagaagagagagcttcagaatcatcacaaacgctaatccgtctcatccggattggttcctctcgtcacctagacctagggtttcttccttttctcctgtcttcccctgaatctctgcatctgcaagctccggccgatacgagggagcttttttttttttgctcaaacttgtattcaggtatgtatctctgtccgcgattagccgcgagatgcgtcaatgtatctgttcttttagggttgaatctttgggtctctggtctttgtttttgatacatctagttgatattctcaatcgtgtgaattcaattatctgttaatttgaatctgtgtttgaattc

SEQ ID NO: 1422 - DNA, 101665 bp, Arabidopsis thaliana
gaattcaaccctttgaaattttcaatttctcattcaggcaaaacaaagcaaaagacatagaaggcaagtttgggtatgtctgtatccatataaggcaagtttgtggaaatttttctaggactcatttatagaatgaaagaaaagagttgatgcgacatagaaggagattttatcttctttgtttcaaacttttattccaaacttgttcagcttcaaatctcattaactcttacacattaatctttaatctctgcaatatcattcaaaccatcaaagacttgttgcatcgatggtcgtttccttgtgtccaacttgatgcatcttttgatgagttttcccatttgtgtcgctgcattcacaggataatcgttcccaagtcgaggatcgatgatttcccggattttagattgatcagacaagaaaggtttagtccatacatgtaagctttgcatgttctcattctttttaccatctgaagctttcaaaccagttaaaatctctaacaatatcacaccaaatgtatacacatcactcttcgttcccaaatgacctaagaacattacacaactgtcttaaacatcgaaccacgaaagattaattagagtgttcgttaacaaaacttaagattttggtgtacctgagattacatattcaggaggtatatatacagttcttcctatgaatgcagtcgtcacgctttcttctaacaaacatagtttctttgatccaagatagaacaattttgtgttgtagtgctgatgaaatttataagttcaggcattattgtaaggttataaacaataagaacagcaagaagagtgttctaaagtcatttacctcgtcaagcaaaatgttatacattctgagttctcgatatagcgcgctgttcttgacccaatgtagaaatgcaatactttgagctgctcctatggctatcttgacccgtgtttcccacggtaatgcttcttcttcttctgttgagaaaacatgaaactgtaaggcaatattgagtatactgattttataaatggacccattgattagaagagatcttaacttccgaaaatgtaacggttcaaacttcctttatgcaagtattcgaaaactaagaatgatttgttttcttcacaacaatagcctaaaagtttgactaaattgggatgagaaatacgtccaagagacttcacttcttcctgcaactcaatagtttttgtacccatcagatgcataagtaactaaacaaaacatacataaataagatcaaagagatagaaatagtagttgcgtaagattttggttaccttccagtcttgtagagtctgcgaattatcttgataacattccatgacagaaacagtgattccagttcttgatggagcaaaggttgtctcattgatgcagccttcgtagaatgttcgagtaaacccattatcattaccttttatgaccatgtattttctgaatctctttgttgccttgttcaattcggcaaatctaaactctttcaaattctcctttactggctccactttttacatttataagacgtattaagatattattatatatgtaaacaaaagtagaaagtgcatttgaaaacggagatgtacctgaacttgaagggatggtgagaggcttgggagaagctgaaggaggttgttctttgagaggctttagacagtttcccattgttgatcataaagatgataaatctgtagattttgatttttatattttaatagatcttgtaggtttttttatgaggttgaaaatgatttaagtgtgaaagaagcttcaaaaaaggttgggctgtctcagaattcaacactttaaaaagtcaagttcacattcaaaagccaaaagaatccacagtatttactatttactatgccaatgtctatataaatgcttataaggcaaaatttagaaacattctagaataaacagggcttgaaaaattagattcttgttctctgtttggaacagaagagatgcaatgtatataagaaagtaaacataattagattagaatcatgcagactaaacagcctgaaatcagaaaatagaacaacaagtagtgtctcagacaacagcgaaagagatggctcataagtcaaaagccaggttggttcaagtagtaaggaccaggttggttcacgtagtaagggccatggggtgtccaataaccataaggtgtgtaggtatgatattggggtggtggaaactggtcccagttgggtacataggtagtacttgttgttgttgggcgttttggttattgttaaccctaccaccaatataagcaagattgcacttggcctctcgtccgtctatgaccggttttggattctggcaagctctcgttgcagattcagcatctctaaacgtgacaaaaccataaccctctgatcgtcccgtttctctatcgcaaaccatattaacatgtataatatctccaaattgttcgaagtaacttctcaaaccttcgtttcttgtttcccaaggcagacctcccacgtatatcttagtgtatctagtgtcaacgttttcgttcgcgtaatgttgagccacgtctctgtcacaagtatcaaaaaaaattagtgacaagaaagttccaacaattagaaatacatttagaaaatccaacaatcggagaaaagtactagatatgaaaatcttcattatgcatacatactttgtccaataaaaaataggaattagatactagaaaattggaaattaaatagagaatttaggggatgtattgaaagtggaattttaagagatttgtgtagaatttataaatcctatattataatgattttaaaaagtttcatgaaattcagtgttattgaactaatgatttcaaaatccataatttgtggatttgaattttaatgattttggaagatttgagaggatttccttagttaaaaatacagaaatctaaatctcatagtttaaggtgaaatttgaatggattttacaaaaatatatgaacttctctaaaatcatcaaaatcattaaaaaaaactcaagaaaacacaaatcagagacataaagataataagtaagagaggattccacgtattagaaagagatgaagataataagtaagagagaatagatatgtttttaatgcacgagaaacaatttcattaccatatatctgcagagtgcgtatatgtgaagtgagaaacaaaatcacaataaatatatatgctcagtcgctcaggaacagagagacaaaaagaaacaaccgaagaacaaagaggaaaatttacccttatctctaatatatcatgtgtcagggtttagggaaattatagaaaagagttaagctcacttttccttttataggttagttgatgaaaaatttgatggacccaaaatgaaatccaagcccaagcccatacccaaagtctttttatttcactcaaactgctataaaacgagtctcttttgtatctatcaatttcaatttctccgcacacaatcaatttttcacattagctataaaaagcattaaatcagatgatttaagaagtcatctctaattactccttaagcttacatcatttaaacacaaacacgaaaattataatttacatattataatggcctattaattatagtaattttgaaatttatgagatcaaagtggagaagtgtatctagaaaaggataggcatggagggaaagagagtgaaggcattcccatgtgagtcacattcacacgagggtcctaaaaatattgatgagcttatcttccttgtcttctattaatgctttttaagttcccagctaatattgttagtagtttgatagtgatataccacatgtaaatatatatatttttttgaaatatatgagagattgagagttcttgaagatacttcatgagatgatgcaatggataattaatcaagatcctaatttattttcttaggtaacatgcttttgtagttaaattcttaacaacaatagcttaccatcacaattttaatcaatcaaccctttagtttttactttaagtgaaaattccaacccttttgactatatcaacttgtctatgagttaattcgtctatatatatgatgagaacttagccaatatgactgaataacctcattcttcttttctttttggtttcttggaaaactagtagctcattaataaaagagcaaccaaaaaaaatggaggatcattaatttgtcatatgattagttttctgaactttctttcagtcttggattttgttaagaagactgtatcggctccttgtgtgttggcacgtggttcaaaaaaattggacatgatgacgaacctgattttggatgttcatgggaaggccacatgacacgagagccgtttaagccgccgttaaatatggatggaagacaggttttcctccgtcagtgcctgagaagttgacgtcaattgacagagtcaagtgggacgttagccgcaaccggaaataagcagaagactctccacactcacatgcccacactcttaaccttcttaatggattaatgcacacttgcatcttcttatcatatagtatacgataaatgatatttatctataagaatttgtcattgaatgatataatatatgatccataaattgtgtctgctttgttataagtggtgtaagtcgggtcatgggcccgtgagatagtaaaagaagtgttgcatgtaagagaagggtgatgagagacagtggcacgacggtagcttaagcgctctgtttctctaatttctgccgtctccttttcaaaaagaccccacccacgttcctcttcttctctcatttacccttcttgtctctatactcactgctcatgagattattttatatgcattaagaaatattgggcaaatatagtttatattttttgtgtttttgaccaagagtaacagagtattatggtcacctgtaaagaataaactttttctaaagtagacgaaaatgtataatactattttggcgatcatagtaattgagtaggttttccaaaattttgtatgttctgtattaactcacaaaattacctaagttcggcttcgttgcgagaagccgtgaataatgaaaagaagtatatttgacttttgaaaaaaaaatagttaccacaattataatctaataaaattgaaagccctctaagattcaattattccacgattctaaatcaaaacaaggctaaatttttaaataacgatatacaggatctattttaagcatatattagggagatgccgacaaagaaaaaaaacatatagcggaactgtagagtatattatatcaagccgacaaagaaaaacatgtattattttagttatactgttttgagtttaactcaagctaaaagacgaaagagctaattggcaaagcctttcagaaaatataagaacaaaagcaatgctaaggccacgtccagattttagccgaacaatggtaaaaaaacacaaagcctgaacaaagacaataactatcaaatgttgtcaaataaaataaatcgaataaattacacgcaaatctaaaaaagtgagatccaacagcttcgtataactttagtgacaaagaaagctcacacgatcctccccgtagcaactccaccgcatacattatgtatctcgaccaaatgactaaatcaacaaactacccttttcactcattgcaattctactaagaaaatattctcaagactagttccaagtaatgatttacgattaatactagaataattagcagatcaaatagtattgtgtaggtataaagacagataatgagatatgagatcaaatgtctccatgagttggcatttgtgttgatacattgaccatgcatgtggatatatgatcaacacaaacttttgttaatgctcttttaattaacacatataacatgcaaaagttgtctaatgttttattttgtctacgatcatgcaaaagaaatactagcagtataagtttcaaaaataaaaggagattcggcgttaacattaacaagcactaaatgcaaatgtatgcatagtaacaactaacaacgtcgaaatttgtcattaatatatatgttaactattaaagccatatttataaacataatttggtatgtccaaaaggtgttttgtactactggccttataatttgtttttggtttaaggatgataataatcagacggcagacaaaatcattgagaaaagaaaggagtttccaggaataaccctctctgatcgatcttctgaaatcttagctaaaccccaaaagagtgagtcacggccccacgtggatacgtgaatcacatcagtggcataaatccgtaaattgtagtaaaatctagaggtattttccaagttagacttccatataagctattgctggctcctctcccaatttcccataatttactaaatatcactttctagtctcttctctttactttggtcgtccacaatgaaaggaggcagcctctcgtttctcttcgttctcctaatcgccaccatcacttccgtcatttgcttcagtgacggtaatcatcatcacatacatagacgtacttaatcatgtttaagcgtatatatatgattttgcattttcagtgacatttttctttaaaacctaaattctgttttagcgaatcgaagcttaattctgtcgagtttctatccaaagtccctgacgagacattttgacaaaaaagtttggttgtgacttgtaagtagtctagtggtcttagagtaatgttttgcaccctagtttgaaccttatttgtaaaagatgtacgaagcttttaatagaggatagtttacaagttgaccccgaactgaggaagaagattacgatttacgaacctagaacttcctcccgtgaaccctcgctcgatagccacaaaacaaattggtcgcctggtcgggaccattatgctctctattactgtttttttctttctttaataattattattgattgattttgtaagtcggtcaagagtctaatttacctttttgcccatttctgacacaaacactctggacatttcaatcaaatgtgacataaaaatggtccaatcacgaaattctcttttatttgccgatcccagtttatgtttcttttgggatataaaccattcctcatatttattcggatccatgttgttgtgtttttgttaaccctgcagaaaatactatatacacataatactataaatgaacatctataagtactagaccacttttttatatgagcgttgaatcaaaaaatttgggcaattttgtaatttcaacgcagggatgttaccaaacggcgactttgaactaggaccaaaaccatcggacatgaaaggaacgcaagtaataaacaagaaggcgattcctagctgggagctttcaggcttcgtcgaatacataaagtccggtcaaaaacaaggagacatgcttctcgtagtcccggccggaaagttcgcaatccggctaggcaacgaggcatcgatcaaacaaagacttaacgttacaaaaggaatgtattactcactgacgttcagtgccgcaaggacatgtgcccaagacgaacggctcaacatatcggtggcacctgactcaggcgttattcctatacagacggtgtacagtagcagtggatgggacctttacgcatgggcgttccaagccgagagtaacgtggcagagatcgtgattcataatcctggtgaggaggaagatcctgcttgtggaccactcattgatggtgtggcaatcaaagctctataccctcctcggcccaccaatagtaagtattcatttattatatgaattgagtttgtataatcaaatcttttttcagatatcacgcaatgtgatccatcatgttacaactatatgtagttatgtattaactcgttatcgttaggccttaggggttgacatttgacactccggtttggtttgtcaaaatttcagtttggtttagtccagttttgatattttcaaattaatcattataaatctatttttaatatatgtactagatacttgtaaataaactttttggtttgggttatttggtagacctgtaaagtatttctatttccattatggttttcaaaaaattggcctggttggatttgatttatgtggccacttataagtatagtcattttggtgttagaacatattttaatggatcggttacatgacgtgacatgtgttagccaagattcagaacaataaattaattgatatgattttgctattatataataaaacagagaatatattgaagaacggaggatttgaagaaggtccctacgtactcccaaacgcaacaaccggcgttctggttcctccctttatagaagatgaccactctcctttacccgcgtggatggtcgaatcactcaaagccatcaaatacgttgatgtcgagcatttctcggtcccacaaggccgtcgagccgtggagctagtggcaggcaaagaaagcgcaatcgctcaggtagctaggaccgttgtgggaaaaacttacgtgctttcgtttgcggttggagatgctaacaatgcttgccaaggatcgatggtggtcgaggcatttgcgggaaaagacactctaaaggtaccttatgagtctcgaggcaaaggagggttcaaacgcgcttctctacggtttgtggcggtttcgacccgcacaagagttatgttttacagcacattttactcgatgagaagcgatgatttctcatcactgtgtgggcccgtgatcgatgatgttaagctcctcagtgctcgtaagccgtaagatggccattgttttatttctaaggttcttcgtataagccagtgtggttttttatataaatatgattttcttaatctctaatgcttttgaaatgagatgagtaatactgaaagggtgtttgtggtgtagggttttatataaggcaaaaaggtcttgcttatatatattttcttgtatgagaaggctaaagaaatgttgtctgtttttactaaattgggttctttcaaggagatcgggtgattgtgagaataaaaatgtaatacagatatatatggtagagaggaatgaggataataatttaactttagcttcttgtgtactaccaatccgtgttaggatcaagcttttctaatcagtttcaaactgaactgccttgaaatccatgttagtagctgaagcaatggctcaaaattttaaaactatagtgaacagttaaaacgtagcaaaaaggaccaaagggtgtggaagcaaatggttacagttttgagcattattaaacggtttaaacgatttaaacgattggtatatcgattaacatgcgttttttaacatctggatttattatatattgcaaattatgagaagtatggctaagatgcttttatgagatgcttttgactgtttgatagcgcatatggtaattgttaaatttccggaaaaggatgtttatatgcaatttatcatattaaaaagaaaaaacccaaaacaaaactgtagtctcgttgtaacaccaaaacggtggcgcttgcgcacagttgtagtcttgtagatattaagctgagaagttattaaaaatgtaagtgggccttttcatcatgatccaatatatttttcgcataagcccaatagcccaatatgtgcgatccacgtcgagcacagagtttccttttatcacaaagcaaagagaagagagagcttcagaatcatcacaaacgctaatccgtctcatccggattggttcctctcgtcacctagacctagggtttcttccttttctcctgtcttcccctgaatctctgcatctgcaagctccggccgatacgagggagcttttttttttttgctcaaacttgtattcaggtatgtatctctgtccgcgattagccgcgagatgcgtcaatgtatctgttcttttagggttgaatctttgggtctctggtctttgtttttgatacatctagttgatattctcaatcgtgtgaattcaattatctgttaatttgaatctgtgtttgaattcattgccctttcgattttggtgaattttcatgggatttagctgattcggttgtctaattgagatctcgaaattagtttttggtgatacgagcagagaaattgattctgtaattttgactctttttctgtttgtttacctcgcagctgttaaggtgtatgttcaagtcatcttgagcctttctctctctctctctctctctctctgcggaatccgaattttgtaaagaaacaaactttgatggagatggccgagataaatgggtccatgcagctagtaggaaagcacaagtcactacctcagaccactctcggtggtggttctgcatccgaggcaccaaacaagcaggttagaccatggttacagcagttgtctccagcaagcaatgggattctgcatattcctactaaaatactttctcaagagacactacattctctgatgcatggcaagaaagcgacgcaaacagaatccgctccccagaaaccggcaaagccggttgtaaacaagaagcagcatgtccctcctccacaaaggtcagtgaaagcgatggaggaagtaaatgagtcggtgaggtctaaaatgagggagtcattagcatccgcgttggccttggttaagaaagatgacgattctcccaaagggaaagagaatatagggactgtagaaactcctgtgattactcaggagaatactcaaagttttcagcctgcctcacctgctagcatcagtgtccctgtaggcgaagggaccatgtcagaaatgcccaccagtgttgaaagttctgtgcagaaggacagtgagattcctgtcgacatcatgatggaagatgttatcaaatttaatgtacttaagtcccaatatgacgaggttttccctcgggataatgttccttttactgatattatttttccaaacgatgatcttttacatggtaatgaactctcatgggatctggaagtttcagatcttggcgaaacgaaggattatggaaccggtggtgaaaagtcatttcaggatccaaaacttttggcatctaaaattgaaatggaactgtataagctatttggtggtgtgaacaaaaagtacagagagaggggaaggtccctcttattcaacttgaaggataagaacaatcctgagctaagagaaagagttatgtcggaagaaatttctgctgagaggttgtgttctatgacagccgaagaattggcttctaaggagctttctcagtggcgtcaagccaaagctgaagagatggcaaagatggttgtcctgcaggatacagatattgatgtcagaagtctggtgaggaaaacacacaagggtgaattccaggttgaaattgaaccagttgacaggggcacagtagatgtctctggtggcatcatgtcacgtagcaaacgtcgacccagagccaaatctcattctgtcaaaaccgctctcaaagatgaggcagcaaaagctgacaatgagaaatcacgctcaactcctccctcaactgaagagatagatcccatgcaaggtttggggatcgatgatgaattgaaggacgtggagtttcttcctccaattgtatcacttgatgaattcatggaatccctagactctgagcctccatttgaaagtccgcatggtaattctgaaatgcaggtgtctccgtctgagaaaagtgattccgaagctgggtcagactcaaaatctcctaaaggatctcctaaggaactaagtgataaaagtttgcctgaagcaaaaccagaaaagattgatgaagtaacccctgagtttgatgccaatgtcaaagttgatgacgatatctctagagttgagaaagcagctgcacttagtgatgataagggagaaagagcatgggatggaatactgcaactgagtatgtcttccgtagtccctgtcgctggcattttcaaaaggtaagttcttatcaccttaactaatatcccactattattcaatatttttgatactgttttctttgggcacagacaatttctgctctatgctaatattagatatttctttgaagattgtaaattgtacttgaactggaattgtgttagcaatcaatcacttctctgattcaattagaatggcatttgaataagcttaagaatagatctatgctagatcaattgaaacatcagcaagctagatagtgtctgtgaaaagtataaaaagaagatgcatcaggtgtttaagggggtcaagtattctgagtagagtaggggatgctataaagtccatccgtatgtttaatgtttccttctatcagaaattcagaatatcatggtacttgtgcaaaatcaccatgaatcttgagtacagatgacatttgaatatatgctttcattctctgactgagtttttctatggcagtggtgagaaagcagaaactagcgagtggccggcgatggtggaagttaagggtagagttaggctgagtgggtttgggaaatttattcaagagcttcccaagtctcgaacccgtgccctaatggtatacaaagctttcttttgttatcattgtactagcattacattgagtaatctattgcttcatacaacagtagaaataacccttttacttctcttatatataatctttaatcgtctcactttgtctcatctcaaaactcttctgtcttctcttcatggaaaccagaaagcaaagagattacaattaaacacttcacatgtatgcgtcacaagaatggggatacgttttatgcagagcatcaactatatagatttgggtcaaattttgtattaaatccaaccaaagaaaagggatgtcaattcagttttattatgtctctgtatatgagtttatgtgtctgtgggggacatatagaataatcaggaaattttacaaagaattgatctactccacaggcaaaaatagtcaattaaattttcataaaagggttttttttgggaaattattgggtaaatttaaagagaatctttcgacaacacatacatggaacaagaaagaaacctatagttatatttttttttttgtgtaaattattattattgtaaagtatttgttttcaaatttggtttacttatctttttctttcgcattgcaggtaatgtacttggcttataaagacggcatttctgagagccagcgtggaagccttattgaggtaaagaaatcaattcaatttttaatgatctattacttgttctcttgtacaacacatttgagaacagaaccgtgaaggctcatcttttttcttcttcttttggttaaggttattgattcctacgttgctgatcagagagttggctacgcagagccagcttcaggagtggagctttacctttgcccaacacgtggggagactctagatttgctaaacaaagtcatctctcaagaacagctcgatgaggtcaagtctttggatattggattggttggagttgttgtgtggagacgagccgtcgttcccaagcccggttccggttcaaaacgtcagcattctttttcttcttctattggttctaaaacctctgttttgcctgtaaacaagaagcagagagtgcatgttacagagaaacctcttgttgttgcatcaatgagaaatcaccatcatggttatgtgaaacatgatactgctgctgatgatgatgtgccgcctggatttggtcctgtggcttcaagagacgaagatgatttaccggaatttaactttaattcctcggttgtgccagtttcttctcctcagccattaccagctcaatctaagtctttggatcaagtaagaaagctcatacacaagtatggaaaatctgcaagcacttatgatgatgatgacgatgaggacgacatacctgaatggcagccacacgtccctagccaccagcttccaccaccgccgcctccacctctcggcttcagacccgaggtatttagaccgcctcaagatggttggtatgataatcaaaacggaggatcagggcaacactatgagcggaaccagtcaagaaacagaggattttaatatctctgttgagtgttctctgtaattgtagttttttggtttcctagtctctctttagtttttcgttttcaaaaaatttgtagccatcgtagaatgcaaatgttcgaagagtcccaacttttcaaataaaacatttcagagtttcctcaagaaaacgaaaatcagtattgctctgcttttaaagacaagtttgattgtggaatcttgctaaaatgtcaaaatcttgtttgaacatcaaatttaatccggaaatcagcaagtaatttcttctatctaggtttcaccatgaatctaaaaggattattgaaaatgaggctaacgagagtaagattttttgatgggccgctcggctcagagttcaagcctgcaggaaaatttgctctaaacggatgaagatttcagtttatttcggtttacaagttaataataaggttataacttataaagattctcctttgtcaaagttactggtactagttttaaaaggatgattacatatacaccataataaacatatcaatatcatattattcataggaaaatccaatccacagatggagctgcaaaataaaaaaaggggtcaaaaaagaccagactaatctaatctgcccaaacaacacaccactcagatttgaacttccaaaactatacattttccaactactcacatatcatcatttctcttagataccatcaacttcattgatacaatacccccattactgtacttattatgggtatgcaaaccaaaacaaaagaaaaagaagaagaagcaaaacttcacaactaaaggattcatgagatcaggccgatacaggtgcattagggataaccgatgatgtggatgcagcgacttcagtagattttgatgttgaaggccctgactcagagatatccccaatatcaagtgtctctggcaggttttcttcagattcagtgctgtatatctatatagaaaaagagtgatcaaaatcatcacttaagatcattacatcaaacaaaaaataaacgtgagtaatgaatatacctcaagctgattcagcatctcaatggttgcttcaagatcaccgccattagcgaggtaaacatcagtgatagactcttgtgagagaccagagaaagtgacaagaaggtattcaatatccatgtctatatccatctccaaatccaaatcatcatccctgatctgcttataagccatttcagaggatttcttcggcattgacacttcaaccgtgggggactttgctgcaaacaccaaaccatcatcaccgccaccataatccactcttttggagattggtacatacgatgctgcatgtggattcaatgcaaatgctcctggcttcattgctttgtcttgctgataaagttactgctaaatttagaagttaattaagagtcagagacagaaaagaaatacaaaacaatgatatattgattagaaccaaacatgtcgtatgcagcaaaatctaacaatctcaaatttggtctaacgaggtatgatgaaacaacctttaatgatttcaacaaaaaaaaataaaaaggatatgaagagacctaactcctaagccaacgtttcgatggcgtaacacagagtatataaggaatctaaaggaaataaattgaagatattaaaataaagaaatgtggttacattagaatctggctcgcgttgttactgcatggaaaaatcgatgtcggaaaatacagaaaacagggcaaaagtaaaagattcttgacaaagaagaaatgatgcgaagaagagtggattatatgcaaaacaaaatgaaaagaaggaataatgtttgttgaccttgtcaacgatcgacgtaaaaggagaagaagaaacgaaacattaggagagaagaaaatgagcttaccaaacaaaaactagcgttgaagatcgctcgaataaattgtagagacagagacctaaatgatgcgattaatgtggcaaacccatgtatttatggaattattatcgtataggttagtgtccgtttacatgaaggacaccaaacatcacgatggggttcgtttggatacccggttatatttatctttaaccgggatactaatatacgtgattgaaattaattcggtttaataaaccgattgataaccaccggtttaaaaagtatcaaaacgaaggagtgaatggatgagagctaaagggaagaagcaaagtgaagaagctccagaacacgccatagctatggctcttctctgtccttctcttccctctccgaattctcgtcttttcaggttaattatcttttgtgatgtttcttgtgtgctcgagccagtggctttttctgtaagatgtttttgtgatttcggatgagattgtgttcaggtgcaggagcagcaatatttcgagcaagtatcatggagcctcaaaggagctgatgattgctcgttctggtgtgtctacgagatcaatttcttcggaaaaggggctttctcgtagggatttagtgctcattggtctctcttctccgttgtctatgttcttgccattgtcttctccaggtaatgctttgcttctattgttcgtcttttaatatcttgtagattcaattagatagtttcacttctacttaaaaatcttgcctttcattggttagtagagagaaaggaagaaaattgagaatctcttacagtgtttagtccattaataatcatctactttttttggttatgtaacgtttacagttttgttattgcagtcactcatgcagaagaagacgtgaaaatgagtggagaagaattgaaaatgggtacaatggtggatgatattaatgcttattcttatgcttacccattggattatccatctgagaagcttgtcttcaaatggtattgactgaatccttttgatgtaatgcttccttttagttcaagctgtatctcactcttttacattttggttatgcagggttgaatcaagaaagcctgaaagatactcttcagctgcaccactctctcgtaagttctatgcttccttttgattttcatgaattctggatgcattaacttgttactgaatctgtttcaactggtccagctgatgcacgtttacggattgtttctgaacgagttgacctaactgacaacctcgtcatttctatttcggtaagtttctggtgttgcccatttagcataagactgctttgcttctctttgctatctttctcgtgatatgtcttttacggtttttgattcagataggtcccccaaactcaagattaacatcaaaagaaaagaaaacatggtccgctaaagaagttgctgattctgttttgtctgataaatcagcattggtaacccttctaacatgaaacacatcacagttaccaattctccttttcttaaacattaaacagattgtttaaatgagcagcgtgtcacctcaagtcagcgtcttgaagagagttcggttcttgatgctcatgctagtgatgtgagtatgatcttccacaacaaatcatataacaacgtaaaaaaaattgaatctacaaagctcacaagtctcatatgcttactatatgtagattgatggggagccttactggtactacgagtaccttgtccgcaaatcaccaaccaaaattgtaatgctctctaactctgagcagattcttcttgtttaaagacataaggagattgattttgataggacttactggctttgctatatgtgggcaggctgaagcatcaaagctttacagacactatatttcttcaacagctgaacgtgatggtaaagaacttttcacaagggaattgattgagatgcaaagtttagagtttgtttagcctgatgtagagtaacaacatttacctgaatctcactcattgcaggatacttatacaccataaatgcttcaacccttggcaagcagtgggacaaggtacaaaacctgtaacctctactttctgtacatctattgtatcagtgtgaggatgtctgattttgagggtctgtataaaatgcagatgggaccggtgttagaaagagcagtaggatcctttaggcttcttcctcctactgatagttatgttcctccatacaaggatccatggaggttttggtgatgcttccatctgcctcatgaaatttcttttttcgaaattgtcgttaattttgataggagaggaggttatgaaagttgtagtgtgagaaatgagccaagcgaagtgatttttccaaatccgaatatcttgttcactatcagatgtattgagattgagatataactagcattttcttttaaactcatctcaactggtatccacagagtttttggctcagaatcagatttactatcatatgaatatgatatacacagggaaagaacaaaaaagatggagtaactttcttcttcatagtacctcctttactatcataatacattgaccactgcctccttaagattttcaaggtagcataaaaatttaacaaatgaaaaagaggtagccagaggggagccacataaaccggcttctacccttatataaattaagataataatatctgaatagatgaaccataattataaatatccataacaatagccataggaccaatcacccaccaaaaccatgagagatgagaccaaaagtattttttttttgttaggtaagcagaagcacaagcaatatacaaaaatgatcatccatggccgcctcagtttaaagaaaccaacagctcttttttcttgaacagatgatcagctcaagcttctacttttcctcttttcatggactcaaatcgatcatggaaatggtgggagtattggaattagcccacggtgaagaacacaccgttactcttcttcttagactccttgtctgaagacgagacagacttgattgcttcttcttcatctccatcctccatttcctcatccagatctatctcctttgaacggcactcactactgcagaacgctttgtatccactgaaaaccaaaaccatgacattgatatttcacaacatattcacttgcgtgtgatctcattacatttggaacgaagctatgcagtttagtaacgaagtactgcaaagaacctaagtttccatatctatgattaggccttttatgttttggagattagattcatgtaagggagtttctattgtaggctcaaaactatcgaaagttggagactttatcttaaacacacaaatgcaaagagaatagaggaacaattctaagtgcactagtaatgaaggggaagaagagagtacctgtacatgtatatatcttctcccatacccaacttcttgctacagccgtagcagaagctcaagaagtctttgggaggtaacacatcaacaggtgttgtcaagtcgagaggagcaacagcaaaaatgctctctttctcgttcttgcaacaacggttcttcaactcctcgcgctctacggactccataacctgatccccgtaaaaatgggtggttttggggttaggaccatgtgaaataacacaagtgtagtcctctgagatctccatgtcactttcagtacccccattaagtgatcctgggtcttgcttggtcacctgacaagcattgttgttcacactgaagttctcagcaccggaacagtaagcagcatcgacggagccagattttcgaagctcaagcacatcaatcacatcatgtccaatctcaaaaacagcatttggtataacatccttgggcatcaaagctttggtaaagggttgagagagtagatgaggtttctggccacttctcatcaaagatccaaagattatgtttttactatccggtgatggtaaaacaatcgttgctgatgaatcagtgtgatgatcatcaacaagagaatgcacaatgctcaagcctactttaccagaatcccagctcctttgtttccctctccagattgacctcgaagaagaagcagcaaaagggttccctaaagtggagaacaatctgaaatccaaaggagaagttgggctccaagctgattcatagtcagatggacactttccttcaaacacactagagatgagtttgtggcttctaatcgctgacaagaccggttttgtcgaatagtaatcagaagcagtggtcatttgatagttggaatgctgagacatgattgatgatctgtgccctcaaaaaacaaaaagcaaaatgttagcttaagcaatgatccaaggtccatagcataaaacaagagtatagtaattcacaatgtgagaatataaaaaaacaaagctttgattttttaataaggaaagcaacaatctttggaacctagataaggaaaatccgaaagggaaagatcaaagaaatcgtcaatacaaaggaaaggatcatcggaagatcatcagaccagaccagagcagaccagtccagacagattacttaacaacgaaaaaaacaacaagagctgaaaaattatataaatcgattggaagctgaaatctgggaaatttctcaggctattacaaagaagattcaaagtagaagaaattcagagggaaaaaaagagagacctgggttcttcaggacttgttcttgcttctgaggtaaaagttgaagaagaaggaaggagaaggagaaggagaagaaagcagacaatgagaagtcttacgtatatatctgtgcaagtcttgtgaggtactcttctctctctctctcctcaaaatcagcgaagcagtgagcttctcagtctctctctatctatcggattcacgttttaagttctctctgaaatgtgtaagtgtagtagaaaaaaacaatttacctttcttcgaaatatttaatttgcattaaagttataagaaaatatattttataaaggattttaaaatggtaggagatttttatttgtataaatggcggaggaagtgtggcagaataaaaatgatagcacttctctgacgaaattctttactcttttgtttggcagatttggctgttttagttaatttattcggtacactttttttttctttacttaagaatatattattaggtatgttgtttatatgaatgaattgtgaagagtaataatttagaaattttctatatttttttacatgtatttgattaattttgattattatttttttagaaagcttcgttgtttcgttatatttacgaccgatttgacaaagttttttttacgatcgtttcattaattaaacatttaaaaagtcgatcattataattaattattataatttaatttgtaatcttctaataaacgacacgacaaaaaacttatatagattaagagtacacgtcaaattttagtagatcaataaaataaaataaaattattattttagtgatttacgatcgttctgacaaaaaaaagattcgcgatcgtttcattaatctcacagttttaaaatcgattcgccgcaaatagttattgtaatttagaaagtaaagtttttcgttatataaacttcacgacaaaagcgattaatatcgatcgacaaaaaagattaatataaaaagtacacattatttttgttttgtaaaccgtcaaaatatattttaataatttagatcgatcggagaacaccaatatattaattaaacccattttctggcttttctaatttgaatgtatgaaaacatttagtgaaaactataatcgactattggaaaaatatatatatatatatattcatcatttgaatccgaatgtttacaattttttatcaatgctttcaaatgtttttttttatttttaaagtgtgttgtttacaagattatggtgctcgataaaattatgaaaatagtgttaaatgtttttgtatttttgctctaaatatgttgattaatcagttaattcatttaccactaacatgtacttgttttttcagctaatctacactaagttcattaattaaaatgattttaaaaaatatgcgactgatccgctattatattttagaatgtaaatttccaactacaaaattttcacaagatttacatttatttaaatgtacatcgaatttttgtaaaatatagagtaccttcttagttttgtgtaaagttacaataaagtatttcagatgaaatactattacctatcaaaacttaaaaaatttcttcttgtgaaaatatcattctcctttaatccttttgtactcaccctatacgtcacagtgattttttttggtcgaaggatccttagtgtcactttcatctgtgtattatgtatatattttataaatatatatgatagaattataatattaatcagtcaaattccatagatgtttgaagattaacttaggtaaattccgtggactgtttgtaagaacatgtcaaagattttagagttatctgtggaatgtgaagtgtgaattcattatcatatgctcagttcttgttttttttttctcgagagtaaattatttatgttgttgatgttgctagataaatgtttttagctaacgttgaataagggggttatatatgttttatacgtataatggtttttctctatctcaaagtcccagttatgtcgacattatatacttattatggtgtcagaatctacaagaaaaaaaatgaaaattacagttggtttaaataccaaatataaataatccctacagagcaataataatttttgtcctttttcttcctgtggtctacttttgctttttacattatgtcatactaccatataattattttgctttctttctttaatttgctgtcatcataaaaataaccatgtattagtaaattacatactatattatttctaattgacaaataaagaaagacatttcttagtaactcaaaatctttctcatatcacacactatctgtatttggtatttttgtttcttgttatatatgttaaactttggtatttatgttttctaacaaccatagtttcttaatacagctgtagaaagcccttcaaatatcatatgctccatattttacatgaactagtggggtctagtccaaaccagtaatatcaaattatgttaggttcacaacgttttgagatgttttcaagaaagaaaaaatcaggatcatgtcctttttgaaccatatatatatgatctaccctaccaaaagtcacactagatatatcaaacattgtattgttgctttcatttggtgggtggttaaccgctaaggctaaatagtctgcaaaaagaatctagcttaataacataacttatattaaatcagtcttcttacagtatatacgaaaacttctaccaacaaatttctcggtcaaacaaaaaatgcacttatagtccaaaagaatagaatgtaccacataacatttgtgaagaaattaataaagaaaaaaactttacaagtgataaaagatataataaaaataatgcaaaaaaaatctgtaacacgttgacggtatggtctgcaacgaaacggtcacattaatcatttgcaaagtaattaacacaaaaaaacactggaaagtgataagaaaatatgaataaaaacagaaatgtaagaaaagaacaaaaaaatctgtaacacgttgacggtcttcttctggtctgcaaggaaacggtcacattaagcggatgggtttaagagctaagaagacctaagctttttagtcatcatcctattcaccgtcaataatctttgtctgcgtggatgtctctctatacgccacgtggacacgactcaccgtgacctcaccagtgaaccatagttaaacacatctttcgccatcattactttttttctcacttatttgtcgttttgtgctgactcagattttcctttcttttatttcatgatgacacgtgtaatgtccatttctcttccaatacggtgcgttttggtctcactacctgtgctggctgtgcattctgtttttttttttttaattaaaatttttatacgcctaccgaaaaattccttttgctgtattttataacaacgcaaattaaataatacggagtatttttaaacagtagactaggcgagatttttcagaagatttggtgcataatagtgtgtaggtgtgtctgataagccataattattttcaatataaccttttcgtttttggatcgattatgtaattaaggctgattattagtgattacacctttctggttgctggaaatataggaggcaggagaacgaaatgtcgtggagaatgtaccttcttcaaaagatgtgttgtcggtgattaccttttttcaccacagaagcatcaaccagaggctactactattaaaattgcatgatacgctaattagtgaaatgaagtaaaatttattttattctttggcgaggcccacttagggagctagtaagaccccactattttattctttggcgagcgaggcctacttgcccatcatattcaagtggatatggaatgagttgaaactctttttcagatgacaagagacgggcttaagtggtgaaacaactagttaggctaaaaggtgcatcataaggaacttttttaaacccctaaaaggtcacaattactctcttgacctttcctgatccacacaaaagtttagcacttcactagtgaaactgacccttacaaaaaaatatgtaactacaaaagggtcgtccgatttgagaccagaagccgcatcagtatattcctcctaaacacaagcaagaaagaaacagcacaagtgcaaattattcaccttttcttgtatattttgatttgtatgacatcaagcaaaaatatcataaagaaaccaggtgtttaccgagtcaaagttgggggactggatggcatgaaaccaaaattcttgagtctcactgtctttagaggctaaaagagaccttgtgtttttccttctaatctacagttggtgatatttctgtctgaagcaaagaaagtaagtgatcatttggttcgtttagatgatagacatgtagataagagctaatacttacacgagagtgacaagatgattctgaaactaaggaagtttcagcttgaagttaatccgcagcgacttcatctcctccaattgccgctataagggtttaaggattcagttattcttaaggaattgaagcacacttttttctcatttttccaaacagttccaaacagaaactcatgttttcagtaaaatagtggcaataatcgtctagacaatctaattaccttagatacactttcagacgcctgctcgtgtctggcttggtgcaaacaccattccatggccatgtcaaattcaaggttgttaggctgagaagaatgtgatgtagccacggcatctctctggaaaaacatataaagaccaaagagcaagaagattagtaacgtaacaatgcatttttatttgtgtgcattatgcaagggaaagggaaatgaaaacaataccatctcccgtcgcgtttgagttttgtgtagtttgatatggcctgagaataatgacggcttccctggtggagtaatcttagcgaaagaagcaacaaggggcctgttgagcaaaaaaggcacagcagagatttctgagatgaaagtatgccaaaaaaatggcactgtacatctctgcaatttatcataggaagcttagagaaaaaagaagaatatgtcatttcaggttcacctcccacttgatagcaacaagcatccctcatctagtcttctaatcaccctttctgcaacttctcttgttttgaaaatgaccaaagcttcacctgtatatcaaacaatatgaggtgctcttcattccatttatagtatgtgagaatcataaattagaacccggtgagtaaaatggtagcttaccaatatgaggaatagtgactgatgtacgctctatcatcctcgcttcgcattgctggttcaaagcagaatagactatatcctgaaatacaattcataaatttcttaggttgcataaaaagagaaaagaagggaggtttccatgaagtaaatcaggaaacaactgcattacattaggttacattgagtaagcatatacaatatacattttaagagactcctaaatgttgttgaaaaaaaaagagactcctaaataaactgtaatacctccacttcatcagatgtataagtaggatccaagttttgaagaagtaccacagtcccttttttttctgcttccctcatactttcttcccaaggctggacataatttagacaaattaaaaagtcagtccataatttctgatacgacgtacagaatctgataacaattcaggctagctagaagagactacgccagccaaacaaaaaataggtgcggatagagaaagtaaacaatttgactgcagattcaaaagtaaacaactgagtctctcgaacatagaaacgatcaagaaaatacactactttctgaatagcatatgaacgagacgttaacaatattaacaggtcactctactaacatcataaaacaagcatgtcaaacacgaaaatggaggcaaccaaaaacgacatttacagaactggggtgcaaaaaaaagttaaggaaaagatacttacaagactccggaaccatttactttttccctgaaataaataaggaaacaaaaatctgttagataaacctcaatgttaccaagcattgtggtaacataataagatgagaagaatgacagaacatcactacaactatacaacatacagtgtgaaggactgtaaaacaaaactgctccttttagaattgtgttcttgcaaaaccacatccttgcatctaaagattttacaacacgctctgaaatctcatgaaacagccagttccaaaccaatgtaaactaaatcatattgcaggaaacatatagtaagtataaacttacagcatccggccttcggcacacttcagttacttgatagtttctttcattatcatctgccgacatcttgtcctcagcacgtccaaagctgggcttcttggatatacctttttcagttacagtttttgtagtttttccttcagatactgacactacaagatctcggttcttaacaaagctgcgcttttcgggagggacttcctctatagtcactttgtctctaggtctcttaaaagatcctgtatcctttttaccatcagaagtaatgttctgcaaaatggttgtatcccatccatctcgtactgtaacagaaccatcaagtttctgtttcttcagaggcctgtcatccaatccactcgactcttgactatatctttctccagcgggcatagatttttgtttagtcaactgctttttaacatcattttcttgagctttctttgaaatggaatgaattgtcctggagccagaagcttcaaaagagttactatatctttcttcgccaggcatagatttttgtttagttaactgttttttaacttcactttcttgatctttgccattataatgatttcccctagagccagaatccttgttagacctttcttctgcaagtgtagatttttttatagcgagttggtagtgacctttttctttctcttctttgcaaccattactgttttctttacagtcagaagattcaaaagcgctgtcttcgattttcctaactgaaccactagctcccctagctaaaggaccatttggtttcaaactatctgacttcccatttacgtctgcttcaatattctgcaccgcagttgcttctttctcagagcacgctctgttaaagataaatttaactgcaagaattagagtgaaaagaagatatgatgtaaataaagaatcaagatagctattgagtagaatgtcaaagctatcaactaagatgaaacaaattgtaccgtcaactccagcaatcttatcatcaatcgtatccacaactttgcaacttccaacatcaaatgctcggcaaaacacgaagtccgctgagttgaatttttcatccgagggttgtggatttcttttgtcttttgaaatgcatagaacagagcattttccaccgattgcttcctagtgaaataatgtcatatcagtattaaagcaggtgtaattttaactaatcacttgcaccagctattcgcacaatggcacaaagttcaaacgaatatttcaaccaaaaagtgaagcaaaggtaaatctctcaagacacaaggacatgtttgattcaccatagaaagacgcttgtaacaatgttagaaaccaacaaaagtaattgatcaacgtatttctgtttggggagctttgggatgagatctatgccatggttacaaaagaggacaaaaaagctacttggagcacatatgttggtgaacagagaacaagttatcctaccgcaaagaatataatattcaacaaaacaaaagtggatggacaatataatttagtacgcagcataatatgagatacatatcaataagaaaatgccatgacatgctcaataagtactatggagaatgaaaattcaacatagtatgcagaagaataattagttaccaattggttggtattagcaaggccaagaccttcacccgatgctaaaaacacttcattggcaagtacattcgggactccttcaagatatggcgcaatctcagaaggtttaaagaaccagagaagcttgactttctttgggatatgcttattagcgtgttcccaaatttttatgatcatgccaatgaagggttcagtagagtctggttcactggcattgccaactaagacacagtcataaagacggtattcatcgccatcataggtgaaagattcatagaactggacatctttctttttcccaccaacacctttctttttaccccacttaaattctaagccttcagatgctacagattcttccattctctaaaagcaattttctacctagacaaacagcagaatagtgtatccagatcagaattgcacgaggaactgattagacgactgaacatatatccacaatcgttcatttaaatggttgcattgataaatcgaaaggaatacaagaattccaacagaagatcaaactcgttttccaaggataaccgagagtacccttgacaaggtgcagaacacttcaaggacttaaaatactaagaccagaagacacataaaaggaaaaaaccatcacaagatagatcaaatcaatgatccaccatatactcccaatcaatcaaaccaaaatcactcccgaaactctatcagatccactgttaaacaaggcaacacattaatctttcaattgaaatcattagcattgtgcatataaccaaaaaccatccaatacattcttataatgcaccataaccaatccataagaaacttttaagtattcagtactcagactaacgtttagtaatgacaaggctctctaaaaaagcacgcaagtccaccaaaaaataccgaaagcagcaaatcagttgatcaacgaaagaaactccgtgagaacaaagaacactaaataaaatagtagataattgagttcaagtaaacaaaaaggcgattcagaaaaatcaaaagatcaccaaactacgcaattgcaaaaaagtgataatatcatttacgcaatgtaggttgagataagcttttgcgttcgtaagaaacagcgattaactgggaaacaaagaagacgaagtactttcaccaacaattcaactttttttttaccttcactgaagaaatcagtttacagtttccgaagccaccgaacggaaaaatggaaccctagcgaaatcagagtgacgcgagttcgattaggtcaagatgaacagaaattgacgaagcccaggtttatcgcagagggagaaaaaaaaaccctaatccctcgttttaccggttactacagtatctctccactttatctatcgctaaagttcatcataaacaaattcaaatcaaaatctctatagagcaattcagttttggtcgaagattgttcttgttgttgcagtttccagagagaacggtaagttcatgaaagcttttctcctcccattccccctttctctgagattttctctgttacttacttttttaaatgagttgcacaaaagacagaaagtaaaaatgattaggtctaaaaaaaatacattgaaattgaattatgcacaaaagaaatacgtaattttagagaaaatatatttgagcaaagatttttaccccctaaatacaacaatttctttattttattttttctataataataaatttccaatttttttacacatgtatatgtgagatacggtctgatcatatatactaaccgttaaacaagatcatggaaatttaatcatatcttctaactcgaattagtgagcttatatcataatttgtttagaattatccctgataaaagtagttgtggtataaatgctacatccctattttagactcttacttgttttgatacttaaaattcaaaatcaaaatcatggagtggagaaatttattgttcttctaatgactcctgtcaatggtcacacgttttaaaaagatggtgtctttaacaaagccaatggactgtgattctcaccattcaccaatgcaatattaatcacatactctctatagttgaatgtgttttaattttctggaacacccattaatcttttggcaacggaggtcaatatcaagaagttaagctatctatgcttttcacttttcagtaaaggatacagaacaatttttgtctcattaaggcccactaccaaaaaggtctgaagagttgggtttagggatactaggctgttatatgggctgcttctagggtctcgtaaaaagaaacggcgtcgtttttctgtcttttaaaagttttttaaaaatgcggtgagcgtggatcgaacacgcgaccttcagatcttcagtctgacgctctcccaactgagctatccccgcttgatgcttatatgcttaaccttttatctatatttcctatatttgcgaataattttgttgtttttttcgtttgtttgttgatttttacaaaagtttagtagagtccgaatacattacaagttgtaacacaaatacattaaacaaaatctcagcgttgcattaatcaaagacagtgcccaaataattggtacactaactgttagttttgtcgttttacactaactgttatataagtctccttataaaaagataatatggagaagtgttgttttggttctcagtgtttgagccagtagtttcttagctgagccatatgcaacaatatctcgtcccgaccttgattcgtcacactgctggtcataatccatggcggtgttgtctcaaagaacccttggatcaagtcttggaactcctttatgttcgcctccggtttcttccctccatttttcttcttctttctcttgtcgcattttgtgaatatcaaagtcattggaacctgagagatatagatagcaatcattcatttcacagagacattacacaattagtacaagtcttgaccatgattgccaattaatgggttaaagtggggttttcaaggtttaggtactttttatacctggttttgaccaagccagcttgcatactcgagatcgattggctttacaggaatgctggcatcaactagtaaaaacaccgagaccaatgttgatcgatttagaaaatagtctttggtgaatttgttccagtcttgtttgagttcatgcggtgctgatgcatacctggatatataaaatgtatcaactttcattttctatactgaaagtcctcaaattccctggcacagaaactgtaattgtatccaacagacacaaacaaaaaactaggaaagacagagacttgccagagcaattttaaggtgctatggcatgaaaaacaaaataatatcagttaaacttacccgtaaccaggcaaatctaccaagtaccacttgtcgttgatccggaaatgattaatgcattgcgtctttcctacatgaagaataaactaccagaagttataatcaacctatatgtagcataagcacaagcacaagcacggcatggatgcctatcagtttccaattctaatatcacgtctatcaacctttctaagtggttcactaggaaggagtatttgtgaatgagatgttcggtcgacactatagagatactttcatcatatatacatccaaatcccattttcatgaaattattatagcatggtctagcagcaacacatattactcaaagattatatccactgatgccatatcttggttcgtattctctacaacaataccccatcttcaaaagtactagaaaccaacaaatgccgatgctccaaggcaaatctgttcaatctaaccaagtggggatagtctattggttttgtcctattgactattgactattgattgagactagagactgattcccactcaatgcctcacttggccactacagaattcaaatgctaggcgttagcccatgattagtgtggactctagcaaaacccagttatagaagaatcatttcaataaatcaattgacctaagcttccaacaacaacaaaaactgacttctccttactgctttaccaacactctccaatctcctcatgaacattaaaaaactgactacatcactctgtctcaaagatgtgattgcttcagtttcacatgacatttcaacgggaataagccaagttgttctcttaatctatcatctacttaaccagtgcttcaggtccccaaaatggaagcttttgatccataaatataatgacactcaaaataatgtagaaatcacacaccagctaaatgataagcacgatggagcaaaactcagcttaccaggtttcttagaagtcaaggcaaggcgtttcctcctcaccaacgaattgagaagcgatgatttcccaacattggatctcccaacaagcgcaaactccggcaacccatcggccggacaatcctccgtcttgacactactcttcacataatcagcctgaaccacctgtgcgtccctcgcgtacttgctcagcacaatattcgaacccttaagtatcctcgtcgttaaactcgccgagtcttcaccggatatatcggtctccggcggaataaaaagcttgtcgagcgcaatctcgacaggtgcatcatccaaatcggttgaatctgagaccgataatggtatgggttcaacagtggcgagattcgatttagacgcgaatgagaaaagggttcgagatactgttaccgaaggcttagggtttaagaaactgaaatgcgaagaagagagagagaaagaaggtttcgcgaggattgagagatggaatcttggaagatgcgctaaaatcatatctgatcgattctcttctaagtaatagtcttatgagctttttagttctctttagattctgtgagcagccatggatgtaggactgaacttacggatgcggaggaggtcggggaaacaatatccacatcaaaacgctacgttttgatggtggtaatctggacgatgaactttccttatattacaatttgcccgctctattttaacgattgtatcatttcgccactatcttctaattagagagtaaatgggtaaattagaaagaaaacaaaaagtataaggagtatatagcaaaatcgggtcgttggcatctccttccacctctccaagcacggacgagacttcgaccagtgaaccaaaatctctctcaaatttatcaccccgtgcttctgatcacggtgggattctctccgatcggtgacatatcgtggttcatactccggtggatctcacggcgtaataatttatcatatctgaatcgcaatcttattaaccatggctcctccggccgcttcacagcgttatccgtcaccgtcccaaccttcagggtaacttatgcttctatccatcctctctcgatcaatagcactgaattcaccttacattttttagataattagctgggatcaatctttatgattcgatcatctcttttcatgcgtggtccgtcagctcattacttctcgaattttatgatctgtattattcctatacgaaatccagaaattcagaagctctcatttagcagatctagttttagtgcctagttttaccagtccgagctaagttatgtcaaaaagctaatgtggaatcagaagaagccatttagtttgaattttccccacttagaatctgattcctaaatgcagtgagtatggtcgataatatctgatctctatttggtcaaatgaagcatgaattgaaaatagaaattgttatttatcaggaaaagcgaagtgtcagatctgaaaacccagcttcgccagctagctggaagcagagctccaggagttgatgattccaaacgtgacctctacaagaaagtaatatcgtacatgactattggcattgacgtctcatctgtatttggagagatggtcatgtgctcggcaacatcagacattgtcctgaagaagatgtgttatctttacgttggaaactatgcaaagggcaatcctgatctttctcttttgacgattaattttctgcaaagggattgcaaagatgaggaccctatgatccgtgggcttgcattgaggagcttgtgttctttacgagtgccaaaccttgtggagtatctggttggtcccttggggagcgggctcaaggacaataatagctatgttagaactatcgctgttactggagtactaaagctttatcacatctcaccctcaacatgcattgatgccgattttcctgcaacgttgaaaagtttgatgcttcatgattcagatgctcaggttaattttgttttgtatgtataatgttttgttggatggaattggacttgactccctagcatattacttgttttgtataattattaatgttttgatataaaatatattgtcaggtagttgccaattgcctgtctgcacttcaagaaatttggagtttagaagcaagccactctgaggaagcatgccgggaaaaggagtccttgctcagcaagccagttatatattatttcttgaatcggtatgtacttaagctcctccttcaactgtctatcagtataacttgttgttgtagtggtatttaccattgtggtgtttcactgcaggatcaaggaattcaatgaatgggcacaatgtcttatacttgagttggcagtaaaatatgtgccgtcagatagtaatgatatttttgacattatgaatctgttggaagacagactgcagcatgccaatggagctgttgtcttggcaacagtcaaagtgtttttacaattaactctctccatgactgatgttcatcaacaggtttaaagtccacctcctctatctttaatcatcgaaaattattcctaatgaaattagttatgtgcggaatttcatgaacaaatttgtaaaatagtctctgcattgtccacatagtgaagcattatttatattacttttggaaacatagtctggaagcttaaaatctaatcttaacaatcatagtcatcattgatttgttatcatttaagatgatcactgtctaactaatgccaaatgatcttgtataggtatatgagcgtattaaatccccacttctaactcttgtcagttctggaagtccagagcaatcgtatgcaatcttgagccaccttcatcttttggttgttcgtgcgccattcatctttgctgcagactataagcatttctactgccagtacaatgaaccatcatatgtcaaaaagttgaagcttgagatgttgactgctgttgcaaacgagagcaacacttacgaaatcggtaatgatttcaaactatgtcaatatggaatctgaagctagaaaacctttcttttccggctctttgattggactaattcgtacttttttcttttcagtgacggaactgtgtgagtatgctgcaaacgttgatattgcaattgcgagagagtcaattcgagcagttggaaagattgctttgcaacagtatgatgtaaatgcgattgttgatagacttcttcaatttctggagatggaaaaggactatgtgaccgctgaaactttggtaaactatcatttgaactattcacggagatgattggccatcacattgatacttatattgtttacattttcataacaattccacttgtctggttcctcttctaggttcttgtaaaggaccttctaaggaagtatccacaatggagccatgactgcatttctgttgttgggggtatcagcagcaaaaatatccaggaaccgaaagccaaggcggctcttatatggatgttgggtgagtatgcacaggacatgagtgatgctccttatgttttggagaatctgatagaaaactgggaggaagagcattcagccgaggtatttaggcatcacttttctgtttttccttgctactgaaattatggttccatttatgcgtgagaatgaggacttgctcattagtatatgttcccaatttgtgccattgagcaggttcggttacatctcttaactgcggcaatgaaatgctttttcaagagggcacctgagactcagaaagccctaggaacagctctagctgcaggcattgctgattttcaccaggtttcttcctatctccccttccaaatttctctttctttttttcaaacccattggcctattagatcactaattcaacatttactgttggcataggatgttcatgaccgagccttgttctactatcgggttctgcaatacgatgtacacgtggcagaacgtgttgttagtcctccaaaacaggcggtttcagtctttgctgacactcaaagcagtgaaatcaaagaccgtgtatttgacgagtttaacagcctttctgtgatataccagaaggtatgtttcctgactttactactgaagccaatgtagtagtatgcattcattagcctacattactcagaggtgttccttatatgttttcataataaaatgactttttgcagccatcttacatgtttacggataaggaacaccgaggaccctttgagttttctgacgaagttggaaatatttccatcacacctgaagcctccagcgacattgttccagctcagcaatatgaggcaaatgacaaggacctgcttctaggtattgacgagaaggatgaaaataaaggagtttccaataacaatggttctgcttacacggccccttcattagaaagctcctctaatataacctcacaaatgcaagagcttgcaatctccggccctgccacatccgcaactaccccacaatcatttggttttgatgatctctttggtttgggtttatcaaccgctcctgctccaacaccatcaccgcctcttttgaaacttaacgcaagagctgctttagatccaggcgccttccaacaaaaatggcgccaattgccaatatcactaacacaggtttttttcccacaacttttagtaaaagtcttttacttgcgatgctactttttcagcttccaagtacattatagccttatgaaagacgacagtttaactggcttttcttcctcttttgtcaagatgcttaacttagcacgaggatttttaacattagttcatgatcgtaatccttgaatttcttacactgttaggtgcatttggagttgtaatttgtatcatgtttctaaattcataaattctcggggattttgactcctgagagtttgtaactttcttaacttcgtgtgcaggagtgttctgtgaatccccagggaatcgcggccttaacagttccacaatcacttatcaaacacatgcagagtcattccattcactgtatcgcatcgggcggtcaatctccaaacttcaagttcttctttttcgctcaaaaggaatcagaaccatcgaactatctcactgagtgtatcataaacacttcatcagccaaagctcagataaaagtgaaagcagacgagcagagtacgtgtcaagcattcacaaccgtatttgaaacagccttgtccaaatttggtatgccttgaaaagcattcaatcaatagaattctctggatggatctctacacttgttgtaaaatgcgatgatactttttcgagttttgtagtttctctcacctttgatttcgtttcgttgtgttactaagatagtttgtttgaggtgttatgaagatgtactttttatccttagattaggaaatttcaaatgaaactatatcaacaaaacctcaatacacgttacgttgcaccatgtgatctctctgaaatgtaatctcggatcatcataagggtcgacttctggatattgcaagatcaatatatgaagttgtgcaatttttcaaggtcaccactcggtcactaaatgaaataaaagttttaggcctcaaaagtaagatatgtataaataaggggtaggtttggaaaaatattatttataaggcgaccgaagaaaaaaaagtcaacagctttgctttttttgttttgttatgtttttaattgtcgtgagtggttacgatttcttcaatttcgtaaacttctaggggagaaacaagggagatagagaagtgagagagggggaaaccctagattcgatctccattcgatttgattcgtttctcgaatcgaagcgatggttttctacttcaaggcccgtcctgatgctggcgactacaccatcttcatggggcttgataagttcgagaacgaggagctcatcaagtacggcttccctgaagatgtctggtaagccgtcttaatcgagaatcttctcgatttttcccgatcatctattgtttttgtttcgtttctcgagttttctcggatcggtatcagttttgaattgcccagtttttcatttagttggctttaatcgtattttgagtttgtggtcagatgttttgttatgtcatgatctattgttgattcatttattggaattgaaagaggaaggaaatgatgatcaagttttagtcctttcgatgggaacagttcttatcttatatattcatatcgaattttgttatcttcagtcaaaattttgctgaaggggatatatagttggttactgtttctgaaattctttgtttgttgtgtgagatggattagaattgactgagaattatgatgcttgcttaaactttttcgtgggtatatagatagatttgtgttcttatggttaactagtactgaaaaggtagatatattggggccccttatcgccgagtcttggtgttcattcaagtgtggtgatgtttggaaactttctgaaatgttgtttggtctggttttgcagctgccatatgaaaataccgtgataatgttaattgattagtccttctttgagttagatttatggatttactggaagttgtgtactcacccctatttgagagctgtttttttggcatgtctattgtccactcatgttgtgttggctattttcaaactttgatgtttgttgatatgaataagggtttgttcttccttttttcaaaaacaaactagagttgagtttcatagcatttctattgatcatatgctgctgagcaaatcgtttgcggttcagtaagtttattcataactgggatgtatgagtaaacttatggtaaatcatgtctactctatactcattctttttttgctaatgtcaatctttgatgtgtttagacatgtataggttgtctttatcttctaatttgaatattttatttttcttataaactttaggagcttcacgaccaagctgctaaaagtaattttcatttgatgcaggtttcacgtggataaaatgtcgtcagctcatgtttacttgaggcttcatagaggccaaagttttgatgacattagtgaaggtgtgctggaggactgtgctcagcttgtgaaagctaactccattcaaggtaatctttttttctacctgtcgtgaacttaacatttgcataaccattagtcttagagtaccagtttgttttttagaaggagggcacatataggttttttctgttttcttaccgactggtgtctgggattatgtgccaggcaacaaggtgaacaacgttgatgttgtgtacactccgtggtccaacttgaagaaaactgcctccatggatgttggtcaagttggtttccacaattcaaagatggtaagcttcttcatctctaaagaaattttggttgcgcatacataaactgctcaaagtatggttgtaaagcttcgatgatattgatacctaactcatatttgtttcgttcaggtccggactatcagagtggagaagcgagtcaatgaaatagttaacagactgaacaaaacaaaagttgaaagaacccctgatctgagaggttagtatttgttttgtgagctcttcctcagattctaataggtagaagattgatcatgcatacatctttctcgtttaacaattttcctgctgatgaagtgtcagttaagtgtctgtagtttttccagtcagtataacttcaagatctatgaaaataatttgattgttcataactgtgttgatgaagccgagagagaagcagtgaatgccgcagaaagggcagagaggaaacaacatctgagggagaaggtcagtgtctgtttttggtcgttatcatcttaaacgtctttgattagggttttgactgaaatcctcggttgtttctggattttgcagaagaaacgtgaagagatagataggcttgagaaggagaggcaatcagagatgaggagttacaagggactaatggtaactgataaaatgacatccaacaaagacattgcttcaagcaacaaatcgcttcaagaacttgaagacgatttcatgtaaaagctctgaagaaatgagaaacaaaacaaaccaagtcggtaacattctgccagagatgatctggtaccgtccttcaaagaaggcttatgatgttctactcgccttaactatgatgttgatggttgtccggttctatgttttctttaaaaaaatcttgaatacctaaaaccctaatctggttcttggactccttggtccattgaaatgtttcaaaaggattgaatctgatctgtgggaaaaaggagagcattatattctatatatgacacaggtgaaccagtgatctggtgcaattatggtttactctgcattgctgtgtaacctgaaatttgtttactaccccataaagcttcatgtgttactctgcattgggttgggttttggaatcactttattcttgaccatagttgctattgttaaaacttgcgggttgaatttaaacagtcctgtctcgtgattgcagtgggtctatcgggttattactgtaagttagcggggctagtcactagtgcttagactacttttttttagcgaccatagttggcttgttgatgatatatgatttgaaataattatggtggcccctaaagtgatttgaatcaataatccaactgttggtgtacttggaaatctaagggtattaaataaatctgagtgaaaatttgaaaaaaagggaaaaagaagggaaaataaaggataagaaactaaataattatgtccgttaaatactaaaaaaagataggagacacgtgaccgaaaatatttaaaatggacggctgagattaagactgagagccgctcaaaaaaaaaaaaaaaaaaaaaccaaacgttattgacttgtatagggtttgttgaagaaggagactttaacatttttgaatttccgccagtcttgttttgaaatagctctgccgaccgtttagatttctctcttttatctatcttctctgggaaaattttcaattaatctctctttattaactcagatcgtgaacatttatctccgattggaggagatttctagtttttgattggatttactttgggcattttggtctctccagtttctgggtatcgtcgttgtctctctccgatttatgaaccacttccatttctgaagctcgcataggtttgttttatgactccatggttctatatttgaatctaggttggtttgggtatgatttgattttgaatttattgtctgcttgatctaaatagtttgctctttttaaaaatgactgcgaacaaaagttcacaattagtagtcattgtaattattttcaagcttcgagtatgttttgtcctgattagcgaccgactttttttggagctgaatccttagtgttttttttctttacaatttatcttaggaagattgtgagatggtacaaaggagggaatagtagttttgaaatataatgttttggagttacaacattgcagagaagaaaggcaacgtatgggaattggggtgactatttttgcattttcattgactagttatggaagctgagtcttcaacccctcaggaacggatcccgaaattgcgtcacgggtatgcttctttttttctcatatcttactaactaataaattgttagcttgccacaatatcctactagattgacatgtttgtcacacctagaattgagttgcatgaccaattgtgtggattttacaggaggactagtggccctgcaagacgttcaactcgaggccaatggacagctgaggaggtgaaatttatgtttccatcagcttcttcttataagtttctttccaatcctatgttcatgtagccaattaatctggtctcacgttcttgatatatgcaacaaaactctgccctgtgtttgttcatttgcatgatatcattgatcatgagagatacaagaagtagacatttggatatatgcatttttacattctatgatctgcatatttgctaaatcattttaaccaaacatattctcaggatgagatcttgagaaaagctgtccatagtttcaaaggaaaaaactggaagaagataggttgacattctttcctttctatattcatttactgaagtgaactgtaatcttccttgtctaaatgcatgtcacatcttttcttaactctcagctgaatacttcaaggatcgaactgatgtccagtgcctccacaggtggcaaaaggtccttaatcctgaacttgttaaagggccctggacgaaggaggtgacatagttttttcctccactatttctataacatgtgcatcttgcactgtttgctttgaatttgcaaacatctctgatgactgtttattgctctcgtttgacatgtgtgtaggaagatgaaatgatcgttcagttaatcgaaaaatatgggccgaagaagtggtccactattgctcgatttttacctggccgtattggaaagcaatgtagagagaggtatgcttatagagacagctatttctctaacaacagtgttttactagcactatatagtttttgtcctcttttcaagattttaactgtgaaggctgttactgatataggtggcacaatcatctcaatcctgccataaacaaagaagcttggactcaagaagaagagctgcttctgattcgtgctcatcaaatatatggtaatagatgggctgagttaacaaagttcttgcctggaaggtactcatttctattgttatttgaaaaatcatcgtacatatttattcaatcttaaaggtattcttctatttgttctagcaatatagttttctgctatgttatcaacaggtcggataatggaattaaaaatcactggcacagttcagtcaagaagaaacttgattcctacatgtcgtctggccttttggatcagtaccaagccatgcctctagctccttatgagagaagttctacattacaatcaacttttatgcaaagtaatatagatggaaatggctgcctaaatggacaggcagagaacgaaatagacagccgtcaaaattcaagcatggttggctgctcactatctgcaagagactttcaaaatggaactatcaatattgggcatgatttccacccctgtggaaactctcaagagaatgagcaaactgcgtatcattcagagcagttttactatccggaattggaggatatctcagtctccatctccgaagtctcttatgacatggaagactgttcacagtttcctgatcataatgtctcgacttctccaagccaggattaccaatttgattttcaggaactatcagatatatcactcgagatgagacataatatgtcagaaataccaatgccatacaccaaggagagcaaggaatctactctgggagctccaaactccacattaaatattgatgtggctacttacaccaactcagcaaacgttttgacacctgaaacggaatgttgcagggtacttttccctgatcaagagagtgaagggcacagtgtttctagatctttgacccaagagccaaacgagtttaaccaggtagaccgtcgagatcctatcttgtattcatcagcttcagacagacagatatcagaagctacaaaatctcctacgcagagctcttcttcaaggttcactgcaacggccgcctcaggaaaaggaactcttcggccagctcccttaatcatatcaccagacaagtatagcaagaagtcatctggattgatatgtcatccctttgaggtagaaccaaagtgcacaacaaatggaaatggtagcttcatatgcatcggtgatccatcaagctccacttgtgttgatgaagggaccaataactccagcgaagaagatcaatcatatcatgtgaatgatcccaaaaagttggttccagtgaatgattttgcttctctggcagaagataggccacactctctacctaagcatgagccaaacatgacaaacgagcagcatcatgaggatatgggggcatcatcaagtcttggtttcccaagcttcgacttacctgtttttaactgtgatcttctacaatctaaaaatgatcctctacacgattatagcccacttggcatacgcaagctactgatgtccaccatgacgtgcatgagtccccttcgactgtgggaatctcccactgggaaaaagacgttggttggtgcacagtcaatccttaggaaacggacccgtgatctgctgacaccgttatctgagaaaagaagtgataaaaagcttgaaattgatatagcagccagtctggcaaaagacttttcacgtttagatgtgatgtttgatgagactgagaatcggcaatctaattttggaaatagcactggtgtcatccatggagatagagaaaaccactttcacattttgaatggagacggtgaagaatggagtggcaagccttcttcactctttagtcacagaatgccagaagaaaccatgcatatcagaaaatcgcttgagaaagtagaccaaatttgcatggaggcaaatgtcagggaaaaggatgattctgaacaagatgttgagaatgtaagtctctttctttcctttaaccatttgaatataagttgtgctactggtttacacaaactcagttcctttagattttgtcgccaatcatgtcattttgtcacctgtgttaaaatcttcattgttttggtgagttttaatcgtcattgtagcaatagattgtagatgtaactgacatacataacctttatgatggatcaaatcttatgcaggttgaatttttctctggtattctttctgagcacaataccggtaagccagtcctgtctactcctggtcagtcagttactaaagcagagaaggcgcaagtttcaaccccaagaaatcagttgcaaagaactctcatggctacgtctaacaaagaacatcattccccttcaagtgtttgtttagtgattaattcgccttctcgagcgagaaacaaggagggtcatcttgttgacaatgggacaagcaatgagaattttagcatgtacatctataccacccttactaaaatattccttgtcctctttttgctttcatttcttgctacaatgattttgtttcttctttccatttacagattctgtggaactccattcaggagaggtcttgaatctccctcagcctggaaatctccattttacataaactctctcttgcccagcccaaggtttgacacagatttaactatcgaggtacttgataatgccttaagatccttgtatcctatattcaacatttttacttcatgggtgcataatttcaaattcttttaatatatagacatgttatccttaggcaacttaattgtatttattttttcaggacatgggctacattttcagtcctggggagagaagctacgagagcataggagtgatgacacagataaatgaacatacaagtgcatttgcagcttttgcagatgcaatggaggtttcaatttcacctactaatgatgatgcgaggcagaagaaggaattggataaagagaataatgatcctctactggtatatatacatactctacaaatcattcactctctaagtagacggttttgagattatagttctagaaacaaagaaaaatgttttgtgctccattgattttgtgttttgaacatttctcaatctataggcggagcgtcgagtgctggacttcaacgattgcgagtctccaatcaaagcaacagaagaagtctcatcctacctcttgaagggatgtaggtaaaatgccaaaagcttatacataatatgcaaaatgcaccatacatgaacaatgtataaatatgtatgtgcatcttttatgaattatccctggctggatcaattttttttctctgtttctttttaatggatcaattggagtgaatttatgtagattctgtgttcaatatatatatacatatttcatttgcctgcaatgagtacacgtccgtatactctgtgaaacgaaccaactgcagtaacttattcttgttctctgctagtttaatctaaatagtttctgcaattccgtcatatgctaaaacctcagattctacatgaactgtattcaagttcaccagcttaaatctcaaatgttttctcttaaacatttgactctataagaaaccaaaaaagagttgtaagcaatagtagaagagagagcacaaaagctttcttgcgtactttattgatactgggatgaaacaataataatagtaacgacatttatcttgtcactgccggaaatgctataatagaaagaaaagaacaaaatctttattatgaagctttggtgtcatggtggtgttcagtttctcagacggctttggtgacaacagcatggatagcgtctgcaaggtgaggtacagtcttcgaactcagaccagccatgcttatcctcctttggttcatttatatcaatcatcacacactaagttagacaaaattcaagaaaattaatagatgaagaagagaggcaggcgcttacccgtcagatgtcatgtagatgtggtactctttagtcatgaaggagacttgagctgggtttaaccctgtgaaggtaaacataccaatctgctttatgatgtgactccagtctccaggagtgcctgtcacagtgattttgaatttcatttcattagctatgtccatttacattccttatacaaatcaataagaccttacttacctcgagtacgtaatgcctcgaaaagctgtttcctcatgctgatgatacgatcagccatggccttcagttccagagtccattcgttgaacaaattcttgtcacggaggattacagccacgattgatgcaccatggattggaggactcgagtacattggccttatcactagtttcagttggctttcaactctccccgcaacatctgctgatttgcatacctacaacaacttcttttatgtcagaaagaatttcttacgcgtttcttaaatagatttcttgcaatgcaacaggttcttacaatgctgagagctccaactcgttctccatagagtcccatgttcttcgcataactttgagcaacgaggcattctccgccatcagcaacaaacatcctaataggtttcgcatctgtatcaagacttccacttgcaaagccctgcgatacaaaaagagagacaagtattaaccattgattcagaaggaaaatggtttaaatatcagctgatcttacacaaaaggattcatcaggtgtacctgataagcactatcgaagaagggcatcaatccctttgatcgcatcaacttcctgatttgctcccattgttgaatggttggatcaacaccagtagggttatgggcacaggcatggagaagcactatagaaccaggtgcggcagcaccaaggtcttctaataaacctgtgaacaaaagaagaaaaaaagttgacgtaaacgaattcagaaagatatataagcatatcaacaatagcaagcaaagaactcagtagtctcaccttgaaagttcaacccacgcgtcgctggatcgtagtatcggtaagttttcactgtcaaaccagcgagcgtgaaaatctttggatgatttccccatgttggctgagtgatgtaaattgttttctgaaaagcaaaggaaaagactccaaatttctatgagaagttctataggatgaagaaattcaatcagataggaaattaggcttaagcatcaacctgatgataatgtttagccaaaaactctcctccaactctcagagaaccagtaccagacaaacactccacggtggtaatccgattctcccgaatagcaggactaaaccatacatgagaacaccaatcataaagaattgtctaaagaaaaaacaaagtgatgaaaacataaagaataaacagagaatgcatacctgtcagcgcctagtatgagcttagcgcttaacttgttgaactcaaccaatccaacaatgggaagatactccttgattcttgttctacagattaacacacaaaacaagattcaacatcatcaagcacacacacacacataaagggtagaaaccaaaagaaagagaggtaaacctgtcattgataagctgctgctcagctttcctcacaacattaagaaccaaaggttttccctcctgtaacccatcaataaacaaccaatccttttcagttgcaacaacaaaaataataaatcaaagaacagagacacatcttcattgtaacattacctcagttcggtaagcaccaactcctaaattcagcttaactgggctaggatctttgttgtatgcaactgtcacctattcatttttttgtgaaaaacaaatatcagaatcactgacataaccacactaatcatcataattcatctcagagctgaaaatttggtgaaaaaaaaatgaattactaatcaaacgaaccaaattcagaagcataaacatcaaatcttatcccatttcataaaacatcatgtcattttatcgagagatcgtgaattcccaccaatcaataacggatccaatgcgtatgatacacatatccaaaagtatcgtccaatatgtttgagaatgatatagacacacaaaacataatcgaagaagaagaaggtaccccaagaataggatcctctggagcttgaacaagatgagagaaaacagaaccaccggtgcctcccgatgtcggagatgcataaagagagctcaggttgtccgaatctgagccggaattgagatgacggagcagagcaccgatcctgcgatcggaagaagaagaggaagagaaatgagtagttttcatttttgtttttgcttcgtgtgtgtttgtttacgaatgaagaaatagttgaatacgaagatctctttctttatatcaatttggtcttctaatttatttttggctatccaaatttgccacgtaagcttggcataaagttgcgtgcctgaagcatcatcatcatcatcatcatcaagatattaaaaagtctttgtaagattatccatgaaaaagccgggaaaacagggaattaaaatactccaaaaatagggtttatattcgcattttaattgttgaaaatctaacataaattttacattttttacactaccaataatgttatatagagaaaaactctttgattgtttgggagattttacaatgctcattgtttagctgctagtatttttttttggttaaatgtgaaattatttatttatctgttattaataaaaaataacaaacaaccaaaatgctagagattattaatatgatcaacgtatagttgtttttgattttgtcaacgacctttgttgaagaggatgaatatgtgatttaatacttagtgtaacatgaaatatattaaatatctgattgatgatggttacttgtggttacgaacttacgatgatagaagtttgtttggtctagtccccatatcaagcttatgttgattattctagtttattagtataatttaatctttattttaaattacttttatatgatttacaattttggataatggatcattttagtctcttttttttttttttcactgaaagatatattttatattcaagattgtaaccaaatatacaaaaagttaggatcaaggacaatcattctagatcaaccacgttgaatattacactaagcaatacttctttctttctcaaaaagatgtttcagccaaaaaggaaatccgcttgctacatacgattggcggcgatcctccattgtcacgctcttggcaataagatgagctccaagattagagcttcttacttcaccacacaatttccaatccaagatcattttagtccaaaaccagattattgctgaaaagcaaagcattcgattaatttaaaaatccggcaaattataatcttcatattttttcgttgatacgaggacgttctcctatcttctccaagaaagaaatttgtatcctcgaaagtacttactcagttacttgacttatcaggtgttgatggttcgagggctggtttactgatccacggccaggttaagttaacccatcaaaattgtaacacgtcctgggttgatatgcgaaatccactttttatcgtctaaatgtttttgtacgtccttcctatcccatagtgggggtggttggttgggtccggcaaatggattctgacccgatataagaatagagaaccaattacttggatcgtcgatggcttcgttgagcttgggatttgttgtaaaaactggttgctgtgaagagattattcaagacgccaattatgtctcatatacctttgttttttagtggccggtttctgatgagttttgggatgctttgctttataactgatactttaatggataaaataagttaatttaatgtttctacagaataaatggttggtccatatatgtttttgagaggggtagacaaaattttaatttgagttcgaccatggagaagaaattaattatttgcatgttgtttttgttgcagtggaatttatggaatattctgaaaccgcaaaaaagttgaaatgaatcaataattctatttgatagatagtttagtgtatttagatatatacaatagaatttcttaactttgtattttatattgcaactcagtaacgatgtagttttaaacttttgtcatattttagttttcgaccgaagagattatatggatcgttacgttagatttgacactcttttgatcataagaaaaacgaaaccataaatgctgaaaatgataccagaaaacttaattgcttacacgacaaatgaaactgttggaattttgtgatgtaataatattgcaaacggtacatatttcatattatgtcgtgtttgagctctaatagtctcccttcattatttcacaaaattcgagtgtttatatagatacgacttacgaggtcgtccaaagtggtaacagtaattagtaacaccttgttttatctgtgttttttttttttttgtcttttcaaaattttaagatttatataagctcataagaaatgacagcaaaagatttttttttccaaatttaatttggcaatctatgtttgacctataaaataatggagcattttctagaaatattacattttgttctgttttgaaaagaataactaataggagaaaatattggtttttctataccaaatgcttgtgaaagttttagagtatggtaatctgaaaacaacacaaaaagggtaattcttaaatttttaaaattatctctatatttagttaaatatttttgcttagaatttcatgttaacgatttattatccataatgtaaacaattttgaaatgcttctttatgtatgcagcaccaaatacgaattatcaaagttagtttgcggtgtatatatatgaaaatagtagtttaatttcttatagtatatattaatgtctaacaataagatatttttgttaatcatctctagttcacatacaatgtcggttttgaacattagttatgatatgactattaatacaaatcaatatattacacacttcggttatgattagcatagacttgtcatttgtgtaaggtaaagctgctcgtggacgcttaaggtgttgtgagaaaaaaaaaaaaaaaaggaaaaaactagaaagaaactatgcaattccagaaaattttccattcgtaaaatctcagctaagactatcagcaaaaaatctttaccacaaactaaatgtagtaatagtttattttgcaaccaaaaaaaatgtaattaaagaaaaacaaaaaaaaacaatgatttaaagattaaaaacgagaattattttgtaaaatcttaaatctcaatatgtaatatatacaacatctgacttggtcaattacatttaactatatcaatgatgtatgtgtctgtgtgtttcttttttcagaaaacaaagatgcgctggatcgtgtggctcagaagatatgcttttttgggttcaaaccaagattttaggtaatggcttaaaaatagggtattcgcctagggatattgaacaacctgtcattatttaaatcttactatcagatattgccttatgctctatgtcgagactatagattaaatgttagaataatgtggttttatttattgaaaatttaaacaacggtaaataaattgatttacttaaaattgtaccaccaaatttgttgagggtttttctacataaacactacttctctagaaatattgtagtaagattaatttacataatttttaaacctaatactaagaaagagcatgacaattttttcttgattcgaccaccatcttcattggatcggtcattggtgacatgtttataccattttaagatgaaaaatattatttccccaaatttatactcaaaatggatttgaaatgttattaaaactccagcataataaaataaaacaaaaccataactttttgcgtaattaatcatgatcattttttgagtattggtttttaattccttagatacccataatgcattttattaattaaaaagtgattatatataacttaaaaaaatcaaaaaaactattatgaatataattttactatgaatttaaatgtaagaaagtaaagttacagtaattttgaaaaaggggtattccagatctctagtgtatatctcttataggcttttagcatttatttggttttcataactaaaatgctatgaaaaaattagtattttaaaatataagatataaagatcatggacgtaagaaaaagatatataattttttttaatcaatgtagttcacatttagtgaatatatatttttaaattattgaagttctggtaagaaataaatattataaacaaaatctaaaaatatatgatttaaacaaagcttttaaacattctctggtaatttttcttttagcattaaagatatgatgcacacacacaaaacacgaacacaagcgggaattttcatgttttggtgatgggttttggtggaaagttggagttaactgatatcatcgtggtttgagggcttacgttgccaccataattacgacctagtagtatcttcaaacgacagctttagtttgataaaatcatgtatacgtacgtaacaaacacacacatgcatgcattatcattatgcatctgaaaaaaaaatctaatgattagcgaaacaaaagctagctagatgatattgaggtagctagcttacgatttctcatacacaaaaatcatttaacgttgttcacagtagcttccacaattgatttatattcttctcctcttcttttttaataaaacatgttacatgtttcttacaataacattaagtgttatccgtccgaatccggaatccatcatgaattcttggttaagtgaaatactattgaagttctattatatatttgtttccggttggtttttatgcttacacatgtttgtgcattttttcgttatgtgaaattaacaatctttctttagcatctaatcaaaattaactggtaaatcttcaacacaaaaagccaagcacgaacgagtacatatcgtttgctttgcgtttggcgtttatgtttcttttaaaacagaatgcaataattaaagtcacagtcctcatttccggaaaagaaatttagaggttggcgatgagtttagtgagatcatatggatcgaaaactatgaatttaattgatatacaaacagattaatgtgtggaccatctcgagaaccaaacatatcgttgataagtgtttcgtctagcagctaacacatttcaacatagtgaaccgtacgcaacctgggtgtctaaacgtatcacacccattatattttctatctagctcgaatgcttataaggaatttcaatggcccacagagaatgcgtgtataattaaatacgtgtttttccaatatctgaatagtctttatatggcccacgaagcaaatcaacaggcaatattaccactcttacttgattaatgagcatttttattttcaagtctgcctctaaagtgatctcttcgtatctggtgttcacccttaagctgaagaaactcttatcatctaacacttctttataattacgaaacttcagatattcgatatactgttgttttagctttagaatcaatcgttgatgtatatgtgaaaacatatataggtcattagtattgattcagaactaattaattttccaaaataaacatcaagtgagctttcttcacagaatgtatctaacattttttttttttgggtaaaatctaatattttgttgtcgatgaataaaaagacttccaaggttccaacattaggttcatcgggttattaaataatcgctgataatagatacatctaatagagaacttaggttaatttaacaaataaaaaatggttaaccaagtgagataagttatcatctaatggacgtatcaacaattaaagccaaacgattgtggttcccaactgaagttatgagttgaaaattaagtatttttataacggagatcaaacgaactcaaaggaatttgtaacataatataatgaatgatacacatcgatgcatgaaagtgagtatataagcatataaatacatgaataaatagatatgatgatgttggggtgtgtgtaagaagtaaaaatccaagagttaaaaaggggagagagagagaaggttgatgtggttgtcgagatgctaacagagaggcacatgcaaagcttaaatgatggtatcgctggtggccaaagcatctccttaaagctgtcctttttcatcttaagtcctctttttttatttcccctttgctaccgcttcactctttctctctctatattttgcatacatatatttatatactaatgtgttaatcaacttgtgtaatataccttacttatgtgcagttgtgcacgtatgcagacctaaaagtgtatcaattaatttatatatatatatataaatataatctcctttttttgagttacaaatacgtttgaagataatattcaaaactatgtgaatcttgatttatacggtcgagaaaaaatgttaggttggttgaagataggttccgttccgcccttaatatatcttatacaaaaagataagatcattacgaatatgtgctcaattccttttccataaagttgggtattaaattatgaatattatctagaaattttagaggggtgtatatagtgtgctattttcgtgataaaagtaaataatgcatccaaaattcaaagtggatcattaacacgttttggtatatacatcacaatttgtcaaacccgtaattaattgcgccaaacaagaaaaaatgatcttatggggcaaaagtaaatcacatatatggcagtgggaagaaaaaaggagattatatttttcccctaaaatagactaaagtaacaaacctaaatttctctggaaagaattatatcataaaacctcgaagccgacaaaaactaagaaaaaaaaaaacaatttaccgaagaaagaatattattaaaaaatacaggaacaaggagagagaaatgtgttataaaggataaagcccactaaaggtcattcacttatctaactgtatactattattttcttcgaggcaatatataaaatttacttgatctagtaatttattttcactaaggtttagtattcttatacatttgtataatagttaacacaacttaacgatacttacttctaatatgtatcaacacgtacgtacagagccacgtaaagaaaaaaaacacacacacaatcgctgtcgaacagttaaatcccgaatctagatttgtattagttatctaatcgtattattgttaattccgaaagtagagtcaacatccaattaattgctttatcaaatatcgaatatgcaaaaggtctaaagaaaaacaaagtttttttttgttgttaaactttgcttacatcataggtatcccattaggttggtgtaccatgtgatgattctaccaccgaaaaaacagaagccaatattaaaaaatacatctatatagtacatgtacaataacaataattaaggattattgtattatattttaagaaaaaaactaaatagggttatgtgaaccagactttttttaacacttttactgtggtaaactttggaaagggaaaaaagagtgttagggttaatatatgtatatataattcatttattggggaaatgggctcatctagggtaacatcacctacccatacaattttatcatgcttttagggcttttatttatctcactggtccctcaattcctccactctctcttcccttcgcgtgaacaacacgctccaatgtctccccttcgtatgtgccgacgctccttacctctccgcgccacggacgaaacgtgcccacacgcgaaaagtaaacgccgtgacatccacgcgcctagggttttcttttcatcaggacacaagtgaaaaatgggttgtgataagaaccgcacattgcggccacgtggttaattctcattggtttcttgtgccccatcctatcacacacaaaaacgtctaatacgatttaaataaaaatcgggttctttcctaatataaagaaaaacactgagatcttttacttaatcttgttgtttaatttctggatactgttcccctaagccagctattttctactaatgctcagatttctttcttaactaaacatatgcataaaattttctccttttattcacttttgacagatacagagatacaaagaacagatacagagatgtacaaatacagatacgtgtacacaatagaagtaaaaagatacgtaactttgtttcgtgtaattggaaataggcagaccagatggtgacatggcattgtcatgttccatagatgagttgttctttttttaatataaaattattacaataaattaataaaaagattattttattgaaattaaaacccttatatcgacgcaaagccaaacaaaaaaaaaaccctcatttcaaggataagagagctccactttctctctcctctcctttctccaacagtctctctctacaagccataggaaaaaaaaaaaagtccccctttctctctccctcccctttcgtcttagggtttctcgaaaattcgcagtcaaattctactcatctcccgacgaatccatccttcaagctcatctaatcttcttctccgtagctttctcaatctaccgatatagtttttatcccttgccgcttaagatcgagctcgaatctcgcaaccccttttaatccctaatttctggtcggattaacccaggtgcgttgtttccgacatgaatctcagatgtgtttcgatttaaggtttgagctaaggtttgatcttgttgggttgagatttggtctgacttgtagctgacttcgtgtcttttaagcttcactgttcatttatacgtctatcttcctcggaaactcttgatgttcttactttttttttttttttttttttttggggtttcgtcttcacggactattcacgtgcggatagatctgacccgtattaattggtgggtcttggttaatctttgttaatcacatacggttaatttaagtggtttattatcttttaattttgttctaattttgattttaaaccctaaattacgctgattaataatttgacctttcttgggttttgtaattccgaaattatattgaatctggtccgatcttcttttttcttttgctggtcatgtagataaggttacagctttggggtttctcgtctgtctgaaaaaccctaattttaggtcgtctaagtttaggtttacttacatgttaattgttaaatgtataaaattcacttgcacgattaattttttgttatattagcgtaattgaattgagatgctagtatagaatttcattcttgattttatgtagaccttagggtttaatttttttttatttgccgtgtaattgtgaagtttgatgttggttatgaatgttattttatgtgggatattcatgtgaaatgctttaacactatgttatagattagttatatttattgcttgaataaatttagagttatatttggtgtcgtatatatggaaagttaagatttatgtcttgatatacaacaataatgtgatcattaagcacaattatacgatgtgttatataacttgttttgatgtgttgcttttgtagctctagttgcggagagagtataatggtgtatgaaagttaatcatcactgaggcatagtatctatctccttcaagcaaatcaatgggatcttccatcaagatcaactcaatatccatagatctcgcaggtgctgccaacgagattgatatggtgaaatgtgatcatttttccatgcggtgagtatagtttgttgaccttatatcatcaacctctcttgctagagtatgtttatatagtagcaagctacaagatgaaatgacatgaataaccagtttttcttctctgcagtggattcgtagctgaaactcgtgagagagaccttagaaaatgttggccgttttcagaagagagtgttagtttagtagaccaacaaagctatactcttcctactttatctgttccaaagtttagatggtggcattgtatgagctgcatcaaagatatagatgctcatgggccaaaaggtatatcacatttccaatattgttttttatgtgtctaaagacgtgtctacttgaacttatgcattttgagttgcttgcagattgtggactgcattcaaactcaaaagctattggaaactcttctgttatcgaaagtaaaagcaagttcaattcgctaactatcattgatcacgagaaagaaaagaaaactgatattgcaggtatgcatctgctgagtcttggttcagtttcataatccatagcaaaatcttaatcattttgtattatcatgtttttcagataatgctattgaggagaaagtgggtgtaaactgtgagaatgatgatcagacaggtaaagttttctctggtcaagcaaattatgttttctctgatgatctcatgatgcggaatactaatttcttaaagcttcaacaactgcagctactacgtttctcaagaaagcacgtggtcgacctatgggtgcttctaatgttaggagcaagagcagaaagcttgtgagtccggagcaggtaggaaacaacagatctaaagaaaaactaaacaaaccatcgatggatattagcagctggaaagagaaacaaaatgtggatcaggctgtgacaacgttcggctcatctgaaattgctggtgtggttgaggatacaccacctaaggcaaccaagaatcataaaggcattcgcggtctgatggaatgcgataacgggtcatcagaaagtataaatcttgctatgagtgggttgcagcgtaggaaatctcgcaaggttcgtctactcagtgagttgcttggtaatacaaaaaccagtggtggtagtaacatcagaaaagaagagtctgctttgaagaaggaatcagttagaggtcgaaaaagaaagttgttacctgaaaacaattatgtcagccggatattgagtacaatgggtgcaacctctgaaaatgcttccaaaagttgtgactctgatcaaggtaatagtgaatcaactgatagtgggtttgacagaactccatttaagggtaagcagagaaacagaagatttcaggttgttgacgagtttgtaccatcacttccttgtgaaacttcacaagaaggtatcaaggagcatgatgcagatcctagtaagagatcaactcctgcgcactctttattcactggaaacgattctgttccttgtcctccgggtactcagagaacagagaggaagctcagtttacccaagaagaagacaaagaagcctgtaatcgataatgggaagagcactgtgatcagttttagtaacggcattgatggaagtcaagttaactcgcatactggtccttccatgaacacagtatcccaaactcgagacttattgaatgggaaaagggtgggcggtttatttgacaaccgtttggcttcagatggatatttcagaaaatatctctctcaggttaatgataagccgataacatctttgcatttgcaagacaatgattatgtgaggtcaagagacgcggaaccaaactgtcttcgagattttagttcctcttctaaatccagctcaggtggatggttgagaactggagtagatattgttgacttcagaaacaacaaccacaatacaaacagatcgtctttctcgaacttgaagctaagataccccccttcttctactgaagttgcggatttatctcgggtgctgcaaaaggtacaagctttgcatctatttttcttcaatcgccatgctttctcattctgttttccaacttgcacctattcttgtatattccaaactggtgtgcttcagtgattggatcaggatgataacgggattgatttacttggcaggatgcttctggtgcagatagaaaggggaagactgttatggtccaagaacatcatggagcaccaagaagccaaagtcacgatagaaaggagactacgactgaagagcaaaacaacgatgatattccaatggagatagtggagctcatggccaaaaaccagtacgagaggtgtcttcccgacaaagaagaagatgttagcaacaaacagccatcacaagaaacagcacacaaatccaagaatgctctactgattgatctcaatgaaacctacgataacgggatctcacttgaggacaacaacacatcaagaccaccaaaaccgtgtagtagcaacgcaaggagggaagaacattttcctatgggaagacagcagaactctcatgacttcttcccaataagtcagccttatgtgccttctccgtttgggatctttcctcctacccaagaaaaccgagccagctccatccggttttctggtcacaactgtcagtggcttgggaatttgccaactgtgggtaatcagaacccttctccatcctcatttcgggtattacgtgcttgtgatacttgccagagtgttcctaatcaatacagagaagcttctcatccaatttggccatcttccatgataccaccacagagtcaatacaagccagtttctttaaatattaatcagtcaacaaatccgggtacgctttcacaggcatctaacaatgaaaatacatggaacctcaactttgttgctgccaacgggaagcaaaaatgtgggcctaatccagaattttcatttggctgcaaacatgctgctggggttagtagtagtagtagtaggccaatagataacttttctagtgagagctctataccggcattgcatctactcagccttctggatcctcgcctgaggtcaacgactcccgctgaccaacacggaaacactaaatttactaaaagacattttccgccagccaaccagtccaaagagtttatagagcttcaaacaggggactctagtaagtcagcctactcaactaagcagataccttttgatctatacagcaagagattcacacaagagccttcccggaagagtttccccatcactccacctattgggacgtcttcactttcatttcaaaatgcttcatggagtcctcatcatcaagagaagaaaaccaagagaaaagacacctttgctcctgtttacaatactcatgaaaagccggtgtttgcaagcagcaacgaccaagcgaagttccagctgctgggagcatcgaattccatgatgcttcctttgaaatttcacatgacggataaagaaaagaaacaaaagagaaaagcagagagctgcaataacaatgcctctgcgggacctgtgaagaacagttctggacccattgtgtgcagcgtcaatagaaaccctgctgatttcaccattcctgaacctgggaatgtttacatgttaacgggtgaacatctgaaagtccgtaaacgcacaaccttcaagaaaaagccagccgtgtgtaagcaggacgcaatgaagcagaccaagaagccggtttgtccacctacacaaaatgcctaaagatatacaatgtgtgtgggagggatttgtgcaggtaagttgctaggactatctgtttctaattctttagttttgggatttacttggttcgtctgaaatcaatgacttaaagaaatctgcaccttactaagtgtttctttttgcatttacattagttagaactgcaaaaggttaggttttatgttaaagcctagggtttagaacagagttttatcagtctcttcatcaaatctttgtctccagctctaacaaaacaattttctctttagttcattgtgaaacagatactgaggcagagggattaacagatggagagggatacaaagagagggagagagacagagacagagaaagagaaagagagatcattcctattgaaaacaagaataagtcagacaggaaacattaaaatgcaaatcttcctcatgttcttggtctctggtcttaaaaacatatctttgcttatggtttgttcaagcatacttgggaaccattcagcttgtgtatatatttaaatgactgtagtacccctgataggccttgttgttttttgtttgtttttttgggaaatactagatacctttcagctggcgttatatatatatttagtctttatttatactgttgtgtttaaatgtctctgtcaggccagccaacttctccaaacctaagagaaaccctcttaagtcttaacacatttttaatccaaaaaagactctaactgaagattccgtaaattaaatctctagtctgaagaaaaatctgcaaaacaacttttacatcaattaaaaagcttagagtgctacagaaacgcttaaggttacttttcaacttcttaatttacttaagaatacattgaaattaagttgggtatgttgttgattccatgcaactccgagttttcatttggctgactaggtgagggtggagtagaggatcattttgaattaagattataggagaacaaggaatgatcgatgggaatgtgagcagatacaaggctcaaagattgaaaagttggcggatcggggagaacaaaaaaagggtaatatttgggttaagtaagagtgagaagatggttcataaccgagggttaggagaacggtcatcaaatgtgacctaacgggaaaagaaaatgtggcagattcttaatataagcaaacataaccactgtggtttgtaggataaacacatttagtggatcggaaaactagagagtaataaaatcctaggacgattatatgagatggggagacgagagaaaatatatttcattgccagttgaggaagaggaaaggaataagtggacattcataggaagtgcttcaacccaataggagttaggtagttcagcttgaaagaggagagagtaaacaatgttgtataggagtttgaagaaaaaatttcggtacgttcatattatatataatccattttgttgggacgtgtaaagatatgaaaaacgaagctcgcttgtattcaccattgtcacattggaaaatattgattgttccctaacacttgttttgaatgaagtgattgtgtaccacacaaaaaaagaagtgatcgaagtataagttattcctcttttttttttttttatgagatataataaagtcatatctcattcgacatgggatttataacatgactacttggaaactggaatgatggttgaatccctttttattttcagattagtcatatattaactggtaaaattaaatcgatgggttaaatattgtattaatcgtacatgagaaggactgtttttcttctattgcggttatgaaaacctttctattttatcgggtaaacgtatgcagggtagggattatttttcttttttgttcagacaacggtgttaaacgggtaataatccacggaataaactaaaaatttgcaaatacttttgaaagagttaaatatggataaaacagatcatttccgtacaagacgagatcctaataaaacatttatatccttggaaaactcatgatgaaagaatagtaacttcagtctctatatcatttcttcaccggatgacatagtttgaacatcaaaactcgagttacatcactataacttgagctggcgagaatctgcaaaccctagcttgtgtataaacaaggccttccttacaaaagtaacctttggaagggttacaatgtctttcttctgaacacacacaatttccttccaaggcacatccgtcatacttggaagcttctgttcctaagagaatctcatcagaccattcactagagaacatcttcttaggatctaacttgttctttacttccaagaatttatcaaagttaggtccaatcttttgcttcacgccgaagaaacccactttcctattcttcccccaatgcggctttgcgccgtgtttgacaaacgccatctgctccatctcctccatcacatcttggttcaacctcggggtcaactcatcatccgctcggtaataattaaagtcaatgaccactgaatcctctgtctggccaagataagcctttgagccctttatgaaacgtatgaagataccgttatagatatcgatcccgcacaatctttcgggtttcatgtctcgtagcttcttcacgtcgagaagaaaatctctaaacctagaaactgggaatattgcagtcgtttcataaaagaaaagaccgttatatctcgggtcccatgcgcaagcgacatcaattctaattgaagatgagtaaagacaagacccagaagtctggatcttgccttgtcttccgataaccggatatccagtaaagattaaaccactattctttaaaccgttcccgattaatttcttgtatgccaacgtagtatctgcagtggtgcattttccattctcattcttgctagattcaaaccccttctctgcaacattttcaaagccaaaactttgattttaaacatccaaaccggactaattaaaccgggaatattggtaatgtggagtcgtctagctactataaggaaagaggaactaacctaatgctcgtacccctttagagatcaagataggattagactgaaaaccaagaaagtcgttgactccgttgccggagacattgaccggtgctcggatatcgtaacggtaaacagcagtttttctagaaggataccaagttatgtctccgaattcgtattttttcccatgctccataaaaatgtcttcaagtgctacgtcagatgtgaagttgtacgtcacacttctcttaaatgctttctctatcgaaagcttaacctacagataatatggttaacggcgttacgtcaaatatatagttatatacaattgaatcaataaaataaaaagcactgtaagactgttaacggcgttaagttattgtacctttgaaatgactcctaaaacacccaacgacactttaacggcgttaagaagcgtatcatctctcccttcttcgagtctaacaaccttcgcgaaaccttctgattggttcgccggaaccacaaggctgattccgacaacatggtcatgaaccgaaccacctcgtccagaccacgaactcccgtgggagccagtactaatcagcccaccgatactcactccttcccagtacggtgacgttccgatgctaaacccagctccttcaactttctcgatcagctctctcaacgaaactccagaatcagccgtgaccgttaacagttccggttcaatctcgataaccgaattatatttcgacgtactaattagcaatgcgtctgaacctgaaggacaagcgagtttcggtatggtgtgagagaatttggtgacggttttgactttgagattgtgctcagccgcgtaagcaacggctttacgaaggtcttcctccgtcgttgggtatgtgacgttagccgcgtgacaggttttgcggtcaggccacgtgccgtacgcgttggagacggtgcagccggtttggtcgcatcgaatcggtggttgtggtggtactgattgaacggtccatattgtaacgaagaaagatagaattgagaactgctggagagtatgagagtaacgcatgattatttggagagattatgttaatccgatcttttggatctgtgatatttttgttttggaggttatgttaactatgtataaatgcgtttgaagattgaaaatattgcttagaaggaaatcaatattgccggatctttttatatttaagtatatgatgtatcttatgtttttggtaaggaattaaggatattgtatagtgtgacttgtccttttttgtcgccgttgatttatcctaagaggctaggaattaaaaattcgtattataagatctgggtcaaaacctaaattatggaaaataatgtagggttaagatctgaaatataatacccactaagtatgtcatcatcattcataaaatatatgtatagatacacttgtatagatgttggtgtaatagatgaaaaacagtggggttaaagagaaaaaggcggaaattgacaaaataattgatctgacaaaaaagtacaacaagggaaagcatgtagtgtttggttttaaagcgtaaaaagactactgatgcttataattagtttaactatggtttatactaatttgaaaagaaaagaaagttgatactagctataagttattatgtaatccaacatcagttgaataaaatcgatgatatctattttagttgacatcatcaaaaataattgatattgataacgtatagcgataacgtgaataacaccggtacgtaaaataatcgatatatgtactggagatattatataatttcaggactaacatagttaagcatttgagtgagggttatgattacaattccttgacattggtgattactattcagaaagttttgagaatcagaatattatagagtagataatccaatactatattttagttggttacgacttaaaaaattggtacaataccattattatcatggagtaacaggcaaccaaaccctctaaagtcgttgttccccctcgccaaccgaatgaccgatacgtgtataataaaagatgttctggtgggaacaaaaccctcatgccaattcggtccagcttttgtaggaccgattttattcttttaaaaagttgatcactgagttggcctgactcatatagatataaccctatttaacggtcggatccgctaagccaaaggatcatgacggtctaaaatcttagaattagagcttttctcaaacgtagacagtcattaaatcggattaatataatcaaaataattttatcaaattagaatttagattattaaaattttaaaccaatactattatgtcaattttgaagaaattaattttctttaggactcaataatttggagagcttgaccagctccagtcataaaacatacaaaatacaacattttttgtgatagatggtgtaagattaattcaagcattaattatagataaaaccattttagtatatttagaaatttagacaatgcaaaaagtctttacgtcgtttgggtgttctagagtttgacgtagagtacttcatttctgtaagaagaaagaagtatacttatgatatgtggtggttttttgttcctaactagtatccgctgattaatggtaattctcgctactcgatgctatttacttatctgttgagtgatcctaattctgccaaactagtatggagtgataaaaattctatatattaaacgatcttttttgttctatttggaggttatatatatgctgtgttagacaaacgttataggcctgttacatatggtaatattgtagcacctcaatacctcattgaccggtattaccgcaaaccaaattatggtttggactttggatcgactactattgttggtcatatataattgtatcaatagtttaaagtaatatttggtcattaatactgatcatgcatgcttctagatcagtagatcatggttacttttatgcttaaaaacagttttgatgaaaacctatatcactattttgctatttacactaccgcacctggttaagttgaatatgcatttttaaattatgtgtatgtaaacgtgtgctagttcaaagttcaaacaatgttggtatatatatgtcaggtgtcacttcttattgaacaatacgtactcgtttataccagtttgatagtcagagcaaagattatgtatgattaattcgtgttataagcttctacctttgtgattattgatttttttaagtaggcttgtaacattaattagagtaaaattcatataaggttctactacttgtaatatatatatatatgtacatatatattatatagtagcatcagagttgctatgacttgacctggcgatgttctggtatcgtagagatgcctcccaagtatagatagagaccacctcacatgttcatgccaatagttaatgaaaatgaccaatccatgaacatgcaaaaacacatgaggtttttctaaacatattataattgaccaaataaagagaaaaaaaaaaaaacaatacatatgatcggaatcattttgggagtttgaaggaactaaacataatatgcatgtcgaagtcaacttattgcaaataattttgaaatgattctgaattggaaattcatgaagcttaattattttatctaaataagtttaatataggtttgagtgagatatcgagattaaatgataagagtctttcttcgaggagacattagaattctacacaaaaatcgaaattaatctagtccttgacaatcagttttcaattaatcaaaaacctataaaattcaactcaaaaccaatcgtatgaaacttcattataccatataatctggttacttagcttaaatctctacccggcgatgtttcatgcttgagagactaggtacataggacactaggagtactgcatatatggttacctcatgagttctcatcgtaaaatcatccaataaaaaatggtttcctgcttaggtatacggtataccatcttgtatcgttaaaatttatagctcagttcgttgctaacagtcaaatacgtctttccagggtaaaaaatgtggaaatttgttccactgtaaaaacctaataatttttgacattaataattaaaagggattataatgtaatatatacaaagataggggagacagagacgaaggcccacacatctttaacaaaagaacaacaagcccgtgaccccaaaataaaactagctttcagatttattatttttcatctgacataattgcaaccgttagatttcatttctcaggtcccattctgactcagatccaaccgtccatattcctctagtgtcttcaatagttgggccccttttctttttcctctcgccgtacactctccttccagcgccaacgccaccgcccgagccacttcttccgccggcgccaccgcgatttcctcgccggaatcccctccttcgccgcctttcccgtagaccacggaaaggatgcttatggcgtattctctccctctaccagccaatctcgccatcaccgctaccatcgccggcaccgtcatcgcgtgagcgcgaacctccgccgctccttctgccgttgtacacattagctcaagagcagctaaggctcgctccaccgctgagatctctagtcctgccgctgtttccaccaccgctcgtgcggctccagcctcgaccgccacgtggcggtttccttcggcgaggcagagagcgagtaggatcttggtgacgtattttgccgttacgatcttgttgttgctacgaaggcaagagacgagacctcgcatgagacccggtggacaagtcggatcagatggcgggtcaggtacgactacccgctcgagtagctgtagagcgaggagcttgtcggattcagagacggatgtgaggtgaagctctgcgatctggaaggtttcttggagagtggtggtgaccggaagaggcggtggtggaggaggtggatgaggaggaggaggagcggtggatggagtttgatcaagatgatgaggaaagcgccattgagtgaagctttgggaagttgaggttgaggaggaggaagatgaggaggaagtggtggtggctttacggcgaggttgctgctggtgaggagaggttgggctgaggacggattgtgtgcagcggcggaagaagccacaggagaagagaggacgcggtggcgcgtggggtttcggtttctggtttgctttcatcatcgctcactagggagactgtgtgggactttcaagtgaagtggagtgaagtgaagggaagcgtctctgttttaaataggaagaaaataattgattcgaaccaaatttgtcaggcgttacacttgtgttctccctaagattattgctcgcattaaaccattaaataatatttattataatcacatgtttgtgtgtgggatggtccccaaacatacgaatttacgatttggacgagggtttaagtataatggcgacatctttgtttttttggatcaatcattatctgaagacgataaaatgcaggctgatttgggtcttaaaacatggaatttattgctgtttacaaaaatgaaaaggttaaacagaggcttctataaactttaaattcagaaggtgcagctcaactctagaatgtgacaaaggtcacaaagcaagagtctgtaaagtgtactcgatttccaaagcctaacatcaagaatttagctaagacaatggttttttcttctaagagtgcgaaaaatggttcataaacattctacaatgtgaaaaagcccaaagagaggaaggattttaaaccttacggttccaatcacctccatttttcgcttagttctttcttctctgaaaggacccatgtgatgtagatggctgcaacaagtgctacaatcgtgatcaggagaagagcgtagctgaaatcgtcggttagtgagtcgtaggtctttgaaggagcaagccttgtgtagaagagatccactccataggcaaagacgtgtgttgttgactctagcttggacggagctgttactatgcctcttagaccttctactttgtgggagtgtgtaacatacgcctgtggaatttgacaagtgcgttagaaactatacatcacttaatctaactgtaaccaaaaccagggattgctcagttgtaacaaatataaggaaaatgggtttgaatgaacctgaggaatgatgggtaatgtatcagtgagagggatgattccttcttctttttcagcttgagacgggttaagtgtccggcgtggatccacaaatcgtttatcaagtgccaatatctaatcattcataaaaacagttttgagtatcagttattcaatctatataggtatctctatatgagaagatatgtacaaacctgatccccgatggtaccaatgagaagctgctttgaagttataccctttgctgtggatgtcaccgcaatggttttcacagactgagcaaagaagtatgactgtgactttgtaaacacctctggcctagagtacgaagtgatgggtgctgttagattgtgctttcccagaatgagtttccacacatttttgttctcctgcaaataaaatttataatgattcacagtgggaacatcaaatcaactgaaaaaatatttttgagtatgaactatgaagtcataccgccctcgactgatcatagatctcaacgaccgtaacctcgtacttgtgagctcgaagattgaaatagtggtaaacaacccaattttcactaaacacctgaaaacaatttgaagcctaagaaagttgcattgaatctgtgacaaaaagaaatgagatgaaattgcatgaggacttaccgcatgaaccggcccttgacagccttgatgtgacaaacggtgcagtatccgtcctgtgatggtgtcaatgaggtatactacgagtgatgactcctctggcgtaactgagccaatctcaccagcaccttttggtgaaacggtggccacaaacagtaagtttcttgatacatatttatacaataggtcttggtctgtgttgactttggcttgtgtatgaacaacctggaaataaaaaatcgtaagccatgattaaaaaatttaaacatttatgtgataaaaaaaacattatcaagacttatacctcattaggttttcgtgttagtgttgaaatgattttctctgattccgaaggaaacacaacagtccaaagttctcgggttgtaaagcagtactcatctgcagtctcaccagagcaactgcccttcattacgtgtcctctgataataccatcatctgcctcaacagtgtaccaatatacattttgaaactcgcgttgaaagatgctgagagcctctgaagttttcggatacaagtggacgtggccaactgtatcagctattagatgtaaacgttgttcctttgagtcggtaattggaagaggcataacttgcacaacagagtgaccaatatctgatgagctgatctcctttcccgtgtacacatctacaaatgaaagtacaccgggtgcacttgaatctgatccgcacttgccaactacaagcaccgagggattttcgtccatggcgtgatgatgagggacctgccattggtacaagctaacaccgtttggacgttcacaggattgtgattggctcggagagtttagcagcatggaccagacaatcctcccatctccagtgtgcagagcaaaaagttttccagctcgagtaagtgctaagattaatttccgaaagccattatggtcacgggtcaatttgttcttcccagaactcttcaccctcaaatcttgaattgctaccacgtcctctgggcttgctagcaacaaggatcccttaagcttcagcacatgcccctaccaaaagaaacagaaacaactgattagggtgagaaaacaagtacaacacatcaaaaacgcaacaaaataagacaactctacggaaattaagaaaacccaaccaagacgtttaagaccgctcataccttaagccactcaaagagagtgtgctccacttttgccactgatacgccatctttttccagagggagttctgccgtcgtaacatcagtcactgaagccagaccttcttccctgctccaaacaatcgctccttgttggagtaacaagagtgagtgatcttccatcacaataagcgccctaaatccattactcctgtctgtcctgatatagttgttcataaaaactttatggacacgtcccctattttggtccatctgaatggtctctctaagcaatacattattcaagtcattaacaagtttcaccatgaggtgaatcctgctcccttcatgatgaactgaagcaaaggcctcctgatcatctgcaactggaagtgaatcactcatggctgtttcatcagataatgagtctaccacttccaactttcctttgtcaccgacgttcacaaatatagtgcgtttattgacttttacagcaagcatattgctaagaagaggtgataaaatctcagccgttccagaatcctcaacaagatctgaaataggggtcttctggaagctaatatctccatctatgaagccaatagtaaccaaaattgacctcgttgaatcaagaacaacaactttatcacttgaaactgatgaaatctcgccagagaatccaccagggaacaccgtacttttttgtgccactacctctccacttttggaatcaatctgataaacaacagcctcagatgaatgaaggaatcccagaacataaattatactacttccaggagcttgaagaacacgctgcacttcaaacctgcaggagacaccaaaagtattataatatgcatgtctgcacttaaagcaaccttattcgaatatagagtaaaggctgtcatacccttccgctgtgaaatcctttttccagaggacctcaccatctatagcagaaacagcatgaaggtacccaccaccgaaaacagtaatagggtagtccttgtcaaccttcaaatttatctgcaagatagctttaattcataaataatcaaccaaggaaaggatgaagcaactaagacttcagataataactacagttgtccttcttataaagaaaatagcataactcctaataacttaccggtactgataacagtgactttgaatgttgtgcggtatgcagagatgtttcccacaccatttgaccatcaggaaggttccaggctcttaaagtacttccttctgatgaaagagtgataacatctgaaatcatttgaagccaggaaaatagagttcaagatgctggtacattatttattcagagtgttaggtacatccagacatgattgatccacatgtatagaagataattcttacattttcccaaggcaataccaaccccatcgatagcgtcctttgtcccgagaacatgtcgccaaactgcaccaaaccagaatacaaagtaagaaaaacgacaatcaaagtggaagatacttcaagatttaaagatggataacaaaaatatgaagatgaataattcatacatatctccccatgtctgagatcaagtgaagcaacaacattctcctcggttgagacgataacacgctttcttccagtcttttgagtgtggaatactgcatgcttcactttcccaatgtacctttggtgcctacgcaatacaacaatgattctcatcaatcaaaaacacttctaatttctatagattctagttgattcaatcctaattccttagaactcatcaaatcatagcttgaccccgatcgcatctcaaatccactagatatcactacaacaattatctagctaatgagatctaagaacactaaatcacagattctagatacactgcgaattcggattagtcagattggtgaaagctctagttagacttcgaaatcgaaaagtagtaagattcgaaactttgtcaactaattttattttttccagagagacagaagaaataggatgaagtaccaatcagtgaggccggcttgatcttcataaagagagaaagatagaattgcagatgataagaagaggagaagggtaagaaaaaccctaatcgccatagctatgacgattgctgactaatttatcttcagcagcagatctggagatgaaagagagacttttggtgtggaagataatcgtcgaggtgctttaaggtcttcttctgcagaacaagcgaatattttattttattttatgtttgttggcatcaagccaatgattaaatgccacgtatgaaacgcaacaacatttatcaaaaacattttttaattaagaatttacaattgtatatctgtgaaatagttaattaagatttttagtgaattcttaattctcaatattgtatatgaaacgcaacaatatttatcaaaactatccaaataaaaaagcctgagataattgttacagagaaactgaaactagttgagtttgttaagcatgggaataccatagggagagtacacttgtgcagccgaggcggaaacgtcttgctagaagtatgtctttgatgcttttgtcgaattgggtaaagaccatcgcagaagtaacagagacattatcatggtaccttatgtttttttctttccataacaagtagatagttgcttgtacagcaattcgcttcaagtttgaagagagattgggagtcgttgacagcagccaagaaataagagaggaccagtcggcaaagatacatggagattgacctagtcttctcatcatagaataccaaatctcctctgcaaagttgcagtgaagaaggagggatctctggattccacatcagtgttacaaactccacaaagaggagagatttgcattccccaatcatggagccttgatttaacaggaagcctatcaagattagcaatccaaaaggtgaaagcatgttttggaacagcattcttaaaccaaaccgtaggaacccaaggtttttcctcttcacgggacctgaagtagttccaagttaacttcattgagaattgtcggaagagaggttgtctacttcccaagtataagagtcatgactgctggccgaagtaggcaaaggtatactcaaaagattgtcaagctttgtcttagtaatcttgttctgtactagttgataggcttttgcttactgtggctttgtctacttttgtaatggctcatatatgaagtaacactcttgtcaaaaaaaaaaaaaaaaatacaattgttattcccaaccaaaatagaaacaaaattgttagatttctgaaaaataaaaccagcatttttttttatctattttattacacatatgacagatgtgttcgtgttgtgtagtttctttcagcaagacgaagccaaaagacatagtacaatggaattgactctaacatccgatcctgttgactttcataaatcagttggtttagttagctgtacggaacggagcagcatttgtgtagtatgcgtaaacccattcagcttccttggtgaagtttaggatcttcccaaacctttcaaagattcgtcaagaacacaacatttaacgttccaacatttaaggctcctttttcttttcttttttgcaatgttgtgaatgtgttaggaatgaagccatttgtctcaatctttctcagcggcattccaattgatatatagttttacttcctaattcattcattgattgtggcatttgtataaaacaaaaggtagtagcaatttacacacccaaaaaaagaaaaaaagatagtaccaaagcacaacacactaacgtaaaacctttttgagcggaataatggaagaaatgcacccacgaattccccttcaatagaggaataactaaaacatattgttaaaacagaacgtaataaactaaaagcaaattattttctgctttagaatactttggtttcattcaaccttgtggtattagtccagactagtagtcctcaaaaattttaaagtccaaaaacaaaaggatttttgaagtgtaatcaaattttatgaattataaaattttctcaacacttgttatatttatatactacatttaccataagatttcttacaccacacaaaatacaaaacattcagcaaagataatcccaccaagagccagtagtaatagtccaagtgtccctcgtctatattctctgtgatccagctcccgtaagtggtaacgtcaacgatggtgatgatccaggaggagatgaggcttgctgcggccatgttgagactggagagtgtggtggcgacgcttgacatggttttgggaagttctgagtagaagaactcgttctgtgctattgtattaagtgcttccgcaatgcctcctaatatcatgtacggtaatagccacatcgccgacaacttggtaccactctcgtctctctagtgaagtaatcaatcacaaacaaaataaaacagacgtatgagcttcacattacaaaaaaaaatgtaaaaaccaaacaagaatcgaacaataatccggattggatacttaccgctgtttttctcctcgcgtactccgtagccgcaagagcggagatgcacaaaaccgatattacatacccagcccacattctcaccataactcccaatcgaaagggttctcttagagcccaagaaagtaatgggacgataacaagatcgtaaagaccaaggaagagcaaaaaggagatgaccaagaaaatgccgtaagagcctggaggaatctcgaaaccctgaatgaaggtgtggcgatccatggtcttagcttgaaggactatgaaggagacttggcaagccgtgacaagtgacaagatgatccctgttgaccaaattggtatgacattgatgagagatttaagatcttctacttgttgcaccctacatagcttccatggattccttgagttccctgttagggctaggtcttgcttcgaattagttgtgacgcaagctttattcaaatacctatattagacaatatttatgcatcaggtttcgttacacaatcatatttttgggaacgaataatcaacaagaagagaaatactattgcaacttgcaactatatataccagcttaaaaaatccagttatagctaaatttgtatttagtaaaatatctttgaccatacaatttgatttacaaagacctatagaataaataatatacctcaatttctggctaggaattgaaaatgaagaccccgtttcgtgatgatacgatataatatgctcttccgatgacaaatcaacgtgtcggtttctgaaaccttacatagtacggagacgccgcgaagaacaaagcgaccgatagagccatggcagcgacagaaactccaaaaccgatctgccaaccatacgttgtctgaacgaagacgagcaaagactgagaaagaaagcatgcgaccatgacggagaagtagtaccagttgaagagcgtttctagggatgatgtggtgacacgtgatgtctgattaggttggagctggtcggcagcgaaggctaagcaggaggatctaacgccgccggcaccaatggcggtgagggcaaaaaaggaatatagaagaacacttttgagcagtgtggtgggttggcacacgtttgttaatttatcgcattctggtcgaattattgttgtcagccataacaaaaccattccctgttactcacaagcaatattaaattaaatacaactaataaagcaaaagttacataaataaaataatagccacggaaaatataggatgattacatattttttgaaaattctacaaatgattattattaatgtatagtataattacatgcatcattagaatatatagttatttgtttttttttatcaatgataatatggactaggacttttgcaacaattgtgttaagacgcaaggttctccagttttcatatataatttcttatctttctccaatttcatttcttgttctgattttgtgaggttatgacatcaaatatgtaccgtaaggctgatggaggatccaaacccgatcagaggaaaccgaccggtgtaagaatcagcgataaaagcaccaacaagagggaagaaattggtggcggcagaccagaggaaaaggatgttggccgcttccgctgttcccatgccgtattccaccgtcaagaagagtatcatgttcggtaccaaaccaaaatatgcaagtttctccaaagcctgacttgctatccaaaaccatttaattaccaagaattaaaaaaaaaatacgtaaatctatctatttttatgaatacggagtttatatcatatataagaatacaagaattgattatacctagaatgaaaggaatggtcggaataccgcgcttcagaagagttcttccgacgagaagagcttcttgatccattttcagtctctttctcttgaaggtttttttactcttggtggttttgataatatatgccttatgttatgacgttgttcccatgtcgcgatcagattagcgatcagaaaaatcattttaacgatatctaattgaaaacaaaagtaagtatcctacctaacctaaacaaggtccatggaaatatttttaaagttttattataaggaataagaaattaaagttttgttctcctttttcgtttgtttgcggcatgaatcttatagaaaagaactaagatatatgctttctccacgaaaatcataattttatttatttatccaacattcataggctcatttacgaataaagacttgagagaacaacgacacaataacagatttcttttcaaaatcatgtttactattttttcgttgaataaaactgtttactaaagactaattatgggtcggataatttattaatgggcctatttaaacttataggcccatgtaaataaagtagaaaacaggctacatcttgagtttgctgctaagactgagactgaagatattttaacttttttaagcacagagtgctgatgatcggtgaagccttattttagaaagcaactgaggacgaaccttatccgtcacagtggcaatggaggacaaatcaccgacgttactgatttctgaagatttatcccggaaaataatctctcttgccgccggtgaagctcatacaatcgctctgaccggtaaaataaaaagttccactgcttcaatttagtagatagagaaatgcgatattgagtttaattttgttctttggaatttatttgcaggcgatggatgtgtttactcatggggaagaggaatgtttggccgtctcggtacgggtaaggagtcggacgagcttgttccagttctagtcgagttcccaaatcaagcggaaggagatcggattcgaatcgttggtgttgctgctggtgcttatcacagtctcgctgtctcaggtggtttcttctattcatatgtctaatttcgcttttctattagcttgtgttgctgatttgaccatatgatttattttgagaaattggtgactgtgatgatcaaagattttgtttgatcaaattagttcctttgtttgcatctatgaacttccttttgagaaataataaatatgcttgaattgtgactataggttttactttgtatgtttatgatatggatctgtattgaccattctcttgccttttgtttcttttgccttgtaagcttttggcagatgatggctcggtttggtgttggggttacaacatttgtatcctttatctgagtgtttctagcttgatatgattgtttcataactacattttctagtgtcctgaactctccattggttgcttcaatccttgactggtaaatagatggccaacttggttttgatggggaaaactccttggcaccatgcttgatcaaaaatttgtttgaacgagaaacatctagttcttctctaaatgattcaggtagagaagttggatcagatttaaaggtatggtcctagaaatgcattcttaggtgttggtttacaagtaaaaaaaagtgtagcataatgattttcggtatgtcttgtaggtttgtactgtaaaggctggctccatgatgtctcttgccattgataatgtcggaggtctttggatgtggggcaatgttcctccacaagacagtgaacctgaccctcgtttgtcttttactagcatcccgattccatttcctatactcgacttccatggccggacggttttgaaggtagcatgtggggatgaacacgttgttgccctcgttggtcctggggatatccacaaagacaacagttatgatgtatccgtgctgtattcttggggaaataatcatcatggccagttaggacttggagatggagagagccgtgcaaggcctcagactgtggagacatttaaccagaagtcgggtcttacagtctacgacatagcttgtggtgctcatcacacagctcttctcacctacaggaaggagacacctaaaggaccaagcatttgctggacgttcggctttggagaaaatggtcagcttgggcatagaagtaacaagagctcatcgcttccagagccagtttcagatctcccagaacacgcttacttagtttctgtagactgtggattattccacacaagcgtggtgtcctctgagggatacgtgtggtcgtggggaatggaaagaggattaggattatgccccgatgtcaacttcacagaggtggaagcaggagatgatagtgtaccaagaaagatttcaggtgggtcgtcaagatttcgtgacccggttcaggtttcttgcggggctgcacatacagttcttgtggtagatggtggttacaagctgtggtcttggggaagaggaagaaatggagtgctcggaactgggaatgttagcgactgttatgtccctactctcgtcttctggccgaatgagctgaaacctgagaaagaagaagtacccgatgatggaaaaagcgcatcaactgaggagattaaacggctagaatcaaaactaatggtgatggaaagatatgcaagcatacttcatggatccatattcggaaaaccttttaatgaagaggaagatatcccatattcattacgggtttctgggtatttcgatatgggaaaagagtggggagagatgctggagagtgctgataagagtcagctgatgaggcttcaagctttctatgaagacatgattggtagagttaaggacaaggtgttgcagagaaggattcaggagattatgaaagattgtcttcagtcttcagcccctaaatactagtatcacttgttgcgtgctaatagcaataccttcacttgagctgacaatagtttcgtcttcaaattctgtgtgttttgtgcaaatgatgagataaaggatttggttttggtgttaaatgtattaatggccaagtattatgtcattttttctttcatagatttttatatcttgtacataatatccaaaatatgtgatgttactgttacatcaagattgtaggttcaaaccatctcttatatatgtgttgaaaatgttgtcatgaatatctaaaatcatgagtaactataataattaataaactcagatagataaataattaaataagacaggagagaacttatctttaaaaaacctaccaattactatggtttatatttcaaaactcactaaattattaaaaattacaaagtacttataagattcaaaaaggttatttaattaacatttgcaaaagaagggtctgagatcattaataggagttaaaaaattcccttaaaactttttattttggacaatttcaaaattaattttttcttgaaaaaataaattaaaattttattttgaggaagccctcgaaaataaaccaaacaaagaaaaaatccttatctagaatcagtccagaaatgatcttattttactttattgtttaaaaaattattggaactgtagtatcacatcatccaccaaccagtgcaggacaagaaaaaatcatctaacaaggcaacaaccattgcaatgtcctttcgtattaaattctccaatatataatgtcaatgtaatcattttattgccaactcactattaatgtaagtagaaatatatagaattcgaatttagatgctgagtttggaaaggattactatacgcgttttagaagttctttataattagtatggaaggaaggtctcaaattatatagttttttgtattttctagttaagagaaattaaacataattaatatctttagaagttggtatatatgtatattgctaatacctaatgacatgtttactcttcattatgcatttctcaagctatattcccctgtgggagaatagtacatcaataatgtattacttgtattaatactggggggaaaaacatacatttttttgctaaaaaaagaaagtgcgtcaatagataattaatctgaaatcattgaatacacttatatttacaaaagaaaaagtgctaactagttgacaaaataaaagtgttaactatggccatttgcattaactaaatataaattttaaataactttgctagctaactattatacgatttgatcatttagttaattatactagtaactgaaactaatatacggtacgcgtttttaaaaataaaataaattggctagatatatatgcaacagctgttgcaagattaatatatttgtgttattgtttgatttttcgtggttttttattttgggaaaaaaaaatatgtatctttcgtgatttttcgttgttttacatatgtacatcagtacattgcgtcgtagtctatattgtgattagatttacgtatattcatctgaattaatctaattcagacaagcgtatactaatccatatagtctagtgcgtcatagtatatatagaactttgttttttctaaaatgagtcatatatgaatatgttctatacaatttttattatatatctgaagcggcatgtctgttggataaaaaaaacccagaaaaaagggtcatgagacacaacttctatctcgattcgaaccacttaatacctgaatacagccacacacacaaattcaaatgtgttggacacacggaagcatatacgcaacgtatatttaatacattgatgtattattctttgttttattatctacattgtactagttttatattttaatttagttattaggtttttttttgttccattattttcttattattagttgttttactgtgccaatttcaacctaacagagggaggtgtactggtgccaattagcttgtgcacaaggaaatggtcggctgaaccatatatagctggagtctggagaggtgagctggctatctttagaatgccttgttggagcgaggaggcttcattccagaaattttacatattggtttgagtgttagatatattttaaattaggtggatataaataatagaaattaggatttaatactcttataagttttatttagaaattatgaagaatttaaaatttttgtattctagaaacaagatcaggtacgcctaaactctattcgatcattttttgtctcaaggtagctaaataacacggaatgcatttaagcagcttatgtggtttcattggttgatatcaagcgtctaaatcgatcagtttcaacaaatggttaagccatctaactagctgtttagatggttggacgagtgattaagccatttttttgctcaatcaaacggtctagatactcaaaacgttctaattcttatgcaaaataatttattaatatgcatatacctatgtattatctaatttattttgttagatattttctgctctatattaaattgtagaataagctaattaaagtgagcgcaactttggatagtagtagtattttataatctatataaattatatagccatgtagtgtaaattgtcaaatgtttattgtaattttcttttaaaatttatctttttcaacactattatatgattgtctatcaactattcgatacctataatcgcttagacattacacgttaaattactacctattgtctagcactttttgcatattataataatactcaacattactaaatcaagtagcactaacccaagatatttgtacaaaacaataattaaaagcatcctccttgaaatagcaaccggcaaaaaaaggttttccacaaagaatattgtcttttaaaaggcaatgctttgattaatacggacgtattagagtttataaaattgtatgttgctattgccatgggtctttgctgttctcattattgtcctctttttttttttttttgctttgtgatctttttacatatatacaataaaaaacattaattattatatgttaattcaacatacaataaaagtatatattcttcataatatatcaattttaatttgttaatacagaaagataatggacgaaaaagaagataatggacaaaagatttggagatataatggtacatgcacattcataagattctaaatgtatatttctatgtttttaggtaggatacaattgtctcaaacgttaaacttttggcgttcatatgttttaatagataagcaaatcacatttgcaatttaaaattctacataaattttatcattacaaagtaaacgcacattgcatttggcgtttgctgttatagtttacataaccggatgaatacgccaaataacatgcatggctgaccgaccgttaaatcagttttctagcctaatatttattagtttattctaatgatttatatatgtaaattcaactctaattaatggtcaccgtcaattaaattagtccactaaacgtgattaacctgccgacttacttgatccgtagatatttagaccaaagcatattagtggagaatttcaagtggttcagataccctttaatttttcagcatttgtaaagtcatttttgacgattttggtcgaaatctaaaaataaagtactaaaggagtcaataattccttttccgtttttggagtttagcatagtcccatcattagacacagataaatttgatttaagaatttcaatacctcacaaaagatatgcaagaaagttatgtcggatccactctagatttgcgtggtatactgtcgttaataaaacctaatgaattaatttaattattcgttaatagttagtggggaatatataggtaggggctacgtttcgtggatataaaatccaatgaaaccgtcaagttattatgaaccaaaatcaactcaatctgacattgatcgaatcatattaaactaggtgaagggatggtctacactaacttagtactaattttctttagcagtctagttttaagttaggttaagggatggtcctgaactaatctgatatttagtgaggtgtttaaatagaaaacatatatcggtttgcttgtacgagtcaggttacctcttttgaatatattccctgattacgaagaattatctcactcggggtcggaactctgattgctgagtcaaatttttatatagttgtatattttgttcatgcttttactattgatcatagatttgctaaaagaacgtggaattaagcgctgctaaaatccattaatccgttaataatatccaccagaaaaaaaaaaaaagatactatataaaaggcaatgtaaacatgaaacagctagagagaaaaaaaaacacgtaacaactaattaactgttatacaatgtcattttttcactctatacattgactaaaaaaatggaatattatatataaaaatcatgatatataattaacagataagaatatgaatcattgttccatgtcccaccctctcgtaagaaagtcttaaggtgtaaatccaaaatctttaatatgttttaaacggtgtcagtgacatcattactgtatttgtttggtaaatggtaacaacagtctctatctttatctttaaccagaaaaagacactagtctttatcctggacgaagcttgtcgttgtatatcttattataaacaagatatcatgttgtaatctacaaaaacttttggagtttgcaaactattagacacattttacattttattaaagagatcagcataattgatatgtaacctcaagtagcataacaatgactaagacagtttaatttcatggatattccactttagaccaagtagtttatggatcatcacatctctttttcatgattataattatcctaaaaacgagatgttggaagttaaaaagatatgcctgtgacaggactaaatatgtcatattatgatcattcgtcattcttgtcatatagattcaaataaatattaagctagcctacatttattttaggggtaattactttttcgtgtcaactagttccttttagttttttaagctacatttacatttcgtctttcgaaaataacattctcattttgctttaacagaattacccttgaattaatttgtctttttaaacattggacgttaaaaaataaaaatgtcgatggatgctgttcacatttgtagagtaataattaacggacattctcagttcgaaaacttttaacaaactttcaacacttttcaaaatttcttgtttattattgtagtatatatttccaataatatcactataaactttagttctttagaaactttttcagtaagttttatttctttcacacgtttttagaaactttaaactttcataagtttctcatgtaaaacattgcaagtcgttttcatcattcagtgatagttttcaattttttttgtgtgaataaaaaaataaatctaaatcttagatgacaaaatctaaactctagctccaaatgatcatcttatatcttgagaacaaaaaaaatcataaaccctaataccaaaatcttaaatcctatttagcttcttaatttaagcacaagcaaatagtgacgccacaacggtggtggtacgacaaaagttcggctataaagaaaattggatgtggagacataaaatgaagagaggaggaactccctttagggatccaagttatatgtggaaattaaatagatgctcattcattttaatattaatctatttcttgatatatacattcttttttatttgatgatcattatgaaattttgataaattagtctttaatcttaacatatcgtagaataagaacacaaacaaaaaaaagtcatctgtggagctggctaatcagatctgaatttatcataagcctttctctttttaattctaaaatagaacgagttgtatgatatttgtgtggcctatattgtctaacaaattttttaaagtgggaaattatggtcattaacatactaatagatgataataaagtattgcatggatgtacatatgtggctgtgtattgtttgcgtcagcttggacaagttgctcttgctttgtgttttccctcattttttaccctaactcacattctccgttccatttatgtcgacaaaacaaaaatgaatgggatagtgagactctaatttacaattaatggttaaagatatttcctataattttaaaaaaaaaactttttttgtcaaagaaaacaaaaacaaaaacattgaacagttttttaaattttgatgatttgcattattacaatatcataaagttagtggacttttatttatcgcttattcatttgatgatacttacaaaaaaatcactttattttcccttcttttccgacaaaaaaacccgatatttatatattacaaaaaaaaaacacaaatagagttttgtacacgtatcattatggagctcacacccgctccaaaaaaaaaaaaaaaaaaaacctttcttagctaacaccaaaaaactcaaaaaaaaaacaaaaacagcaaagggttttaaaaacgtgattaaacaaaacattatggcaatgatacaaaataaactgttttaaacaaaacattatggtaatgatacaaaataaactgttagagatcccatgacaagccatggccaaaattagggctaattccgtgaccatagttatcttcggacgactgtccccacggcggcggatataaacagtagtcaactgagtcatagaagacaaactcgttcccaaggttagccgagtcgacgtcgtaactcgccccgagacttggaagctccacaatctcaccgagctcctccgactcagtcctcgagaggtccatcaccaacacaagagactcgagcgaagacgtagaagacaaagacgacgacgaagacgtggaagatgaaaacgacgtcgtcggttccatgtgagctgctttaagagctgctgtctgaatgtctcgagggcttaatgaaacgggtcgagggaatgagtcagcgagttcagggaagtttagtatagcggccgttcctttaatgctcagagccgccacgtcgtgtgcacgcgccgccatctccggcgtcgggaaagttcccagccaaatacgtgatttcttcctcggctcacgaatctccgacacccattttccccagttcctcatccttactccgcgataaacagggtgtttaccggagtctctcccacgtttagtcttcttctcgctttgctcagctttgcttttgtcactcactgagtcagactccgagttagggacaagaagctgagttactctctccgagcggaggctgtagtattcctctgccattgtgttagcttaggcacaagtatcgtacaagtctattattctgattgcttttttcgattcggatcccgagattaatgcaaataaaaagaaatagctaggcttcagggggaaaaatatataagtttgagaactattcaaaatgaggaaaaaaaacagggcagtgaagtgtgatgaagaaatgagagagaaactttgatatgagaagagaaaaatgttggtaaaattttggctatcatttctcagtcactcaaaatatttatatatgcattaatatatttgggtacgggttagaagagagggaatgggaccaaaaacaatgcaataagtctaattgaataaaggaaatggacccagtggctccatttatttttgtttttctcacagacccactctatttctatattgtgaatatattgttattagtataaaacgacacacttggggtcactgtttgctttaatatttttcccggttcttaaaatctcattatgcaactaaattaggaaaacaaaatacttttcagtatattaaaagattatgagacgaccatatttagaagggcagtgttgaaaagagattttgtctcggccgggtacgtaaattatatgaaagttgtctccgagatgaacatgatgagacaagccttttttgttttgtgtggtaagataattttcacctcagttttactgtttaattatcctttaccttgatcttcgactcattggatcatacattcctatttacatattggtatatatatatgctcatcatgtgaaggcaatatgtatccacatatatgatatgccataattgcaatttagttttgatcagaattaatatacatattatttacacggatatagagttattgtctttcaaattttgattttctataaacatattatatgaatgtcaacagtttttgaagatttattcaggaaatttttttagtaagtatcatatgtttactttagttatatatatcgagggctaattaaaggaacttgtcttaaccaataaaccatatgcttcgaggctaaattttaaattttggagaaatttgtaactgagtgttttttttcgagacaccaaatggtgtgtgattaattgcacaatttgtactgatttcatttgagaggatattttatacttagacttgaaaaggtgtactaaagggggtttaaccgtaagtaaattgataattaatacctctgtcctggtcttagaaaatatatgggcgtaagacccataaaagaaagaaatctaccagccaattgatattaattaggttaaagttgcttccaaactaaaaaaaaaagcccccaaaattagaggtacaatattgcaaataaagaaaagaagtttgtagaggaaacttcaagaaattttaagggacaataacttgttcaatcatggggtcgtatttgcgtacctataaggaaggacgagtgtctgtcaaatatacacatacactaaagtcttttaataatcatgccaaaaaaatgtctcttaatgacgaaaaaataatgtctcttaataatcattttggatttttcacaagtaatagcaatgtctaagtacttgcaatgaagagaattgtttgtattttcgcctctcgtttcagcaatacgtatatgcattttatattgatcatatacgtaatactaattaacaataatattgatcatcttaagtttactaaaaaaaaaaaaaaactggtcaacaaaggttttagagtttacaagtttctaattcaaaaattattgacatgaatatattgactcttgctttatatttatcctagttaaacagattttatgtgagattcttacaagtctatttaagacgagaacgaaaatagtttaattgttttgaaaatattgttagaacacgagaacagtttatgaaatcaatcggattacaaaaccattaaataattttgaaacctctatttaaaagtcaaaactaactagtaatgaatgaaaaaatagaaaaaaagaaaaattattcactatatttcaaaatataagatgttttaattaaaaaagaacttttttttatttttaaaacctttattttatatttgatttaataaaattcaactaataatataaaatactgcataatataaatggtcacaaataacaaatatatttaaattatctataaacttggaaaacatcttgtaatatgaaaccaaataaaatgtctaaaacatcttagattttatcagctataaaggatttaatttttttttgggtaaggatctttaaaggattttaattatgctatttgccttcgtatccgttattccattttacaagattgttcaagcttctttttactcatttcagacactgaccattaatgaagaccttcgcaataaacgaagcagacccacttgtaaatagaggggaaaaaacatctttatgtaatttactttattttatttttggtcaattttatttgtgtttatttaggcagacaaaaccaaatatctatatcttccgactatggttttattaggcaaaataaaataaaataaaatacagagactataaaggcgattttttttcaaagggtccaaaataagccttttggaaatagaacttttcatcttcttcttctttcttttttatacaggaaagagacatgttcttggtttgtgttctcgtcatttggtaagattttagagatatatagtacggtcaaagaacgttaaataaaaagaaaaggggtcaaagaacgttaacaaacaaacattatagggtctgagttcaattattatacaatctctggtattttcttacgattttgtgaactcttttttttttttttttttttaacgattttgtcataatttgtattggatagatctgtgatggaattttatttagttttacagaaaatcaagccaagtctgttaaacaaattttttctcaatttttgaatattaaatttttcaactgcaacatttttttacaaaatgtacactgatattttcccatttattttaccacctcacatcattttttttttttttttttacgtttctgataaggcataataatattttgtaagtttcttacagtttatttcacccgtttctatcacgtaagttgtcctatcgttagaccatcccaactacaaaaactaaagtgatagtagatggaatactaattagacttgaggtggcttaattaattttacggaggtatacattgtgttgttttcagacgaaaacacatttatattgaagttagagaatatacatatatatgctctccagattcttctctgacgaataagcatagaattaaattgaagttaatatcatatggtgtgtagttttattccctattcaacatatatatgtatcactatcttgtgtatgttccattgagagacaaaaattgacagacagagaaaaataagacacgtcgagatgtaggacatttactcttaacatgtttttgctttagagagtatagtactagtcaacgaaacacgcaaatgattgtcattatgacccataaaaatcttgaattgctaaaagtattctaattaatcaaatattggtcgatgaaacatggaaaacgatattaatctgcttcgctatctttgttgatttaacaacgtaatatatgctgatgaaaaatacaaaaacgtacggtatcagttaattagttcaaaacccctctttgtatcattgcggtcgttatcgtatcatattttggattcgaccttgataatacgtgtcagctatttcattttagattgggactgacaaaaataattaagaatcatgactcgttgtcatgaagattttacataaatttaagattttattggttttagaataaatgaatttagtataatgtacaaatttgttgaaaaatctaaaacaccgacacgactgtgtgatggagataataggaacattagcccgaatacgacgattatacgaccaattgtcacgcgagcttagcaatattggttaattcagatgaattagcacgaaattatttgataagtaaaatcaaaatcaagtgcacgcagttacgaatcttggtggtcaattaaataacggaatacataagatatttttcatttactctacagaaaattatacactcatgattccctataatggaagagaaaaacagtcgacaaaaaaaataacctacatcatatacactcacatcagtattatagaaagtcatattattgggattgacgatgtatgagtaatcgtttgattgctactatttattttaagattgttgatagataagtgtgaccagtcttaaaaaagactgtgaccactctagggaattcatttcattaccgttataaaaatcatttaataagattagacctttcgatgtattagatgattcttcaattacctttttctaatccatgacacacatatataactatgacaggttaaaatgatgaaaagttagaaatcataagattgtgtaagagacggacaaaacatacaaagaaaacatgatcctgactcaaaaagtacatcaaatatcaacagtcaaaattcaccatcaccatttattgttgcccacttctagttttttttctttcatttacacccaatttttcggcagagaaaacaaatcattattgaaagaagatattcagggaaattgaagaaggtcttgactattgagtgcctgactatttcgacagcttcagtcctgctgctagtttgtcacatgcaattgcttgtttcatgatatagtagccgcacagtgactttgatcaatattttccaaaaagttgtttttagaggcacacaattaaaatcttctgaattttatattggtagatgacattttcggctgtgtaatagaatttgtttctaagtcgtttaagagaaacaaatggttagagattaggatggtttgaatatgaatatattaactaaaactgaatatttcttgaaaaaattaaccaaacaaattttcaaaagtttagctcctaattaagaaaagagatggcgaaagaaacattaaacatatagattctgtaatcttgtgagatgaaacttgtcaggaaaagtgatgctgtgttcatgaaagatcaaatgattaaggatataaaaaaactatggaagactcatagatatgaaaatttgatcaattcaaaagttatactattcatgctttactaaaactttatactgaactattgtgtcatggtacatcctcaatcatgaacaacattttgagcatatacagcaacgatctctgagcactttattcgattttttcctaataacaagtttgtatggtttacactttccttctcttgtggcttaggatgaaatcatcatcatcatcgtcatcatcatcgacgactttcttcttctttctcgcatctaaaccgttgttcttggatgcagatgttctttgagaactctccgctttactagaaaacgttggtgccgatttactcggtgtccccattcgaatttgcttcatttttctctgctttttctcaaaggctcgcttcgccttttcgggagacaacataccatgttccataagcctgattcaacacatttataaccattcaagttttagctataaatgagccaagacaatgtactagaagttcatcataatgacttgtcaatagtgtttttctcaccagaactcagccatttcactcccaggtatttgtttcgacaaggattcatagaatatcctcaagggctctctctgcaaaatgcaaaagacagataaaccaagaatcaagagcatgatcataaaacagagatctaataaagcaatcattaaagatgtctaataacctcttcaggaggatcaaacttttgtccagctaatgaataaaccttcttctctcttttcgctttccctttcaccaagcttactgttgcagatgttgttttcgctttcaccaagctcactactgtagatgttgtttgcgctttccctttcaccaagctcgctgctgcagatgttgttgctatggttttcactgaatttataggtactttgggctttgccttcacaaaagttttgcagaaaatatgttacaagttcgacctagaaaccaaaatatccgaaaaccacgtcatgatgaaaacttcgatctacaacgaatccgagtcttaacaataaaattttccacagaagttttatctaacaatgaacaatctacaattcgatgcactcctttagagctagatcggctttaatccttaaggaatttataaaaatcagagaacccaaatcagaaacttgcgatcaaaaactttaacacaagagttttcccgattgatacctcggatttcgccgtgacggtagaaacagaggatctgggtttagaatccgacatgatcggtctgctagaggtcgcgatcttctttttgtccttaatagacggatcgatcttgactctggaagaaagagaagaagacgcatcgcgtggctcgctcttagctgaactaggtctctcctgtgtcgccatgaaaaagctcagattaacctgaagttcagctcaactactttttctgcttgaaaaatccgacaatgattccttgagcaaagagagatgcaatcttccgattaagtcttgccgctttcctagttatgtaatgaaacggtaaaaactggaaagttaaaaacgaacgatttgcggttaccatattaacggtaatttaaaaatttacacgaggaataataaacactcaccaattggaggttttacaccttttttttacaaagttgtaaaaatttgttgaatgatgaatcttttaaaagaaataagtatataattgtggtaatcaataaaagtaaccagattattttcttaattttgaaatactttgattaaatactaatttttaacctttgaaaaagttttacaagttcattaacttaacaatggatctatttgtaatcaagtccaattggctaatatgaatcagtaatctacaaaatacaatcttccggagacgtagttaattattggcaagtagcaaaggccaaaccaaaacccttgtcaaacctaattaatctggctaaaacgtttgaaaaactcggttataccaaaccgaatgaagaatcatatgaaatatatcataccgaaccggttcaccatcatgccacatgaaatgtttttgaaccttcaaaaccctcttttgcatctccacgtatctcctcaccggaatcgatatcagaatcttccttagattcgggatctctttctccggcacaaacactgcgaaagattcccaattcagaatctcaagaaacggtggcacaaagttatcagagataatcaccggaacacaaccgtacaaaatcgactcaaccactctagggctattaacctcgtaacctttagcgcaaacgcagaatctgctgcgtttcatgtaacggatgtatgatttatgatcgatacgattaaagatcttcatatcttgttcaggtctcgatgaccattggttaagcaagatgggtctaacgtaaccgtgcaagctcccggcgaaaaaagcgaggatggttcgcttggaagggcggctacctccaatttttccgtttggattttgcaaagaagagactttagtttccggcaaagaaacatcttttccgaccacaaagtctatgccaacatcggcgttacagagtgctctgatgcagtttatgtacggtcccctagtctcggttggagcctataacaaatgtgaaattatttttttcttaaaatctcattaagaaattttcttttagttttttttttcttccatttttcataaaatatgtattaaaatggatgcaaactagatgcaaacaaggctagagtacaaatgatgctaacatttatatatgatcaacaaatgaattttgttagagtacttaaattatggttttatttgaaagatacactttattctagcttgtaaaaccaaacaaaaactatataggtttttaaagcacatacccagtcatggcaagcggtgaagaaatgatcggagccacaagttctattccaggaagggtagttggaagcgatgagatcaatgtagtttccaagatatttaacaagattattacgactgtgagagtcatgaacgtaaagtttctgttgaagaattcttgaactgaaaggtatgtagaataaatgagctttggtgggatcttttgtcaagaatctatggctactctccattagtttcataaaccatccttctgatgcgtaaatcccttccattattgcctcaggctgatggaaaattggtctatccccttccgagtagacatacactttcagagtttgttccattagctcatagctcctgcaagagatggatcatttataaccaattgtgtttttctcttttttagtaaaaaacatgcattattcggaattgaatttgggtagcgacaaatcaacggtactaacacaaaaagtgtttgtttcaaatttaaatattgtttgcacttgcatcatgttttttttttttttgtcaaaaacacttgcatcatgtagttccacatattttgtaagaaaacacaattttcatgattattgtttccgtttcaaacgaccaccaataataaacactaaaatatggtgttctcttttgaaaataaaacactagaattagacctttgctattctctgtccttattatatatgtattgctagattggttaatatagatgttagaccttttgaagatggatatgttgtggtagagaggtgcgtaaagagtatcatctttcttgaccaaagccgctttcttgatcttgtctcttgcagttttaagctcttggtccacttttgatccccagagaggtgcctatgaacatgaaaaatgtagaaaacagggaatgaacgagtgtcgatgagtaataaggatttagaacttgcggtaaaaacttaataacatttgcatacaagtgaattttttggatcattatgccgcttcaatatcatattgttcatctgctttattgatatgacaattgatggtggctttgttatgctcctatggggatatttcttgcggatttgaggaatctttggttgaagaggatgcagagaacttgcagtttcattgcttcttctacgttgtccagaagcttctattttgtgagaatcattcagaaacttgtgctcagaactcttcaatacctctgtagttctgttatacggtttaagcccggtggatgcttcttgagatgcaagaaacgtttcattttcagcacttttagtcgtatcattggattttctgaattcagaaatagtgctgtttccaggtgaaacaatagatagtagtactggagagagctcaaaatactgaaggcctgaaacgaaggcaacaaccagaaccatgagaagaacaactctacaggtttccacttggcctataaaccgcaaaacccgactttgatccatcaaaacctggaaacaaattattaccttagatttccagtgatataaatgtatctcttcttcctgaaataagttgcagaaacagaacttgatcacttacagagatatcaggtaagagcttgagatgatgtttgttgatatatagaactgtcgaatctgagcgtttctttgaagttacttggagtgatcatcaggagaggaagattcagacaaataattaacaggcaaagagacaagacaaggcaatcgatggctttaaattttgttcaatcaaagtcttgactaattatgtatttttgtagatattttgtattggactgataagccaacaaggtatgataataacttttctcaaattatcagaagacaccccttaattatctatgtttgatcaattatgacccatagttttatttttttaagagcagcctctgttttttttttcctactattatttttgcaacatttaaaccatacctatgaacctataataatatatatattaagagcatctccatcgggagtttctggatcagaatgtctattaaaacagaataaaaaattcgaaaaaggtggagagagagtaaaaacgtttctcatttgagaaactcaaagaaacctatttttgcttttgttttgttttgattggttcaaaaaataataaaaaaattaaataataaaataataataaaatttatattattttataaaattgggtttctcaccgatggagatggtctaaccactctgttaacaaagtactaaactttgttagtggttaagttgacctgattagtatacattatatctgaatgtagtaactacacaatccaagaaaaacaatgaatgtataatttaacgttcgatatgtatatatgaatttcagtgtcagcgtttgcgtcccgcactctcctctgcaacgtgatccaagcatcggaagttgcgaatttctgtgtttcccacaagagaaattaaatcctcagcatcatggtttttttttttgtaaatttaatattcttgtattagtataaaaatattgttgttgttaaatgtacagtaccttgtttaaaattatagtattaacaattaatcaatcacataacaatcaatcctttaattaacatcctcaacatggccgttggctcgtgccaaccccatcctccacttcctcatcaacgtaaggagctaaattcaaataacaattaccgtggcagttctcgttattatcaccaacattaggattcttactcgatctatttgctggccaccgtgcacggcataccacacagatggccggccgccgtccacgactctttctccacgccagcatgcattcatcatgaaccttgttcttgcatactctgcacttcaccaccgcggtttccttctccttccctccaccatttccaccgtctacgttttctattgcgataatatcgtctagacatattggacatgttgccggctcttcatccacctcattttcctattcaatataacaaatgatatatgcatgtaagatctatttatatcccctaaaagtaaagtaaaattttatttaaaacattggttatttaggagtatttgtttagcggtgtaaaacaatacatgtagtttagatatatttttatgtaaaacgacgtaataaatttttttaacaaccatttcccattacaacgacgacaattatattcgtacagggtaaaagaagattaccattttactggtggaggaggatgagttagtagtatagccgggttgagaagtggtggctgggaaaagctgaagaaaccgttgttggaggcggaaactggcgaggcagtcaggccgtgtcggggcagagaagaggtggaagaggaggcatgtccggagtctccgttgcctgagacacttatcgtcgagaggaattc

SEQ ID NO: 1423 - DNA, 93205 bp, Arabidopsis thaliana
aagctttctatgaagacatgattggtagagttaaggacaaggtgttgcagagaaggattcaggagattatgaaagattgtcttcagtcttcagcccctaaatactagtatcacttgttgcgtgctaatagcaataccttcacttgagctgacaatagtttcgtcttcaaattctgtgtgttttgtgcaaatgatgagataaaggatttggttttggtgttaaatgtattaatggccaagtattatgtcattttttctttcatagatttttatatcttgtacataatatccaaaatatgtgatgttactgttacatcaagattgtaggttcaaaccatctcttatatatgtgttgaaaatgttgtcatgaatatctaaaatcatgagtaactataataattaataaactcagatagataaataattaaataagacaggagagaacttatctttaaaaaacctaccaattactatggtttatatttcaaaactcactaaattattaaaaattacaaagtacttataagattcaaaaaggttatttaattaacatttgcaaaagaagggtctgagatcattaataggagttaaaaaattcccttaaaactttttattttggacaatttcaaaattaattttttcttgaaaaaataaattaaaattttattttgaggaagccctcgaaaataaaccaaacaaagaaaaaatccttatctagaatcagtccagaaatgatcttattttactttattgtttaaaaaattattggaactgtagtatcacatcatccaccaaccagtgcaggacaagaaaaaatcatctaacaaggcaacaaccattgcaatgtcctttcgtattaaattctccaatatataatgtcaatgtaatcattttattgccaactcactattaatgtaagtagaaatatatagaattcgaatttagatgctgagtttggaaaggattactatacgcgttttagaagttctttataattagtatggaaggaaggtctcaaattatatagttttttgtattttctagttaagagaaattaaacataattaatatctttagaagttggtatatatgtatattgctaatacctaatgacatgtttactcttcattatgcatttctcaagctatattcccctgtgggagaatagtacatcaataatgtattacttgtattaatactggggggaaaaacatacatttttttgctaaaaaaagaaagtgcgtcaatagataattaatctgaaatcattgaatacacttatatttacaaaagaaaaagtgctaactagttgacaaaataaaagtgttaactatggccatttgcattaactaaatataaattttaaataactttgctagctaactattatacgatttgatcatttagttaattatactagtaactgaaactaatatacggtacgcgtttttaaaaataaaataaattggctagatatatatgcaacagctgttgcaagattaatatatttgtgttattgtttgatttttcgtggttttttattttgggaaaaaaaaatatgtatctttcgtgatttttcgttgttttacatatgtacatcagtacattgcgtcgtagtctatattgtgattagatttacgtatattcatctgaattaatctaattcagacaagcgtatactaatccatatagtctagtgcgtcatagtatatatagaactttgttttttctaaaatgagtcatatatgaatatgttctatacaatttttattatatatctgaagcggcatgtctgttggataaaaaaaacccagaaaaaagggtcatgagacacaacttctatctcgattcgaaccacttaatacctgaatacagccacacacacaaattcaaatgtgttggacacacggaagcatatacgcaacgtatatttaatacattgatgtattattctttgttttattatctacattgtactagttttatattttaatttagttattaggtttttttttgttccattattttcttattattagttgttttactgtgccaatttcaacctaacagagggaggtgtactggtgccaattagcttgtgcacaaggaaatggtcggctgaaccatatatagctggagtctggagaggtgagctggctatctttagaatgccttgttggagcgaggaggcttcattccagaaattttacatattggtttgagtgttagatatattttaaattaggtggatataaataatagaaattaggatttaatactcttataagttttatttagaaattatgaagaatttaaaatttttgtattctagaaacaagatcaggtacgcctaaactctattcgatcattttttgtctcaaggtagctaaataacacggaatgcatttaagcagcttatgtggtttcattggttgatatcaagcgtctaaatcgatcagtttcaacaaatggttaagccatctaactagctgtttagatggttggacgagtgattaagccatttttttgctcaatcaaacggtctagatactcaaaacgttctaattcttatgcaaaataatttattaatatgcatatacctatgtattatctaatttattttgttagatattttctgctctatattaaattgtagaataagctaattaaagtgagcgcaactttggatagtagtagtattttataatctatataaattatatagccatgtagtgtaaattgtcaaatgtttattgtaattttcttttaaaatttatctttttcaacactattatatgattgtctatcaactattcgatacctataatcgcttagacattacacgttaaattactacctattgtctagcactttttgcatattataataatactcaacattactaaatcaagtagcactaacccaagatatttgtacaaaacaataattaaaagcatcctccttgaaatagcaaccggcaaaaaaaggttttccacaaagaatattgtcttttaaaaggcaatgctttgattaatacggacgtattagagtttataaaattgtatgttgctattgccatgggtctttgctgttctcattattgtcctctttttttttttttttgctttgtgatctttttacatatatacaataaaaaacattaattattatatgttaattcaacatacaataaaagtatatattcttcataatatatcaattttaatttgttaatacagaaagataatggacgaaaaagaagataatggacaaaagatttggagatataatggtacatgcacattcataagattctaaatgtatatttctatgtttttaggtaggatacaattgtctcaaacgttaaacttttggcgttcatatgttttaatagataagcaaatcacatttgcaatttaaaattctacataaattttatcattacaaagtaaacgcacattgcatttggcgtttgctgttatagtttacataaccggatgaatacgccaaataacatgcatggctgaccgaccgttaaatcagttttctagcctaatatttattagtttattctaatgatttatatatgtaaattcaactctaattaatggtcaccgtcaattaaattagtccactaaacgtgattaacctgccgacttacttgatccgtagatatttagaccaaagcatattagtggagaatttcaagtggttcagataccctttaatttttcagcatttgtaaagtcatttttgacgattttggtcgaaatctaaaaataaagtactaaaggagtcaataattccttttccgtttttggagtttagcatagtcccatcattagacacagataaatttgatttaagaatttcaatacctcacaaaagatatgcaagaaagttatgtcggatccactctagatttgcgtggtatactgtcgttaataaaacctaatgaattaatttaattattcgttaatagttagtggggaatatataggtaggggctacgtttcgtggatataaaatccaatgaaaccgtcaagttattatgaaccaaaatcaactcaatctgacattgatcgaatcatattaaactaggtgaagggatggtctacactaacttagtactaattttctttagcagtctagttttaagttaggttaagggatggtcctgaactaatctgatatttagtgaggtgtttaaatagaaaacatatatcggtttgcttgtacgagtcaggttacctcttttgaatatattccctgattacgaagaattatctcactcggggtcggaactctgattgctgagtcaaatttttatatagttgtatattttgttcatgcttttactattgatcatagatttgctaaaagaacgtggaattaagcgctgctaaaatccattaatccgttaataatatccaccagaaaaaaaaaaaaagatactatataaaaggcaatgtaaacatgaaacagctagagagaaaaaaaaacacgtaacaactaattaactgttatacaatgtcattttttcactctatacattgactaaaaaaatggaatattatatataaaaatcatgatatataattaacagataagaatatgaatcattgttccatgtcccaccctctcgtaagaaagtcttaaggtgtaaatccaaaatctttaatatgttttaaacggtgtcagtgacatcattactgtatttgtttggtaaatggtaacaacagtctctatctttatctttaaccagaaaaagacactagtctttatcctggacgaagcttgtcgttgtatatcttattataaacaagatatcatgttgtaatctacaaaaacttttggagtttgcaaactattagacacattttacattttattaaagagatcagcataattgatatgtaacctcaagtagcataacaatgactaagacagtttaatttcatggatattccactttagaccaagtagtttatggatcatcacatctctttttcatgattataattatcctaaaaacgagatgttggaagttaaaaagatatgcctgtgacaggactaaatatgtcatattatgatcattcgtcattcttgtcatatagattcaaataaatattaagctagcctacatttattttaggggtaattactttttcgtgtcaactagttccttttagttttttaagctacatttacatttcgtctttcgaaaataacattctcattttgctttaacagaattacccttgaattaatttgtctttttaaacattggacgttaaaaaataaaaatgtcgatggatgctgttcacatttgtagagtaataattaacggacattctcagttcgaaaacttttaacaaactttcaacacttttcaaaatttcttgtttattattgtagtatatatttccaataatatcactataaactttagttctttagaaactttttcagtaagttttatttctttcacacgtttttagaaactttaaactttcataagtttctcatgtaaaacattgcaagtcgttttcatcattcagtgatagttttcaattttttttgtgtgaataaaaaaataaatctaaatcttagatgacaaaatctaaactctagctccaaatgatcatcttatatcttgagaacaaaaaaaatcataaaccctaataccaaaatcttaaatcctatttagcttcttaatttaagcacaagcaaatagtgacgccacaacggtggtggtacgacaaaagttcggctataaagaaaattggatgtggagacataaaatgaagagaggaggaactccctttagggatccaagttatatgtggaaattaaatagatgctcattcattttaatattaatctatttcttgatatatacattcttttttatttgatgatcattatgaaattttgataaattagtctttaatcttaacatatcgtagaataagaacacaaacaaaaaaaagtcatctgtggagctggctaatcagatctgaatttatcataagcctttctctttttaattctaaaatagaacgagttgtatgatatttgtgtggcctatattgtctaacaaattttttaaagtgggaaattatggtcattaacatactaatagatgataataaagtattgcatggatgtacatatgtggctgtgtattgtttgcgtcagcttggacaagttgctcttgctttgtgttttccctcattttttaccctaactcacattctccgttccatttatgtcgacaaaacaaaaatgaatgggatagtgagactctaatttacaattaatggttaaagatatttcctataattttaaaaaaaaaactttttttgtcaaagaaaacaaaaacaaaaacattgaacagttttttaaattttgatgatttgcattattacaatatcataaagttagtggacttttatttatcgcttattcatttgatgatacttacaaaaaaatcactttattttcccttcttttccgacaaaaaaacccgatatttatatattacaaaaaaaaaacacaaatagagttttgtacacgtatcattatggagctcacacccgctccaaaaaaaaaaaaaaaaaaaacctttcttagctaacaccaaaaaactcaaaaaaaaaacaaaaacagcaaagggttttaaaaacgtgattaaacaaaacattatggcaatgatacaaaataaactgttttaaacaaaacattatggtaatgatacaaaataaactgttagagatcccatgacaagccatggccaaaattagggctaattccgtgaccatagttatcttcggacgactgtccccacggcggcggatataaacagtagtcaactgagtcatagaagacaaactcgttcccaaggttagccgagtcgacgtcgtaactcgccccgagacttggaagctccacaatctcaccgagctcctccgactcagtcctcgagaggtccatcaccaacacaagagactcgagcgaagacgtagaagacaaagacgacgacgaagacgtggaagatgaaaacgacgtcgtcggttccatgtgagctgctttaagagctgctgtctgaatgtctcgagggcttaatgaaacgggtcgagggaatgagtcagcgagttcagggaagtttagtatagcggccgttcctttaatgctcagagccgccacgtcgtgtgcacgcgccgccatctccggcgtcgggaaagttcccagccaaatacgtgatttcttcctcggctcacgaatctccgacacccattttccccagttcctcatccttactccgcgataaacagggtgtttaccggagtctctcccacgtttagtcttcttctcgctttgctcagctttgcttttgtcactcactgagtcagactccgagttagggacaagaagctgagttactctctccgagcggaggctgtagtattcctctgccattgtgttagcttaggcacaagtatcgtacaagtctattattctgattgcttttttcgattcggatcccgagattaatgcaaataaaaagaaatagctaggcttcagggggaaaaatatataagtttgagaactattcaaaatgaggaaaaaaaacagggcagtgaagtgtgatgaagaaatgagagagaaactttgatatgagaagagaaaaatgttggtaaaattttggctatcatttctcagtcactcaaaatatttatatatgcattaatatatttgggtacgggttagaagagagggaatgggaccaaaaacaatgcaataagtctaattgaataaaggaaatggacccagtggctccatttatttttgtttttctcacagacccactctatttctatattgtgaatatattgttattagtataaaacgacacacttggggtcactgtttgctttaatatttttcccggttcttaaaatctcattatgcaactaaattaggaaaacaaaatacttttcagtatattaaaagattatgagacgaccatatttagaagggcagtgttgaaaagagattttgtctcggccgggtacgtaaattatatgaaagttgtctccgagatgaacatgatgagacaagccttttttgttttgtgtggtaagataattttcacctcagttttactgtttaattatcctttaccttgatcttcgactcattggatcatacattcctatttacatattggtatatatatatgctcatcatgtgaaggcaatatgtatccacatatatgatatgccataattgcaatttagttttgatcagaattaatatacatattatttacacggatatagagttattgtctttcaaattttgattttctataaacatattatatgaatgtcaacagtttttgaagatttattcaggaaatttttttagtaagtatcatatgtttactttagttatatatatcgagggctaattaaaggaacttgtcttaaccaataaaccatatgcttcgaggctaaattttaaattttggagaaatttgtaactgagtgttttttttcgagacaccaaatggtgtgtgattaattgcacaatttgtactgatttcatttgagaggatattttatacttagacttgaaaaggtgtactaaagggggtttaaccgtaagtaaattgataattaatacctctgtcctggtcttagaaaatatatgggcgtaagacccataaaagaaagaaatctaccagccaattgatattaattaggttaaagttgcttccaaactaaaaaaaaaagcccccaaaattagaggtacaatattgcaaataaagaaaagaagtttgtagaggaaacttcaagaaattttaagggacaataacttgttcaatcatggggtcgtatttgcgtacctataaggaaggacgagtgtctgtcaaatatacacatacactaaagtcttttaataatcatgccaaaaaaatgtctcttaatgacgaaaaaataatgtctcttaataatcattttggatttttcacaagtaatagcaatgtctaagtacttgcaatgaagagaattgtttgtattttcgcctctcgtttcagcaatacgtatatgcattttatattgatcatatacgtaatactaattaacaataatattgatcatcttaagtttactaaaaaaaaaaaaaaactggtcaacaaaggttttagagtttacaagtttctaattcaaaaattattgacatgaatatattgactcttgctttatatttatcctagttaaacagattttatgtgagattcttacaagtctatttaagacgagaacgaaaatagtttaattgttttgaaaatattgttagaacacgagaacagtttatgaaatcaatcggattacaaaaccattaaataattttgaaacctctatttaaaagtcaaaactaactagtaatgaatgaaaaaatagaaaaaaagaaaaattattcactatatttcaaaatataagatgttttaattaaaaaagaacttttttttatttttaaaacctttattttatatttgatttaataaaattcaactaataatataaaatactgcataatataaatggtcacaaataacaaatatatttaaattatctataaacttggaaaacatcttgtaatatgaaaccaaataaaatgtctaaaacatcttagattttatcagctataaaggatttaatttttttttgggtaaggatctttaaaggattttaattatgctatttgccttcgtatccgttattccattttacaagattgttcaagcttctttttactcatttcagacactgaccattaatgaagaccttcgcaataaacgaagcagacccacttgtaaatagaggggaaaaaacatctttatgtaatttactttattttatttttggtcaattttatttgtgtttatttaggcagacaaaaccaaatatctatatcttccgactatggttttattaggcaaaataaaataaaataaaatacagagactataaaggcgattttttttcaaagggtccaaaataagccttttggaaatagaacttttcatcttcttcttctttcttttttatacaggaaagagacatgttcttggtttgtgttctcgtcatttggtaagattttagagatatatagtacggtcaaagaacgttaaataaaaagaaaaggggtcaaagaacgttaacaaacaaacattatagggtctgagttcaattattatacaatctctggtattttcttacgattttgtgaactcttttttttttttttttttttaacgattttgtcataatttgtattggatagatctgtgatggaattttatttagttttacagaaaatcaagccaagtctgttaaacaaattttttctcaatttttgaatattaaatttttcaactgcaacatttttttacaaaatgtacactgatattttcccatttattttaccacctcacatcattttttttttttttttttacgtttctgataaggcataataatattttgtaagtttcttacagtttatttcacccgtttctatcacgtaagttgtcctatcgttagaccatcccaactacaaaaactaaagtgatagtagatggaatactaattagacttgaggtggcttaattaattttacggaggtatacattgtgttgttttcagacgaaaacacatttatattgaagttagagaatatacatatatatgctctccagattcttctctgacgaataagcatagaattaaattgaagttaatatcatatggtgtgtagttttattccctattcaacatatatatgtatcactatcttgtgtatgttccattgagagacaaaaattgacagacagagaaaaataagacacgtcgagatgtaggacatttactcttaacatgtttttgctttagagagtatagtactagtcaacgaaacacgcaaatgattgtcattatgacccataaaaatcttgaattgctaaaagtattctaattaatcaaatattggtcgatgaaacatggaaaacgatattaatctgcttcgctatctttgttgatttaacaacgtaatatatgctgatgaaaaatacaaaaacgtacggtatcagttaattagttcaaaacccctctttgtatcattgcggtcgttatcgtatcatattttggattcgaccttgataatacgtgtcagctatttcattttagattgggactgacaaaaataattaagaatcatgactcgttgtcatgaagattttacataaatttaagattttattggttttagaataaatgaatttagtataatgtacaaatttgttgaaaaatctaaaacaccgacacgactgtgtgatggagataataggaacattagcccgaatacgacgattatacgaccaattgtcacgcgagcttagcaatattggttaattcagatgaattagcacgaaattatttgataagtaaaatcaaaatcaagtgcacgcagttacgaatcttggtggtcaattaaataacggaatacataagatatttttcatttactctacagaaaattatacactcatgattccctataatggaagagaaaaacagtcgacaaaaaaaataacctacatcatatacactcacatcagtattatagaaagtcatattattgggattgacgatgtatgagtaatcgtttgattgctactatttattttaagattgttgatagataagtgtgaccagtcttaaaaaagactgtgaccactctagggaattcatttcattaccgttataaaaatcatttaataagattagacctttcgatgtattagatgattcttcaattacctttttctaatccatgacacacatatataactatgacaggttaaaatgatgaaaagttagaaatcataagattgtgtaagagacggacaaaacatacaaagaaaacatgatcctgactcaaaaagtacatcaaatatcaacagtcaaaattcaccatcaccatttattgttgcccacttctagttttttttctttcatttacacccaatttttcggcagagaaaacaaatcattattgaaagaagatattcagggaaattgaagaaggtcttgactattgagtgcctgactatttcgacagcttcagtcctgctgctagtttgtcacatgcaattgcttgtttcatgatatagtagccgcacagtgactttgatcaatattttccaaaaagttgtttttagaggcacacaattaaaatcttctgaattttatattggtagatgacattttcggctgtgtaatagaatttgtttctaagtcgtttaagagaaacaaatggttagagattaggatggtttgaatatgaatatattaactaaaactgaatatttcttgaaaaaattaaccaaacaaattttcaaaagtttagctcctaattaagaaaagagatggcgaaagaaacattaaacatatagattctgtaatcttgtgagatgaaacttgtcaggaaaagtgatgctgtgttcatgaaagatcaaatgattaaggatataaaaaaactatggaagactcatagatatgaaaatttgatcaattcaaaagttatactattcatgctttactaaaactttatactgaactattgtgtcatggtacatcctcaatcatgaacaacattttgagcatatacagcaacgatctctgagcactttattcgattttttcctaataacaagtttgtatggtttacactttccttctcttgtggcttaggatgaaatcatcatcatcatcgtcatcatcatcgacgactttcttcttctttctcgcatctaaaccgttgttcttggatgcagatgttctttgagaactctccgctttactagaaaacgttggtgccgatttactcggtgtccccattcgaatttgcttcatttttctctgctttttctcaaaggctcgcttcgccttttcgggagacaacataccatgttccataagcctgattcaacacatttataaccattcaagttttagctataaatgagccaagacaatgtactagaagttcatcataatgacttgtcaatagtgtttttctcaccagaactcagccatttcactcccaggtatttgtttcgacaaggattcatagaatatcctcaagggctctctctgcaaaatgcaaaagacagataaaccaagaatcaagagcatgatcataaaacagagatctaataaagcaatcattaaagatgtctaataacctcttcaggaggatcaaacttttgtccagctaatgaataaaccttcttctctcttttcgctttccctttcaccaagcttactgttgcagatgttgttttcgctttcaccaagctcactactgtagatgttgtttgcgctttccctttcaccaagctcgctgctgcagatgttgttgctatggttttcactgaatttataggtactttgggctttgccttcacaaaagttttgcagaaaatatgttacaagttcgacctagaaaccaaaatatccgaaaaccacgtcatgatgaaaacttcgatctacaacgaatccgagtcttaacaataaaattttccacagaagttttatctaacaatgaacaatctacaattcgatgcactcctttagagctagatcggctttaatccttaaggaatttataaaaatcagagaacccaaatcagaaacttgcgatcaaaaactttaacacaagagttttcccgattgatacctcggatttcgccgtgacggtagaaacagaggatctgggtttagaatccgacatgatcggtctgctagaggtcgcgatcttctttttgtccttaatagacggatcgatcttgactctggaagaaagagaagaagacgcatcgcgtggctcgctcttagctgaactaggtctctcctgtgtcgccatgaaaaagctcagattaacctgaagttcagctcaactactttttctgcttgaaaaatccgacaatgattccttgagcaaagagagatgcaatcttccgattaagtcttgccgctttcctagttatgtaatgaaacggtaaaaactggaaagttaaaaacgaacgatttgcggttaccatattaacggtaatttaaaaatttacacgaggaataataaacactcaccaattggaggttttacaccttttttttacaaagttgtaaaaatttgttgaatgatgaatcttttaaaagaaataagtatataattgtggtaatcaataaaagtaaccagattattttcttaattttgaaatactttgattaaatactaatttttaacctttgaaaaagttttacaagttcattaacttaacaatggatctatttgtaatcaagtccaattggctaatatgaatcagtaatctacaaaatacaatcttccggagacgtagttaattattggcaagtagcaaaggccaaaccaaaacccttgtcaaacctaattaatctggctaaaacgtttgaaaaactcggttataccaaaccgaatgaagaatcatatgaaatatatcataccgaaccggttcaccatcatgccacatgaaatgtttttgaaccttcaaaaccctcttttgcatctccacgtatctcctcaccggaatcgatatcagaatcttccttagattcgggatctctttctccggcacaaacactgcgaaagattcccaattcagaatctcaagaaacggtggcacaaagttatcagagataatcaccggaacacaaccgtacaaaatcgactcaaccactctagggctattaacctcgtaacctttagcgcaaacgcagaatctgctgcgtttcatgtaacggatgtatgatttatgatcgatacgattaaagatcttcatatcttgttcaggtctcgatgaccattggttaagcaagatgggtctaacgtaaccgtgcaagctcccggcgaaaaaagcgaggatggttcgcttggaagggcggctacctccaatttttccgtttggattttgcaaagaagagactttagtttccggcaaagaaacatcttttccgaccacaaagtctatgccaacatcggcgttacagagtgctctgatgcagtttatgtacggtcccctagtctcggttggagcctataacaaatgtgaaattatttttttcttaaaatctcattaagaaattttcttttagttttttttttcttccatttttcataaaatatgtattaaaatggatgcaaactagatgcaaacaaggctagagtacaaatgatgctaacatttatatatgatcaacaaatgaattttgttagagtacttaaattatggttttatttgaaagatacactttattctagcttgtaaaaccaaacaaaaactatataggtttttaaagcacatacccagtcatggcaagcggtgaagaaatgatcggagccacaagttctattccaggaagggtagttggaagcgatgagatcaatgtagtttccaagatatttaacaagattattacgactgtgagagtcatgaacgtaaagtttctgttgaagaattcttgaactgaaaggtatgtagaataaatgagctttggtgggatcttttgtcaagaatctatggctactctccattagtttcataaaccatccttctgatgcgtaaatcccttccattattgcctcaggctgatggaaaattggtctatccccttccgagtagacatacactttcagagtttgttccattagctcatagctcctgcaagagatggatcatttataaccaattgtgtttttctcttttttagtaaaaaacatgcattattcggaattgaatttgggtagcgacaaatcaacggtactaacacaaaaagtgtttgtttcaaatttaaatattgtttgcacttgcatcatgttttttttttttttgtcaaaaacacttgcatcatgtagttccacatattttgtaagaaaacacaattttcatgattattgtttccgtttcaaacgaccaccaataataaacactaaaatatggtgttctcttttgaaaataaaacactagaattagacctttgctattctctgtccttattatatatgtattgctagattggttaatatagatgttagaccttttgaagatggatatgttgtggtagagaggtgcgtaaagagtatcatctttcttgaccaaagccgctttcttgatcttgtctcttgcagttttaagctcttggtccacttttgatccccagagaggtgcctatgaacatgaaaaatgtagaaaacagggaatgaacgagtgtcgatgagtaataaggatttagaacttgcggtaaaaacttaataacatttgcatacaagtgaattttttggatcattatgccgcttcaatatcatattgttcatctgctttattgatatgacaattgatggtggctttgttatgctcctatggggatatttcttgcggatttgaggaatctttggttgaagaggatgcagagaacttgcagtttcattgcttcttctacgttgtccagaagcttctattttgtgagaatcattcagaaacttgtgctcagaactcttcaatacctctgtagttctgttatacggtttaagcccggtggatgcttcttgagatgcaagaaacgtttcattttcagcacttttagtcgtatcattggattttctgaattcagaaatagtgctgtttccaggtgaaacaatagatagtagtactggagagagctcaaaatactgaaggcctgaaacgaaggcaacaaccagaaccatgagaagaacaactctacaggtttccacttggcctataaaccgcaaaacccgactttgatccatcaaaacctggaaacaaattattaccttagatttccagtgatataaatgtatctcttcttcctgaaataagttgcagaaacagaacttgatcacttacagagatatcaggtaagagcttgagatgatgtttgttgatatatagaactgtcgaatctgagcgtttctttgaagttacttggagtgatcatcaggagaggaagattcagacaaataattaacaggcaaagagacaagacaaggcaatcgatggctttaaattttgttcaatcaaagtcttgactaattatgtatttttgtagatattttgtattggactgataagccaacaaggtatgataataacttttctcaaattatcagaagacaccccttaattatctatgtttgatcaattatgacccatagttttatttttttaagagcagcctctgttttttttttcctactattatttttgcaacatttaaaccatacctatgaacctataataatatatatattaagagcatctccatcgggagtttctggatcagaatgtctattaaaacagaataaaaaattcgaaaaaggtggagagagagtaaaaacgtttctcatttgagaaactcaaagaaacctatttttgcttttgttttgttttgattggttcaaaaaataataaaaaaattaaataataaaataataataaaatttatattattttataaaattgggtttctcaccgatggagatggtctaaccactctgttaacaaagtactaaactttgttagtggttaagttgacctgattagtatacattatatctgaatgtagtaactacacaatccaagaaaaacaatgaatgtataatttaacgttcgatatgtatatatgaatttcagtgtcagcgtttgcgtcccgcactctcctctgcaacgtgatccaagcatcggaagttgcgaatttctgtgtttcccacaagagaaattaaatcctcagcatcatggtttttttttttgtaaatttaatattcttgtattagtataaaaatattgttgttgttaaatgtacagtaccttgtttaaaattatagtattaacaattaatcaatcacataacaatcaatcctttaattaacatcctcaacatggccgttggctcgtgccaaccccatcctccacttcctcatcaacgtaaggagctaaattcaaataacaattaccgtggcagttctcgttattatcaccaacattaggattcttactcgatctatttgctggccaccgtgcacggcataccacacagatggccggccgccgtccacgactctttctccacgccagcatgcattcatcatgaaccttgttcttgcatactctgcacttcaccaccgcggtttccttctccttccctccaccatttccaccgtctacgttttctattgcgataatatcgtctagacatattggacatgttgccggctcttcatccacctcattttcctattcaatataacaaatgatatatgcatgtaagatctatttatatcccctaaaagtaaagtaaaattttatttaaaacattggttatttaggagtatttgtttagcggtgtaaaacaatacatgtagtttagatatatttttatgtaaaacgacgtaataaatttttttaacaaccatttcccattacaacgacgacaattatattcgtacagggtaaaagaagattaccattttactggtggaggaggatgagttagtagtatagccgggttgagaagtggtggctgggaaaagctgaagaaaccgttgttggaggcggaaactggcgaggcagtcaggccgtgtcggggcagagaagaggtggaagaggaggcatgtccggagtctccgttgcctgagacacttatcgtcgagaggaattccaagaactcggattaagacaaacaagatgtgtttgcacggcttcttacggtcgggacaagtgcaagtaggtgtggccattagcgtcactgtgtagacgttacacgttgcaccaagaacgtgaaaagttcctgcattaggacggtggagaagacggatccggtgacggagagctcgaagtatcctatctgccaccggttgagccaagaaatgccgttggtcacggttacttacgtacggggatatttgattggatccgacagattccatgatttttgagaattccgttacggcagttggagaatttatgcgagatatatatattcgtgttaagtatataggtacagttacttatacatacacgtcatgtaatctgtgcggagattctttgtatgaaacgttggcacacgtgtggaataacggcgacgtgtaggagatcacaaagacggcgttacacggaaggtaaagtttacttggtttactggatcgaaaattaaacaattttagacgtcgtgtggtttttggtatgactgtgggacatcatgccgtttgtctgtcattgactttttgtttgataacgtcgtcgtttttggttaaacctcgaaaaacccctctctctctttcttgctcttgttaacctagaaatcaaaatctcagcttcaccattcgtttcgtttttccggcaaaatggcttcacgatgtcgatctttgtcaaaaccagcgttttctgcgtttagatctgcaatgaacaagccatctattcgtcccaaatcggcttcatcattcatcggcgtccctccttcgcctggattttcgaggtaaaacggatttgagttggattcgtattcgtgagttctcgattgatgtaattcataaaaggttttgtttttggatttgacaggccgattggtcagctgggttcgcttcaatcgttgcttccattgtacagtgcggtggcttcagctagattgacttcgtgcctgggtatcgattcacagaattctaggtcattagctcagggtatgctctgcagtgcgaatccaggagtttgatattcttccaaatgttttgtgtttagtatatctgtaagcaacttttttttttaaaactctttgatctttgcatagcttcgaacttgcatgttgtttactgttggtagtatcaaatcagagacctttgattctcctaatgcagaatctgtagcagtgtatagttttgaaattgctttaattggatagctctgtgaaactttaatacccatctttgcaaaaatgagcattgacactgaactcagagaattgtcgtagatatctgactttttgccgtatcaaaaattgtatgatcttgctttcccattcctttcacattgttcaatttcactagggctattgcggttttcagaacttcagttagtgtttgcagggacataggttctttggttacacaaacactaattgaaaacttgttttggcataagaatgcttgtattggcttgaagatgaaaaatatgtcatgttggtgttactctttcttcatcttctcttcgttaaacttctgtagtactgattgaaaacaactgaaacaagtatgtgttgaatgccacatgttttctaatgtatttttggtgtctcgcatgttttttgcagagcttggcttaagcgtgcctcgataatgagaccagactcgaagaaaatggattcgagattctccgcattttagatttgctggtctatttcagtcactcagatcagtttctgttttctggatgataaaacactcttctttcgttaccgcatccaattaagttcacaatttcgtttgtgaatttctatcttcaacacatcaaagattgaacaataacagtctccttactatgtcattggtgttcacaagttatgattttagtatttgattattggctagcttttattttcttaattgtgtatatgagttattcaaaatttgattcctatttaaaatgaaatatgtgtcatctatcacatgagtcatgagacgtccaaacttctggaagtagtagataaacgccttgccgtttcttgatatgtaaacgacgtgacgtctgatgtgatttcaaacaaacctttaccagctcttctacagcacggagagattcgtcggagatagcaaacatggagaagaaacgcgaaggagtaatcgaaggaatgagtcggatcgtatcagatccttactacttcctccatttcatggcctttttctcttacctcccgattcgtagctccgccgcaccgtacacttctcatcgactcttcgacagagaaatccaagcatttctagcgtttcttatgttttccgccattaaggtttgaattttgcttaaatctctaacttcattgtttcctgtttcaccgatttcgtttttgtagatggtgagggaggaaacatgggaagctttcgttgctgatagtttactctatgctaaggtaactctagctgatttcagattctttgtcagtcacttttatgattcatgtgaaatctactgattacacattttctttgcctagatctttcttattgcggtttcgttgattatggattatcgagtggcggtctggtttagtatcatattttcaggtcagctcaatttctatatcttgattaaatatatctgaaaatatatgggagatgcagatttgaagtttgattgatttgaatgtttccttttgcagttatatatctattagctcaacaaccagcatttagtaaactaggtatgggaagattcttcaagttcttgctttaagttgtgtttttgtaaaatgcttaaacgttttgcaggaactgcgaagaagctaacacctatgcagttggaggatttgttatcagatggtaacacaacaaaatactggttggtatgtggctacttggctttattcttctacttgataatgttgttgatcttttcaagttagtgagcttgtgatagcagatgatacagttgataaaccaaggactagtttttttggtagctaaaatgatttgattatgtttagcagtgcttacactcagattctagtaaagcataaggtctatgaagctagatttatatagcctccccttactattttgacatcaaattttgtcccttttttttggttaggtgtcaaaccaattaagaaacagaactgatctgcaacatcttaattagtgaaagctcaaaagggtactgttgtaactattatttatgatgatgtgctttcacaccttttgcagatagaattctttgcatgtagttcatccaagtgtgttcgttctagccgttgctttcctgagctctccatcacgtaagctttgtgtaaagaaaaaatatcccaatttcactgtttgtctaaagatacacgctcactcaccttccatttcttcaggtactcgaataatcttttgtcttttggaactgtcgatcttggacttttccctaatactgcggcaaagtttggaatatctcttgctggtaacagtccttggcgaactcaattatttgcacaaatttagaacacattgagtctttgttatgggaagcaactgatatcagtgttgtgtaacatatgtaggtggaatgtctcagcttcccacatacatattgtttgaaaagggtgtcgaagtttctcggttcccagacttttatgttgacgctgcaccttctttacccataaccaaggtttgcttcgacccacttgccaagaaatcaaatttgcaacggctgcaaggctttaatgtaatcccttaatgttgatattgcagaaacttttgtgtcaacattttgagcttgatcggcttctgctcgactatataaacggaacatagctggagaaaacgagtaaacggatatacgactatctggcttctcctgcaagagcagtatgaacacatcaacacaccattggactaccacattcgtatgtttattctcttttagtggggatatttggtgaggctctgccagagaaaaaaggacagattatattttagtgctatagagagatagaaagattctgttgaaattttatggggattgagtttcgacaaagaattcttgaatacgatggtaaaatgaaatctcaatttctgactttgaaatttaatgcctttcgttttcatgacttttaagacttgtcggcactcccacgtctctaatgtacttcctatatatccatgtgtggactaaaactaacatcaatcaaatgagaaaaaatcgaacacaaaaaaaaagttattttgatgataggaattaatgatggatcgtgcggcgacaacgttttccaaacattgtgtgtatacctaccatttattttcgtaaaacattccaaaattgttatgcagtgaaaggaacaataaacaagtagtatgtgataaaaagcatcgttatctttaaaagacgtgtgattaagagttgatgaacaagaaaattatacacttggtaaaggtgttgcctagtggcagagtctggtcaacatgttccaatgcttacaaattcccagttaagccattaattaatgattgattaaaaatcccttggctctgcttatttctacactttctcgtctctatcgttttatttacatatataagcatataataaatacaccatcatatgaagatttgtataataaatatgagattagtacaattcattaaaaaatataagaatgtgtcaaaatcttactaatcaaatcatcatataaggcatacaagtctccatttaaggaaataatataatttttgttataaagaaaatcagtttctcaaaacgcggtttttgagccgagtcgcaagtaaattaatttaaatcattaaatgttggaagtaacggaccatatatccaacttaccaacggttcccgaccgaactcacgcagaaacaccgtatctgcaccgtccaaatctctgacttaatcgctcaacaacattactacatgatctcgttagttcaacaaccaatgagatatagccacgtagtcactcacacgatcatccgccactgcatcagattaatgaaaacttctgatttttgtcgtctttcttctaactcattgaagtattcacccctataaattgagtcccaccatttcccccaaatttctgacatttttctctgttacacgctttccttcttcttctctttctccgatttttattttttttactatttgtgattttgaattttccggcgatggcgtcaacgtcggcggaaatggaccaattaacatcaggcgcgagcaatcggataatatttatcttgagaacgcttaggaagtgtctcgtcttcgttctctctctcgtcctttctcttctccttattcttcgtctccgtcctcgtcgccgtgtctctcctctttcatcgcctgaggatgaggctgttccggctccttcgaggcgatggagacggaagatggcgtggaagctggaggaggaagatacggctagacgtcgttccttagcggaaggcgttgagatggccggagatggagagatctcttgttcgttgttttacggacgtcgtggtaacgctttattctctcggtcgtggttgcctatttccggcgaacttaggtaaagcttcgatttttgcatgcacacaattaggattctccgattaagatttcgattttgacttttagttttggatttatttgtgtgtcttcagggggattttgattattatccatggattgaatgaacacaggtgaaaaaaatcaatctttttttcttttctctgtttctctgtatttcgatgagttctaaaatgaatctgtgaatggtttttaatttgcagtggaagatattctcaattcgctaagcagctaaacgcgagtaatttaggtgtatacgcaatggactggattggtatgaagacgagcttgttttgtttcttttcattttcatatttgttctgaaactgtgggtcttaacaggtcgcaatatgtttggtccaataactgtaattaggtcacggtgggagtgatggtttgcatggttatgttccttctcttgattatgttgtttccgacactgtaagttcacaatcttataaacattactttttggagatgaaactagacaaatgttccatttgaagttgctgatctctggtggtttggtgtcttgacttgaattctataggaagctttcttggaaaagattaggtctgagaatccgggggttccgtgtttcctctttggtcactctaccggtggagctgtggttttgaaggtacctaacatcgtaccattgaagctctctttaaggttctgttgtttacaatgtcctgatttatggtctaccttgtgttatataggcagcttcatctccctctattgaagatatgttagccggtattgtcctaacatcgcctgcactccgtgtcaaacccgctcatcccattgtcggggtaagtcgtctcctttgcagtatttaagttagatggttttctcattttcggctggagaatttagtaggtatcattaactctatgtttcattgtaggcaatagctccaatcttctcattgctcgcaccaaggttccaattcaaaggagcaaacaagagaggcattccggtctcaagagaccctgaagctctcttagccaagtactctgatccgttagtctacactggtccgattagagtccgaacagggtatgagattcttcgcataacggcttacttgacccggaacttcaaatctgttacagtgcctttctttgttctccatggtacagaggacaaagtcactgatccactagcttcccaagacttgtataatcaggcaccatcagttttcaaagacatcaaactctatgacggtttcttacacgaccttctctttgaacctgagcgtgaggaagtcggtcgtgatatcatagattggatgatgaatcggcttgacgatgttaacggatcagcagctagcctctggtaaaagatcaaatgagacgtcagaggtcttcatcttctatagatagttgtgatacaaatggtgtgattgtaaaatcagaaaccaagtgtaggagatacataattacatatcacatgggtttaatctatgaattgtttgatttttgatattcgctgtgacgatcttttgggcctattttgaagggcattgttgccattgagcctatatgggtatatgtgatttttttttttggtttttgggcaatgttatatgtatataatcaatgtaaatttgggtggatttttcatttttctaatttaaacttgaccttctttttttctgtcaacttgaacttgacctttgaaatagcatattaagaaacttgttatggttattttgtttgataactacttattatcgttcttctgaccaaatagaaattgatattttatctgatatcttctatatatttaaacggaagaatttcttaaaaataacctttagtgtgttcatacttgcatgttattagaagataattaatcaaagtattcataacaatgcaaaccccaaattagtgtatttagaagagtgatcgggagagtttaccaaatgaatgtgacatgtgtgtgttacctttagtataaagaaaaatctcagtggattaatagtttttaactaaaaatctaagggaccaataaagagatagtatttttttttttttgtcatcaatgcaatatgcaatatacacaataggaaaatttcttatgatttttttatatcaaaaagatattaatatttgtgcttattatttttttaaaacctcaagtggataataaagggagaaacttttaatataatatatatgaaactgttaataagaaagttataataaaaggagaaaaaccattaaaaacaaaaatcagaacattaaagtatttgaagaatatatatttttaagaaattttttaactggaccaatgcctagaaaaaaggtttaatggagtcagatggaaaaaagagaaattttaaaattttatcatatgattattactaataagtaataaccataaacaaaaaaagaaaacaaaattgacaagtggatggaacatccttaattactggtgtgtataagtagatctaacaagacaaacaaattattagaaaactttccaaaatattggtctgaaattcatggatttcgttctcaaaattcggcgcattcatctttatactttatgtagttcaatctacagaaaccgtaggagagacgaaatcttttaaggtaattgaaagaataataacacatatatgtatatagagatccaattcttaaaataaaactatgaagattaatttacagtagtaatttcaaatctattttccacagctaaatgagaagatcatatacgattgtgtggatatatataaacaaccctcgttaagtcatccacttctccaaaaccataaaattcaggtatccattcatcaaaaacgaatattttcatacatgttttctgtgtttttcccaactttgtttatttttacatttgctttatagttagaatatatttgaagaatttgatatgtctatatacgtataatattctatttccttaaattttgagcaagattactcttttctattttattggttttgcatataacaagcaattgatttatttgactcagaaaatcattataccgcatgacaaaccatccaatgaatgtttttcattattagttagtattttttttttctcaaacattattatcagttagtattagttttaattttcttatagagtctaatatacatcgtctaatgttaaaaagtaattttttattgagtaaaagttaattacataagtttaatactaactcaatatatacattttgtggaaatgaattttgaaattttaaagaaagattttttttcctgtataaaaaacataattagagttgattgtttcaattaacttttaaagttacatttcttgtggtttgtgcaaacttttttcgataatatctaatatgttttagtaaccatttcacgtatttatcgtgtataattctataattttgaatagatgaaaccatctttttcgatctctaaaccaaaaagtcaagttaaaaataaaattgagggtaaaaagatcatcgaatgtccaaatggaacggttcctatattaagaaatacaaaagaatatgtcgcaagagcccaatattgggagaaaaagcatttcaacccgcataccgtcggaagtcatgggacacatgtaaacaaaatacttgaattaattacttgagttacaaatgtgtatatttggaaaatatgtatgatatattttttttggaaatttgaagtatgctggagttaaatcacaaggtgatggtccttatcatgggttggcagcttatatgagtgtgcatgatttgaatattagtagggaccaaacttcatatgctagcatttttgttggtagtggagacaacaagaaaattaattttattcaaaccggttggatggtaaattttatgttgatgttattaaatttatatatatatatatatatttatatatattggttttaaaaataggttacattactatgacttacaggtgaatccaagtttatttggtgatggacgtacatggagttttggggtttggaaggtacatctagatacaaatacttctttatctcgtttcccatgaaatgctaaatattctcggaattttcttttgtaaatactaaatatatacccttttgattgcaaaataatttatctatagggaaataatttgacacttagtatgtgttttacgcttctatcttttaatgtacattacattttactattttttcaattatcatatggaatatattaatatattaagattaaatattggcagggtgccaatggaactggttgttataatacaatatgtccgggttttgttcaagtgtcaaaaactgatcttttaagtgcaccttttccatatccacacaaaggacaagaaagagctgtttatgctagcattgtacaggtaatatacatacattacattttagtagcaaatatgttatgttggtaaatcaaatttgacatgtaggtctttttaactatatattgaaggaaaaagatataggaaattggtgggtaaccgatgtaagatatgacagaccagatgtgcatattggttattggccaaaagaactatttgatcttataggtaatagtgtagacatggttggagttgcaggagcagtccaggcttctccttctggtataagtccaccaatgggtaatggtcaactaccaagtgaagatgaaaataagtctgcacacgttaaaggcgtccaaatagtacattctgattttaaatatagtaagaaactgaagttagaaaaactattggacgacaacaaatgttatggcttaaaagatggaaagaagcagttttttaaagaatccaatttgttcacatatggtggacctgggggtaactcttgtggaatctaatattacaaaaatgatgttttcggttattagaataaataaataatttggacttaatgttttctcttcaatatctatgtatcaggatttgtgtttcctacatgctctgatcattagtatatttggtttactacaaagttgctatatttccattagttgattaacgaattcatgatttcagttaggtttaggcaaaaaatcaaggacttgaaaacccgaatcgaaaccgataaaaaaagctgattcgaagcgggtacaagtattagctatttattctattgggtcttaaatgatcatatttgtgggtataagataaaatccgatacccaaacggatattcgtttacccaagattacatatacttattcgtagatttatacatatacaatcttactgtatatttaatatttgaactaaatacatttatatccaaatatccaaaaagaattaccaataactaaatgcatttgtatttatatgcaagatacttataatttttttggatattgagacaaaattttggtttttttgggtaaattttggtattagggtaaaattttcggatattttggtgaatttttggctacttgggtaaaaacttcgggtatttggataaaatttcgtgtatttgaataaagtttcaactataaggatataaaatatctgaacccgaaggatacctaattttttcgagtattcagcagttttgaaattatatacccgaaccgacacgaacccgattagacctgaaccaaaaccaaaccgatactttagatttaccctattaaatgctaaacttctttactcgaaagacacatacccgatcggattttacccgatcggattttacctgaacctgaccagcatacccgaatacccagccctaatttcagtaattaaagagaaagaaacccaaagcataatagcgactgagtatatcatgtaatgtgttatatccctcacatgcaaccaaagcatgatattgactgactagcgagcatatattaaaatggaaatctatggtatatggcataatatcgaaaatctagtattaaagaagaaaaacaacaaaaaaaaactaataaagtaaacacaaatacaactagcaagtaaaaaacaagcgtcaattgagtccaacaaaaaaaacatgcgtcaatttaaaaggaatttattgggaggaaatcttcccaaaagagcgatgatcgcctaaaaactgatgcgattttggtttggatacgtagttggcacgagcatacgatccaagacgagtctcaataacttacatcacgcgaagtcactgaaaccgttcaaagcagtgatcgctgtggaacttgttttaatttgtatttaccatcatgccgctatcaaacttgtgcaccattctagagaagataatgagtaatgacaaacaagtagagtattgttacatgaatgttgtttgatttccagtacagaaatcatggcgtttatttaggttcaattgttataggttttgctcacaaattgcttgaaagtatcacatgaacttgtcctcctcctttgatcataactttgttgtaaagtctaagtttgatagcgggccatgccattaaatacacggacgcaggggtttggtgtcattaaagtaaatcctcgtattgttttatgtcttgttcgtttaagtttctaatttgtgatcagaagaaaaaataaaaactcataacagggaactataattaaaactaaagaagatttaacgtacattgattttacacagtagatttagttttcttttgtaaatacacattatatatttttattcaacgaaaacaatatcaattgtctctacaaaaaccaacggccagtactcttttgccctaaaaagaccgtaaccctaattttcacacagagaatctaacgattcaaaacaggaaaaagagttagtgatcacgaaatggagagagagagagatatatagtcagacatgttttatttaactgtgttttagagctgaactggatctcagctaaacacaaaaaatttcaagaaagtttaatcttaatcgtataatcgaaacaaattcctttccggtattaccgaaacaaagaagccatcatagcactcaacttgacaacatatcgcttacgaaatcttcccatggtctcaaacacatcctcggaagcatacgctaaatctctagattcacttgacaacaaagacggcaaaagcttcatcgcaatggctatggatcttcttcctcagtttctgcatactgacatgtcatgcatcggtatgtgaggatttctcatgagggactctttcattggttggtgataggctgatagctagggtcgattctagatgatggatttattattagtaatataggttttatttaattgtgtcttctttaccaaactcgaaatttaaaaaaatctcagataagagctaagctgaactggatctcagctaaacacaaaaatcttcaagaaccttttgtctaagtacagttctagatatgtagatttatgatttacaatttctagattcataaattaagcttctacaaaacgggcgcttgtacattttctaactatttttcttataacttgcttatgttttccatatattttgcatagtttttttcaacttgttttcttttaatcttatttcaaaaaattaaacatatcattagatataagctttttccacttagaatgtcgcataactacttactttttagaaatatttctactaaacccaaatagggtaaaaggggataacgctgataccactttaaatttctaatctaaaggtgacgttttattatgacagagaaaatacgaaatagacgatattatgttatatagcaagccttttgactttatagaagtgagaagcgaggattaaggggtcaaaaaaatgaaacatatatagaaagtaaactttgaaaaatataggagttggtgaagaaaatgaacatgttggagtcgaggattccctaatatgttctagaaaatatgagcttttagcaactataaacgcgtcttggtccatcttagcttactttttgtatgaacgcaagacaaatattggaatgactgcaaaataaaaaaaaagcgaaaaccaaatattggtcaatcgaaaagtaagtggagacaataaaaggcgagcaagaaaacctcaatgctttcttattttaaaactattgaaattcactgcaaaacaaaaacaaaaaaaatgcttatttcaaatcggacatatgtgcttacgactaatgaataattaattcaatccatgcactagcagcaatccttatccatgatcgttaaattaaattattactaatagactttaagcattccttacactaataatgacagtttggtacctatttgaggtgggtttttactattacatacactaaaaatgacagttcggtacctatttgaggtgggtttattctctgtaatagtttatttgaaaatttcactcttcttaaattagtattaaaaaaaatcttgttgacttatataaattcaagttggggggtccaatatggctgccaagtttgatcctccgacaacattcccgcagcctcaaatacaattatttgttttttttttccctttgatttgtgacattgtacaattattatgatttgtttctattatcatcgtatattcgtacatttaaaaaaataaaaaaaaggggaaaagaatcatttacataaataacaattcataatgtaatatcgcaccgagttttatagaagtctacacatatctaatctcaaaatgaaagtggcttacatgtttcttaaacttttattaaatttgttatatgtttggtgggaaaaaataaccaataatgaaaaagtgaaagttgtctacacgaggtaatggatgaagagagggacctacgacgaaggatgactccgtccacgttcttcttcactgtttgacaataagctccaattttcagacttttcatttcaaacttgtgggtctcattttcctctggcctatataaatccactatcctccacttctgtctttcatcatcattccacataaacaaaatatcttcttgctcattattcatcatcaatctactactccgtaaactttgcttcctctgtttgtattagctcagaagagatatgggaagtactccgactgatttacccggtgaggatgtcgccgataacagatccggcgtcggcggtggtatttctgacgtctacggtgaggattccgccaccttggaccagcttgtcaccccttgggttacctctgtcgctaggtgagtcaacccacctttagatctcaatcatacccttttgttttactttttgtgatccatcacaattgcttcagctaagtaaagtttgcttttttaagtttctaaacttaccaacttctgtgaaatatgaacttagtgtttcttcttgttaaagttccgatttttctgtggggcttatagtggattgaaatgtttttgttttgttcagtggctacacattgatgcgtgatccgagatacaacaagggacttgcgtttactgataaagaaagagatgctcattacttaactggtcttcttccccctgtgattttgagtcaggatgttcaggtaacttgaggttttatataaaagaactcacttttgtttagtttttgagttgggttttgtctgtgttaacttctgttttgtgggtgattttattaggagaggaaggtgatgcacaatctccgtcagtacactgttcctctgcagcgttacatggccctgatggatcttcaggtcagtgattgttcttcgaattcatgtttagtagagtagagaatgtgtccaaagctttgtttggttagtttttcttttcttacaactggtggcttatgtatctgaatcttgcaggaaaggaacgagaggttgttctacaagcttttgattgataacgttgaggagttgcttccagttgtgtacacaccaacagttggtgaggcttgccagaagtatgggagcattttcaggaagccacagggtctctacatcagtttgaacgagaagtgtgttttaaaatctctttaaccaggtcggttccattttgtttctttaaactaatgtgaatggatgttctttaggggcaagattcttgaagttttgaagaactggccccagagaggaatccaagttattgttgttactgatggtgagcggattctcggtctgggagatcttggttgccaggtaataaataagttcttgagttacacttgaaacttaaacattttgtgttgaaagttcacatctatcatctgtttgaacgatttcaatattttccagggaatgggaattccagtggggaaactttctctttacaccgctttgggaggaatccgtccatcagctgtaagcactagaacaaaagctgctctagaaattggttctacttgattgataactcaataactgttttgatcctaaatgaaaatcggctttcaaatgcagtgtcttccaatcaccattgatgtgggtacaaacaatgagaagttgctaaatgatgaattctacatcggtcttaaacagcgaagagcaactggccaggtttactaatcaattcctatcagtgttttctcttcttatagcaaatactatgatttttcaaaaactgagaagtctatttgcttttgtgattcaggaatatgctgaattcctgcacgaattcatgtgcgctgtaaagcagaactatggagagaaagtgttggttcaggtgagccataggatactctcttaagaactatgattgttgtcagaactacgataaaagatgtccggaattaatatcatacactcatcttttcagtttgaagattttgcaaaccacaatgcgtttgaccttttgtctaagtacagtgatagccatcttgtcttcaatgacgatatccaggtagcatcttctcctcaagattgatcttttttttcttaaatttttggttgtgatgtcagagtgcttaccaagaacttgattttgttttctgtaattgcagggtactgcatccgtggtgcttgctgggcttattgccgctcagaaggtgcttggtaaaaaactggctgaccataccttcctgttcttgggtgccggagaggtgagaccagaaagcattatactctataagcttataattcttacatttattttttgctgcttacactttatctcgctgattctttgaaggctggaaccggtatcgctgagctaattgctcttaagatttcgaaagaggttagtcaatctgggagttttcttgcatttgatctgttttttggctaagagtatgtgattgatcatatctgtttttttttttgtagactggagctcccatcactgagacccggaagaagatttggcttgtggactccaaggtattgttaggcgccaaccaccaagatcagtctcatcttttttagctataccgttcttgttcatatatgtttctcttttgaacattattttgcagggactgattgttagctcacgcaaagaatctcttcagcacttcaagcagccatgggcacatgagcacaaacctgtgaaggacctcattggtgctgttaatgtacgtgatgaactgatctttaaattgcttgatagtgaatagagaatctttttgttcactgtttgttgaaactttttcaaacaggcaatcaagccaaccgttctcattggaacatccggtgtgggtcagactttcacaaaagaagttgtcgaggccatggctaccaacaacgaggtttcttcttgttcttactctctgctttttcagaaaacaaggtatttatgctatttttctaatgctggtcttggtgttggcttatagaaaccgttgattcttgctctctcaaaccctacttctcaagctgagtgtactgctgaacaggcttacacatggaccaaggtataatattgtctcatatgacatctaaatgtgattcatgtcctcactcctgattatacaacaaaattataatttggttttcatgctgctcctcgaatctaatcatatattgtgcttaaaaaaagggtcgtgcaatctttggaagtggaagcccatttgatcctgttgtgtacgatggcaaaacctacttgcctggccaggttcgtgctatttcaacaacttcttctctctcaactttgtacatctgacaatcttagagctcacatcatatttccactatcctacttaacttcaggcaaacaattgctacattttccctggtctgggtcttggtttgatcatgtctggggcaattcgtgtccgtgatgacatgctcctcgcagcttgtaagtaaaaataaacttcagaaaatcaaacatggatactgataaagacacttaaagattctcaatgtcatctctctctcatgttttcaacagctgaagcattggccgcacaagtgacagaagagcattacgccaatggtctgatctacccgccattctcaaacatcagagagatctctgctaacattgcagcctgtgtcgccgccaaaacctatgacctcggttagttgaatgaaactgtcttaactcttttaatgagactgtctgaactctctaatctcaagttctaaaatcgatgtattgtggtgtaggattggcgtcgaacctgccacgtgcaaaggatcttgtcaagtttgcagagagcagcatgtacagccctgtgtacagaaactaccgttaaaaaagttttgttgaagaaacctgcagattatactattcacaacccttgatagtttcttaaggcttgtatttaagttttttgtttgtttgtttgttgtttgttttctcttctacattatgatgctgtttgtgaactctctctctgtctttgctgataaataataaattgttactaatataatctacaaatcattattgtctcaaagttacactttccatcccacatcacaaaatcgatcaacttgtcttggaagggaataatatgcttttttctgccacttgttgtatcttattggttgttttattaaaatggtataattgttgcagaattaaagaacttgtatcattattttgaagagtttatcaaaagtttcatatagataataggactatagaagcatagctgaatactcttttgaaagtggtttctaaattgtactgagcaaaatgttctaaaaacaacaaaactcctaatcttaagctaatgattttggcattttaggtaactacttgttataaatagctaaaacaataacaagaatctctaaaactcgtcttcacgttttggttaaaatcgaaagctcaaacaatccaaaccaaaactaaaccgaaacaagatgtcaaaaaaataaataaacacctaaaccgaaaccaaagttaaaacaactgaaaatgggctgaacggtccctttaatctgagatgtaataaggcccaaatagtaactgtagatggggacaattgtaacgaaatcaaattgcgggcgaaaatcgaactaaagaaataagtagagggacgaataaaatggttagaaggttttaagaataaaccgcgtcgcgtctcttttctggaaaaaacgagaaactgtgatcttggcccttttattacccctatcctcttcttcttcaatctctccgatcaaaatccttttaagctctgtagacccaggtatgttccttcagcttttctattcgcgagaaaattacgagtaaaggattgcttgaaattgaacttggatcgttctgttactgctttcttattgctatcagattttgattctctaaggaattagatattttctttgttgattgatttgttttgaacacgtattattaatcctagtctttgtttctacattataggaacgtttcgatttgaattagctaaaaacctcaattttatttgctcttttgcatatctgaaattggaagctgatgatatgtggatgttaattggctctagttacttggatctgtgaataattatttgctaatttggagcatgttcctttgaattatcttctgattgtctaagtatatttggaaatgtgtttatattctcatttgtgtgatcaggttacgcagagaagaagaacagaacaaggaattatataatcattggcttgatcaatctgaattgcagttcatggcgctaaaccctcaattactacccaatgggatgcctgttccctttgttaatgaaatgttcgtcctagtccgagatggtgttgagtttgaagtcgacaagatccctgggttcgtgttcccttctctcgtcacgcatgttttggatctccttaagtggtttattgatttgatgattattgttggtctccattttagtaccgttttgagtcggtttagatccactcatctagcatatgaaccattaagtttacttgtaaataagataagtctcagaagtgaacagacatatgagctctgggctttaaacacttccctgatgttctttcttgttgtatgatccagagggcatggaggtcatgttaaggccaagggggtgatttacttgtctaatatacggatggtctttgtttcaagcaagcctgttgacaactttgttgcttttgacatgcccctggtacagtaactttatcttatttttgtctctgatttagttaatacatggcacaagtgtagctctgttaaatttggttatggaactacatgctacatattagcttatggattatatgttactctgtagctttacatccatgccgagaaatttaatcagccaatatttcactgcaacaatattgctggacaagtggagcctgtaagtacaaactttcatggagaatttatagtttctttccttgtaaggaaactatacatatttacttattggcatgtaacaaaatttccaggtggtgccagaaaatgagcatagagctctatattcaacacacagtttcaagatcctatttaaggaaggtggttgtgggacatttgttcctctcttcttgaatctcatatcatcagtgagacaatacaacagacaaatgcaacaagcagcagaagcagcagcggcagctcctcatgttgatcctcttcaagccgctcagacacctgtggacgaaatgatgagacatgcgtaagtcccatcagaaatcaatcggaaagttttttgatagtagtaaaagctgttgttcctcataaaatcttgtgtggtcgtcattgtgtatgtgcaggtacgtggaccctaatgatccaacgaggatatatctgcaacagccatcaggggaatctcagttgaggcgtagagcttaccattcgggtgcggcggaacattgagatacacggaaaaaaaaaatacaaaggctatgaatacagaaacagcaacagattagtgttgctaataagcaaaacgtgttgtttgtttgtttaaagttgaaaactaaaagtctaaaaccatctgtgtaaagaaagatgagacttgtttggtgtgtggatgtatctggtaaaattggagtcgtaataatcataagtttggttcatatattgaacaaaatgtgggtcgaaaaccctgccggttcgcctgaaccatgaaaagtcggatttggctgatccgcacgctcaattttcttcagctaaatcgcgaatacttgagcttgtagtaagtcgtggccactagtgggacacacaaaaccacaaaacatatattttgcaagctaaaacccaatggactaagatttgaggttcagggttggaccataaaatttggaatggataatcggatactttaggttgggttggtagttttcaatattgaaattgggtttttggacctttccttagtttttgatttaaaacaaaattgtaaaagaaaatgaaaatacgaaggtggcattctagctttattttccagagaaagtggctttccagccatttattaaaaaaaacaaagaccagggtgttttttttctgacaaaacaaattgtaacactcactaggcatagcattctagttagttctgcagaaatttatagcgacactggtccaaattaggaggagcgagagcgaaggtacgagtgaggatttacaattgtcgatcgttttcacctagaaaccctaatttcgggggctcgcacgccctctctgattagaagcgacttcattatcggtcactagaatctgctgcttcttttctggttagtgtttaaccaagctccgttttgtttgctcttaatggaatcagaatttctatcattcctagattagtttctgtgatgtatatctctggtattcggattcttgtgctgagctcaattcataagcggaggatttcttagcttcgataattagcccttttcaaaatttgcagctttttatgcggtttgttcttaagatgattggttcattcagttttgttgtgagatctctgaccttcctctgtagaaactagcattgtcaggaacatggacactaagaagaaatctaaggaacatggcctataccgtatagtcaatgctatcggttatgcatttggagcgggagctgttggaggttctgtatatcatttcgtgagaggggcatacaattccccaataggtgctcgatatgttggaggaacacaagcggctagcatgaatgctcctcgcttgggaggcacttttgctgtatttggaggattgctctcaacatttgactatgcattggtgcgcatcaggaagaaggaagatccatggaactccatcgtagcgggtgctgctacaggtggagttctgtctatccgaaaaggggttgttgcagcttcaacatcagcggttatgtttggtttttttttggctgtactcaaccctccgttcgggagcaagtaagctttttgggttgtctttgatgagaatgtcatttagactttcatgataattgccttttcgttatcaattcttcaaaattactgtttcatggaaagtttaacagatttcgtggttgagaatttctgatcatttttgtataaacgtcatcaagaactaattattgctattcaagtgttcctttttgaatagtttcttttaagtagatgaaatctcaggggaaaaacatttgggaaggggaagatgagggaatgagtcaaagatattattgagctcgacagtcaaaagttaaattattccctgattttgatcattctgaaaaaaactccttagttaagtcccaactagtgcacacaccaaatcaagaaccaaatccatttcttgtcaataatatacaccaaaaaacaactcaggtgtactgaggcagatataataagcacagcctcaagtagatagatcatcattctggtttctcacttatttacatacaacctttgaaggaggatcttcaccagtcaccaacacgaccatatccactcaaaaccaaaaccgagagccccaagaaacccaaacaggatctttagattacatgtttttgtccctaattatatccctcaaataaactttttttcttttaacaatcagagttccttctcttttgtatcctaattctattcacctggagtaatagaattacaagaagagaaacaaaagaacaaaaaaaacaaactgaaatccccactccaaacttggggcaggactgtttttagttgttctgagaaaaattacctgacaagactttgtcacgactgccaaaacagctcataatccttactatacaacgagcggtcttgtatctccaggtttgctacatgtcgatttatgagctgcgattgcattatcttacacacgaccagtcctgctgggaatatccaccattcactttcacccctgcatcccccaaaaaggtacagacatcacaaacccaacaaacaaaacataagattgtcacagagaaaggtacaactttgcatagtagtaaaactcacatgtttatattccacggctgaaatgggattttcttgctagctgatgattcactatgataatgaacatatccgcagagaaaagccacaaactgtcacagaaccaaaactcgtcagataatgtgagacatgcagcatgttctaaagaatcaacacccataatgtccacagatataactattatattcatcctcatgtgaactgaaccacattgcatttctccacataacaagttgtcaacaaagaaaacttaccacattgactaaggacatgaagttccacaatgcgtaaacacgtgctaagccagcagagcgtctgggtccatgactgaataaggcattaatcccagcggggaatggcagaagcaagccgagaggtaatataaacaaagccaaaagtacatccagcaaagaaatcgaatacagctggaggagtgtgagcaagactagactaaaatctcctaaaagtaacatcgagataactaagccaaccatatcctgcaataccaaagacgataacagagggaagagacattaaaattctagaaaagttgaacgtcacaacatttaagaatacattcataccataaagattttgattgggttcgtacctggtggcccacaggttttgtgttgtgaactaagaaagagagaaggaaaaacatatctctcttctctttcagactcggtaagctgtcaaggtcgattatccctccatagttctttctgcgtgtcgtataatcctcggtgtttgagtggggttggttgaagagcctactctctctcaaatgtggtggagaattttctttatgtgcattcacgccataactagaagttacaaaaccaagacatcaaaaagcagcataactagatacgaagtgcactacgaaaacatgataaacagtgacatcacaaaagaaatcttaaatttctagagtgatcaagaaagaattgtgatcatcttgtttatctagatttctcagttcatattttctattcaacctaaaccagcatagcacatacagaagaaagaatggtatcatgactattgttaccacgaaatggacattaagatagaatagatagacagactgcatgcaatttctcattcatttaccgtggctggatttcagtccatgttgtttcactgacacactgaggtgatgttggttcacaatcctcaacagtatgaatcaagagaccatattggcagtaaccacaagctgtagtctggaaccaggccagatcaacccgtatgccatgtgtttccagagcgggattagcatgagtttctaaccatctcagaacagaatgaaatgttgatctcagacgcccacggcgaacaagacgtaattgagcatttacaccagccaccagtctataccaagtagtaggcgaaccaagctgagaaagtaaaacaatgagaaagaatcgatacaacctttcatttaactgctgaaactgcttctcgttaactaaggaaccaacctgactcatcagactggtaagaatgttgtcattttgaagtgagaaaggagccatgtaactgccatcaccaccaaacaatatgggcattggaaacctttggtgaagtcgaggtggaaggtctgtccttttttcatccccaccaaggaagaaatccagatacgcaagcatcaaatcggaggttgcagcgacctatattaaaataaatatatatatatatatatatactaaaccttacaccaacaaatccttgtaaacggaattagatattctcaaaatgtgtagtcctgttaccttcagaccctcgtataaagctcgggagcgacaggagcgtaaacaggagtgatcatattctgaacgtacaaactcacgcaatttttgcaacttcatcttccgccgccattgctgccatgaccatgcgagcggatacgcaactactgaaagaatactatatatagcaccttcccaccattgatatgcagctatagagttgatttcgtcgacaaatgtgttaaatgcagcctcatatctaaaaaacccaaaaccaatataaaaatagttcagaaccaaggccacttattaagtatctatagacaaaacaatgagaaacattcctaaatcagcttgaaataaaataacaaacaacttacactatctctttaatctcctccgggggaatgtgtgagagatgccacggttcactgaatgtattaggacccataaaatacattctatgcacatgactctgagattgctcagctctatttgtttccaacacctgacaaagaataacattataaacagcagcacaacactgtaatataaggagtgtttggcggattatttcgctgaattatgtcttttgaacaaacattacttgcatctgtagtgaaatatcagcaaatacaaaaaagcattctacatttgcttatacatatgaacgcagaaagtaagatgaccatgcagtttttctatataatgtttcaacacaaagtaaatcatctaacctcattaagtgattccaggaaagggaacgaatgatctatttgagagccatgctgtgtgggagctgggccaggtaaatcatcaactccaacaaatttcattcgtgcaacactaagtacaagtgctaagaggatgaggagacccatcagaagaagaccaaacaaccaaggcccaccaaatgtgtaaattaactcctcgagtgcggtgtaacagtgtggcatgtgatacctttccgatatgcatcgatatggacatggtgtctcagaaacaccacctgtattccaaggtttatagttgagacataagcattttcagcatcagtttataggtcctatatattaccatagccaaacttaaatcttcaaccacacttaaaatctacagactttgtagttgaacggtttggtttattcataaatcgttacaaaataaatagaataaaaattcaggcttagtagttgaacggaaaacaaaacttgtcactgaaagttaggaaaatttatagcgcatatgtaatacacaagagttcaagatataagtgaatgctatttatacctcgaactgtgacatagacagcacgagttggaagctcatcaaccggacaaggacgacaaagagaagggtcggatccagtaacattcttgaatgtaccagatgggcattcctggagaaaataatagaattgtgaatacagtgagcttcgaaacgtaaaataaaattcaatcgtggtaagggaacaaaaggcaaatagaaatttcgcctcagtgatatgatagagcaggaaaatgttgtactaagttttcctaaccttgcaaaatataccgtggagtcccttcggacaagccgtcccagttattgtaccatttttgccataaaaaccatcatccgctgctgctccccctctacgattacaattaaaaacaatagtaaatgtgataggctggaatacgatatccaataacaaaatagacattggaaatgcagttaatgacagaaaacacattaacgatcatgggaacagcacatgtatatagaggacataccgtgcatgaattattccttttacactagcaattggctggtatatgtccccagtaggaatgtttgaccaatgaaaatgaatcctcccacctccgccaccaccaccaccaccaggactgccagacccaccaccacttgagagaagagatgactctcctaaaataagataacgcaggaacaaaaggactgttcccccagaaccacccccaggagctacaatagaaccgttttcatctctactcaaacgtttgacactttctccatcaaccctaattgagccttcaagcgataaaccagatagaggctgctccattgaaccaatcactgaccagattgaaaggaaaacaaagaacaggttaaaaggtatcatctttaaagtagtaagctctcatgggaacagcatgtacgagtgtatggcctaaatcatgacaagcttctacactgttaatgggatattaaataaacttgtgacgaaataacaaaatataatttgccaaatatttgacacatggaatacgaatctagtcaatagtctacatcaaacatttgcatcaattacacaacctaatctctcaagtttactagaacagaatcatcaaaatatctgacgtttcatacctacaataccaccaccagcagatgaataaccagggctaaaatcgccacttccactgccaagctcacaagggagatttgcatttccatatgtaattccaccttcaacacagctgttattgtaacaaacacgcccccctttaccaccatgtccaccaccactgccaaagccatttccaagcaatttaccttcacctacgccacctctacaacctgtgaaacatatgtgtgttgctacgtaaacatcttaaaaagaccgtaagattatatcttctttctccctatatggaggtagcaccttaaatcttatattggaggagtaagccaaggacatgcccatacgaaatgtagaagtatgatgcgcgatcaaaacaaaatccaaataaaaagtagttattgttacccattccactggcactaatctctccagagggttcaagggttacagtttttgcccggtggaaatgaactactgatcctttaatgaaaccttcgacgagaatatcctcaactcggcatatctagaaagaaagaaattatcagagttttcaagttagagcatacaatacaagttaaagaatggttgaaatacctgtagagtaaaggacagagatgcattcacattgcaatcctctggaggattcagtagttcataagggcaatcttgtcgttcacaatagagctttggtgtactgcaacggatatgagttcaaatattgttagcttttatatccgaagaatattgcacacaaactaaccataaatatgacatttttcttcaaactcacacagcatctctggacgcattcagtagaggagcacgcaagatagacccaggcccaaccttcaattgccaggaaaaaaaatcattaactcctacatggccaaatcaagtacctttctatatttgttatacaacagccaatatggcctttaaaggagaccaatagtcacattatgcctatattcattacattttcagagctataaacacaaactatttttgattcacaaaatataagatgtcaactaatgcaggattgtcaccaaactaacaaaaggaaaccccttacataaatccggtaaaacagtgacaaaacaagccgttgtgcttcaattgaatcccctggtccagttagattcaagaaaccttgtccatggactccaagatttgcatttgaccgaatgacagatgatccctatatttggatagagaggtcacacacaaaaattagatgcgacgctatgtcacaaattacttttaaggagaaaaactatgacatgagtttgtgagtaccctaagaacgaataaattgctagcctcaagcatggaagttgaaacagttgtatctcctcctcctccatctaaatgcaattctgagttccacatcaagaacatcttgacagtcatgcgtaatgccccgtaaacctgatgcataccaataaacataaacatgatgaacaagtgattaacatgaataccaaaacagtacatggagtgtgaagaacggccaggtaagccaagagtgaagcagatcttagcaacagaaagaaatattcatatctgacgtagacagacacaatgctgttgcatccccattttctaaaaaggtagagaatcaggataatactcaccttgatggtagaatcactcattaagagttcttctgccaacaactcaaatactgatgtaccataatgagctaatccgaagctcaaaacaccaccgcacaacaaactaatttgtccttgaacctacatattgagttctgtttgagtactccaattcatcaattttgcaagataatatgctgaaaaacaagagttccactaaataccttttaagaaaacatatatagaggcgacacaacagacactagatatacaaaataaaagatagtaatctttgtaaatacgatcacaaatagtgctaacataaacactgcaaggagaaagatcagtaagcctacaaagcccatgtactggatatttattttctaaatacctggacacgactccataacagaggacaagttgcgcgtgctttatcctgaatataaacattggtccaaagtggctggaatggaaattctaagagaagcgtatacgtgtctgttgtctgattgtagttgctaacgaaaaggcttcggggaacagcatcatatagagttccagcagcacccgagttatctggacatccgatactgtatccgcctgtgtttaggaagataagatcagtttacatgattgttaatgttaggcaagcacgtattggttatactggctcaaaacaaaaaccgtgaatcaaatgagcaaatgtaaacaaaataaccaagtaaagagaatcgaaccatgcacaaaaatcttcgggtcatcatgcctactaaaaatatcgacagatactcttccaccacccccaccaccataaccactcccaccacatgcactgatctttccaattccagtcctgcacttcaaataacagcaaagcagaggatgctagctaaaatcaatttaccaagaatctaagaagacaaaaggctcactaccaaccttttaaaataagcaaagaaaatgagttgtttcatgtgtatcatacaacagcagacaacacattttggagagatatgagcaagatctaaattctttcgaaatatatattgtcataaataagattcatgcttaatcacatacttccaattgagaacagaaactcacatttctagaatattattatgaaacgaaagtgcaattttgtatcatttctagaaactcaacttgtcctaaggtaagattatgatcttaagaaaatatcaggaccaagcaagtactgtaaattttgcattccctgctgactataagtaatttaaaatatatgcatttaatctaattaacagctagtgaaagagagcatagaaacgaaagttgattacatcttgtatgccttgatgtagatgctgccaccagatccaccaccgcctttggctcctccatagcctccgtttgccaaaaggcttccgttaacatccagaagctgcagaatatccatcttcactttcccacctcctcctcctccataatcaatctctctactagttgaccctcctttactaccatagctccacggcttctgcagagtcgaccaagagtatgcatcacctccccacacatcttcaggtagcttcttagtgtcagtcaaacaacaagcgcctctaccaccatgtccaccaccagcaccatcaatcccctgcggtgtcccactggtctgtggcggagggctcccagctaaccccgtcgtgttcaccgccgacccattagcaaagctagcattaccagctgtaagctccaatgtcccagcgacaattgtagattccgctcccaaagagaagtttccagaaacattgatagctatagaacaaccagggatcgggcagtgaaacctaacaccaggcaggatgataaaattccccttcccagctatatacacatcgtgcgtaaggttcaaatcggcgacaatcttacaagtagtatccaaaaacccaacgccgccgagatcctcgctacaagataccgacggtccatgcggtggtggcggtggcggagcaggcggagagtagtcctgatggaaaagtaacgactctgaatctgagtccaaatcggaatcagaacccgatttcggttccacaatggtaaatcgatagcttgaactagggtttacggccaaaaccgcaagagcgaccaagacgaagacgcagcaaaattgaaatcgagccatccactagtatcaagagtcatcacagacgaagtctactaaggttttcgattcaaccccaattcggatcattgagaagaataaactggaaaaaccaacctcagagacacaaattcacaaacaaaccttctcttctaaatctccaacacacaacaacacttatgcatacatcaacatacgcatgtatacgtattttagtcgtctcgttgaagaagaaaagcgcataaaccttcaccgaaaaatggggtcttagagagagaagtggtgcttttcctttctcggaggagagagaaagagagggaagggagcttccaagaagaaaagaaaacacaggttggaacggagagtagttacgatctggtacgtgcaagttcaccgtaatcaggtaaatcttaacaaatcatactacgccacgtcattctttagattgctctaaaaggaaatactactgtgcatcgtggttcacatggaactggatgtggcagcggtatcctaatttattttgacatcgaattaaattaggacacgtgtctaactacgtttaattactcgctttgctgttggatattaaggggttaatgacttggtttttaaaatttttaaaacgtcaggagttacgttcggacattgaaaggtgttaagaattgggctttgatgggccctgtttgtgaaggagtttgatatggacgcgccaagatttgagcgtgagtgttttttgtttgatattgagaaacagaatgcgtgtgacctggacgaagtaaaaacaaaaattaaacaaatctggctggcccaatagaaaactagcagcattatcaacaccaacattttaatccatcacaccaatctttcaatcacttcgattttcacgttctaaatgcaaaatggtattttttttctaatgtcaatgtatggttcacccaaaatgataaggtactgttgtgtatgctaatttctaaacaactttatagcttcaaagcatatgaaatccaaaattagattttagtgattagactacatgtattggggacactctatgttcaaagtaagagattgtgcatggtcagcaaaaactaatttaaactagtgggatacgtgatgtataatctgatattacgtggtttattggttggtaccagagttaaaaacaaatgcaatttgactcgtatatgactcatcatgctgacttcttcaataagacaattgtagtagatatatttaatatagaaaaatgggtatataatgttataaacttaatcttatctgaccaacaatattcaactggattatattttttcccccagaaaaggattttattgcattaaacttaaaacgtttacaaagtaaggtatagaagagagtaatatgatcttcactaacaacattcattactggaaaaattatatatataatccattcggagccatttcgttgaagtgctttaaagtattcaactaaattatttcgtgaagtggttcggataaattatatttggataatatttcgaagaatttaccttaggtcttaaaactcgttgtgttatttactgaaacgaaatggattcaatttttttttgttgtatacatgtaggttattgaacaacccaccaatagccgtgactatcggagactgcggatcaggctacggtcaggtcgaatttacagtcatttgacgcctttaaaaactaattacgcgagaaaatcggttctagctgctaactttttatttgttgttgcctttcattgaaaaaaaaaaaactcataatacaaagacgagccatctctgattagatctacacttctcctcgcaccaaaattttgccagttttcgttcctttgttcataacattttcgcggattccaaatggatttcatgaaggtcttcgatcaaactgttcgagagatgtgggttttccgttttctctatcgatccaaatccgtagatctttggttttatatattttttcgattgatctcgattcgttttcaattacagaaaaagggaggtgaatctgaaagttttgaaggtccctgagatggagcaaaaggtgaatttatttgattcgtatccatatgtgcaaattgtatccatgattactaggcaaaatgatcgaaaactttctatagatttagctattgcacgaaaataaaaattgctagatcgaaaatcgacactaatcctgaatatttgagctggatttgttatgtttctgtgttcggatgctgagtttcttcacagttgctatttcctagagattagatccatctttgggactcacaaatatcgagttcatatttctatagaagataagcttgagccgtcatgtaaacttaaattggcggcaatgtttcatggattttgagtttgatcatctcttcaaattcagtattatgtgataccctttcataattatatatggctatgtttagtacaggtattggatgctacagataatgagccttggggtccccatggtactgcattggcagagatagctcaggccacgaagaaattgtaatctctggcttcattttcgtgattctacttggaaatatttttttgatttgctattgcttaacatgtgcacttgccatatgtttagctcggagtgccagatggttatgagtgttttgtggactagactaagtgagacaggaaaagattggcgatatgtctacaaggtgagtatcttcttgacgttttcctactgtatttggaagtttatagttttgttgtgtcctgaggtttttctatttcatttcctgccaggcattggctgttattgattatctgatttcgaatggatcagaacgagcggttgatgagattattgagcatacttaccaaatatctgtcagtttatttctctttacatattgatatgcagttctctctaagattgtgttttttttactgactagatctttgtcatccatgtagtcactcacaagttttgagtatgttgaaccaaatgggaaagatgtgggaatcaacgtgagaaagaaggcggaaaacatagtcgctcttttaaataataaagagaaaatctcagaaatcagagacaaagcagtagcaaatcgtaacaagttagtttttacacaagtggaaataattggtctgaccgttcttctttctactttgccttaaatcgtttttttctgcctccaattaggtatgttggcctctcatcaacgggaataacatataaatctggttcctcagcttcatttggtggtagttttcaaagtggttcaagcaattttgacagctacaaggatagagattccagagaagacaagaatgactacgagtcttttcaaaagtcaagacgtggtgttaaaactgaggagcaaagctacacttctaagaagagtttttcacgctatggcaggtttatgtcaaccccattcattttctgatgttcgttacatattttgggtagactatgggagttttcttttccaaaagaggctgcttgtttgcttttcttttcttatttctggtttggtttatgactcattagtctcattttgtgtaccatttttctgatgtcgagtaaattaatcgtgcaatcttgctcactcgattccaattctgaatgtgcagcacggaccatgacaatctatccagtggtaaaaagtcacccgattctgccaaacataggtcatatgtatctgcagctccttcaaacaacgatgatgattttgatgattttgatccacggggaacttccagtaatagtatgtttctctctacgactgctgagtttgcagattgtttatcattcattcgggagaaagttggtttgataaacatgtatttatgatagacatatgtgcatgtcttacctgtatggtttttatttttggcagagccatccacaggcagtgccaaccaagtggacctttttggaggagatctgattggtgacttcttggattctgggccaacagaaacatcttccaccaacaacaacgagaactttcaagaggcggacttgtttgctgatgcagcttttgtatcagcctcggctcagggagctgaatttgggtcacagacacaggtggtgacttctttcatctaagctagtatgcagcttttaacaatggaaaattcccttattaactgtccagttatgtgatgcaatttctcgctaattgacaaaaacgtttgtctgttgaagtcgttctttacacctcacaattacttgtgctgttgaatcgttgactgatgtgtttccgcatttctgtttctacagaaacaagttgatcttttctctgcgtctgaaccttctgtcacagtttcttcagctcctccgacggttgatctctttgcatcttctgaatcagttgtaagcccagaagccaagatatcaatacctgagtctatggctactcccaacattgttgacccatttgctgcagttcctatggataattttgatggatcagatccttttggtgccttcacttcccactcggcttcagtttctacaggtccacaagctccaagtgtacatgggagtgcaacaaacaccacaagcccgctgtctttcgcagactcgaagccacaacatttgcaaaagaaagatcctttccaggtgaaatcaggaatttgggcagattcgctgagccgtggactgattgatctcaatataactgctcgtaagtcgttacttcctcttctatcgagaactctctcatttgatctgcactataagaaaaaaatgttttattttctcattagatgcagtcaaacccaaaaggtatagttgttcgattacattccaactatttttcaaacagtacattctacaaatcaaaattcttagctcacataaagttccagtaccatgtagcttgtttgcatggtgtcacgacaaagaaattgttgggttttagtttctaagttcgattttagtcctgattattattttccctgtaaccagccaaaaaagcttctctagctgatgtgggtgttgtgggggatctgagcaatgaagatgggaacaaagcatctgctgcatcgtactactcaggctggtccatgggtgcaggatccgggcttggtaaaactggcctatacagtacacagcagcagcagcaacaacaacaacaacaacaagcacctgatatctcagacgatttcttctccagcctcagtaaccaaaggtaccaatctggtggctttaagcagtgaaattgtctgtgatttggtgttgagatgaaaaggcatatcaagtttgattctacattccatactggaaatgtaagtttttttaatgggtttgttgttcttgcacttcattcatgggacaatctggtcggtgactgatgtgccattgttgttgtggcgtttactttgggtttaaatgagagagagaagaattgtctttatgttttttttgataagagagtacttttattattggtttaaagtttcgatttgttcatagaacaaaagtatatgtatctcttcccactcaacaaatattttttttatcgcgtgtgattcttaatccgaaagagactccaactttcttctcagttgttttattcacattcatattgaccaagttcattcttagtgattatgttaacactaatcttatcttacacaatttagttctccggtcacgaatgattaaaatatagaatagtcttatctacaaagaaaatgagtagttgtgacaaaaaaaaatagtccaacaccaaaataaaaaatgtcatctcttcactggtttcccaatatcttcatcgttgtcgtcgtcttcttctccttgagaagttcacaagttgtactagaagaagaagaatccacagtcgttggatacggctacgtcgttagatcagtgggcgttgattctaaccggcaagttttgacggcgaagcttgatctgataaaaccatcgtccgtttacgcaccagatattaaatcgcttaatcttcatgtcaggtcattataatctcctctctcaaaccaatctccaaaaaaactaaatttagcaagtttttcaaactaatttaaaatgtgcgattatataggaaagttttcgccattatgattatgtatatatatgtgcagcttggagacaagtgagcgtttgagaatcagaatcacagactctagtcaacaaagatgggagataccggaaaccgttattcctcgtgccggaaaccactctcctcgccgtttctcaacggaggaagacggaggaaactctccggagaacaatttcttagcagatccctcatcggacttggttttcactctccacaacacgacgccgtttggtttctccgtctcccgacgttcctccggcgatatcctcttcgacacatcgccggattcatcagattcaaacacttacttcatcttcaaagaccaattccttcaactatcatccgcgttaccggaaaacagatcgaatctgtacggaatcggagagcacacgaagcgatcgttcaggctaattcccggtgagaccatgactttgtggaacgccgacatcggcagcgaaaatccggatgtcaacctttacggatcgcacccgttttacatggatgtaagaggatcaaagggaaacgaggaagcagggacgactcatggggttctcttgctgaacagcaatggaatggatgtgaagtatgaaggacatcggataacttacaatgtgattggaggcgtcattgatctctatgtgttcgcgggaccatcgccggagatggtcatgaatcagtacactgagcttattggaagacctgcccctatgccttactggtcatttggtaagagacattgctctgttcattttgtttgcttaaagtttagtccatagcattatgagatcatatacttgtttgtgtgaactgagatgtgtgttttgctttgattttgtgaaggatttcaccaatgtagatatgggtacaagaatgtatcagaccttgaatatgtagttgatggatatgcaaaagctggaatacctcttgaggtgatgtggactgacattgattacatggatgggtacaaagacttcactttggatcctgtaaatttcccggaggacaagatgcaatcatttgtcgatacacttcacaagaatggtcagaaatacgtgctgatcttggatcccggtaaacattcgtatactatctctagtctctagtgtcttcatcaatttgattcaagccattaattctataggtattggtgtggatagctcttatgggacatataatagaggaatggaagctgatgttttcataaaaagaaatggtgagccttatcttggtgaggtttggcccggaaaagtatacttccccgacttcttgaatccagctgctgcaactttctggagcaacgaaatcaagatgttccaggagattctccctttggatggtctgtggattgacatgaatgagttatcaaatttcataacttcgcctctatcctctggatcttcactcgatgatcctccttacaagatcaacaattcaggggataaaaggccgataaacaataagacagtacccgcaacatctatccattttggaaacattagtgaatacgatgcgcataacttgtatgggctcttggaagctaaagccactcaccaagctgtggtggatataacgggaaagagaccgtttattttgtcaagatccacgtttgtaagctcggggaaatacacggctcactggactggtgataatgctgcaaaatgggaggatttggcttactcaatccccggaatcctcaactttggcctgtttgggattccaatggttggagctgatatttgcggtttctcacatgataccaccgaggaattatgccgtcgatggatccaggtagagtgattaattctcagacataacctgtagatttcttcatgagttcatgatctaactctggatcttagattatcagcttggagctttttacccttttgcaagagaccattcgtcccttggtaccgccagacaagaactatacctctgggattcagttgcttcttctgcaagaaaggttctcggcctcagaatgagactgctcccacatctctacacattgatgtatgaggctcatgtcagcggcaacccaatcgcgcgcccgctcttcttctcatttcctcaagacactaaaacctatgagattgattcccagttcttgattggtaaaagcataatggtttctccagcgctgaagcaaggggcggtagcagtggatgcatatttccctgctggaaattggttcgatctttttaactattcctttgccgttggtggagattctggcaagcacgttagacttgatactcccgctgatcacgtcaacgttcatgttcgagaaggtaaatagtatattctttgatagccagtttttaatagccagagttgagcttgaaccgcgtgattttggtttaacattgtgaataggtagcattgtggctatgcaaggagaggcattgacgactagggacgccagaaagacaccgtatcagcttctagttgtagccagccggcttgagaacatctccggcgaactgtttcttgatgacggagaaaatttacggatgggagctggaggaggaaaccgtgattggacccttgttaagttccggtgctatgtgaccggaaaatccgttgtactgagatcagaagtggtgaacccagagtatgcgtcgaaaatgaaatggagcatcgggaaagtgacgtttgttgggttcgagaacgtggagaacgtgaaaacgtacgaggttaggacaagtgagagattgaggagtcctagaatctctcttataaagacggtttcggacaatgatgatccgaggtttctaagtgtggaggtttctaaactgtcgttacttgttgggaagaagttcgaaatgagactgagattgacttgaagaagtatataaagtataaaacaatattgatgggaaattgtggatgcttaatgaataaggagtgaagaagaacatttagtaaagaaaagatttcatgatttttataaactccaaatcacatagatttgattttttttttttctatttttgagaaacaaatgtgacacaattaatactagtggattaaatttctaaattatggtcaaatcctttatcaatgtaataaaattttaaaggaaaccaaatcagaaagaaaaaaatgaacgtcagatatgattccgatataacccaaaaagtctacgctacaacagagcagcggtctagtctaacgcaaaatccgtttcgtcgtcttcctcgctttacttttcaatctcctccttctccattaatcatctctttctctctctcacggattcgtaagttaatctcagtgcttctccgtcatcttcgcattattggttcttcctttttccctgtaagctcgacacgtggattattcctctgctttttttgttttcccttttcgtgaagattcgtttcctgtatctccgtgaagacttgatggagttagtttcttaaagtagctccttcttagatccgagtttcgatttgcttcactggtgaagaattagtgattgattcaactagatactatcgatttcgttggatttgtactgaaaacttggctgattttgttgattctgtcttgctggtgaagtctcaagctacttcgtgattagaggaggagatctggatttctagttttagcaattcatttgacttccgagttttccagaatcattgaagtgttaggcttacttgattcagattcagaacatagctttagataacgttagaagcagaatcagaatctgcaaatcggctctttagattgctgctactagaaatttgaaattagcttttggtagtgttaaggatgcagaataggattgtacagttggaagaaggaaaagaaaatggaatcacagttcgatcagggcattataaaggatttccatcgaaactgctacttctgctagggttgtttcttacattttctgttactgtcttcatcattagtgtatctactatcaagtatactggaatacaaagtgtagtaaccacagtcacttcaagctttgtgccatgccgtgagggggaaccgaatagtttgagtaaatggatacaacctcctgcggttttgatgcataacatgagcgatgaagagcttctttggcgtgcttctttttggcctcgtagaaaagaatatccgtttaaacgggttccaaaggttgcgtttatgttcttgactaaaggccccttaccgcttgcttcgctttgggagaggttcttgaagggtcacaaagggctttactcggtttaccttcatccacacccttcttttacagccaagtttccagctagctctgttttccaccggaggcaaattccaagccaggtctgcttctgcttcttctaatcatctttctgtttcattgacaccaattacatatagtatgagaaaatgaatctcttggatcaaatttggtttctttagaagcctttttggcatattgccttgacagccttgtcagatgtgatgtagtcattcctattgaaatatagaactcttcattgagtgattcgttgggattaccagttgcaataagtatcagaaaatgtagctcttgaatcaaacttggtttcttaagtagtcttttgttcaagcagtttttctgatcacttctaagctagttggtaatgtaacttgatttgattgtaatttggatcatctgcattattgcgcaggttgcagaatgggggagaatgtccatgtgcgatgcagagaagcggcttcttgccaacgccctgcttgatgtgtccaacgaatggtttgttctcgtctcagagtcatgcattccactctacaacttcacaaccatttacagctacttaagccgatcaaaacacagcttcatgggtgcttttgatgaccctggaccgtttgggcgtggccgctacaacgggaacatggaacctgaagttccccttaccaaatggcgaaaagggtctcaatggtttgaggttaaccgggacctggcagctaccattgtcaaagacacattgtattacccgaaattcaaagagttctgcaggcctgcttgctatgtggacgagcattacttcccaacaatgttgacgattgagaaaccaacagtcttggctaaccggagcttgacatgggtggactggtcgaggggcggtccccacccagctacgtttgggcgatcggacattacagaaaacttctttggaaaaatctttgatggaagaaactgcagttacaatggtcgcaacacttccatgtgttatctctttgcgaggaagtttgctccgagtgctttggagcctttgcttcacattgctcccaagattcttggattttgagtagtttagttatgtctctgaagtctgaacctcttgacatcaaatattttattttgtttgttgtgatactagtttggaagaaatgagattttagtagagagaactaggttgcacgacaggatagtcatatgtaaactttatatttcaaagaattactatgcatagatcaaatagtcttctactctttgggactatcttttcagatgcattattgaatcacaaatttgttttcttttttcctattgttgtgccttgattttcagtcttaaatccctcgaggctttgacccttgtgcctaaactgtgtttttgtgtctcttaacccattttctttgattgtagcaagttagaaaatatgatttgattgtaaccaagttaaaataacagatcgtgttttatgttagttctatagtgtccttgttgctaactcgttttcttttattctaacaagttagaaagacgaacaaacttttcttaacatagactatattacataaactagaattggtacattgtttaccgacctggaagccaaaaaaggaaagaacttgcttaccgaccaagattttggtgctttgaatgtgaaagaccaataaactaaatgacaatgggaacacaaacatagccaggtggagacacacttttacacctaatcgaagtttctcgaagccctcaagagcctgccaacgtctaccatctgtcttttttttttgctctcttttcaaaaatcaataacgttattcttttttggcaattcaataaagtatgtgaaaaagattcatttgaggtaaagaagttttcaatttcattatcctagaatatgttttataggaataggatataaagaaattccacaaaatccacctttaaaaaaaaaaactaataatgaaagtgttttcatttactttcttaaaactgactttcctattaagtagaggagaaatttgcacccattcaactaaattgtgtcacattttctctcaaaattaaaacaaaaacaaatctatatgtatttaaatgcgatttatagttattgagaaacaaagcaattttgtaaaactatcataagcattaatataaataaaataaatataattgtcctaatcaactcaaattaattgttgaaaaaatgtttttttcttaatgtccacagtttttcttatatttaatgttttcaatatcatttcaatcttctatagttccaataaaataaaataaaagatgagtataatccattcttcttaaatttgctttttcattttaaaaacaacatagcttcgagaaatcaaagactaggctttttttctcaacaaacgtcgacgtatttgaaaaagctcattttaacattagccgttacacgaaccatgtgcaaaagaaatggtccccactcccaacaaatacaagtctgcgcatcttggccgtttccttcacggaaccgcgttgccgtgactgttaaaaaaaaaatagacagctcatcaaattcttcacgcgccaacacaacagaccgttgtgcctttttatctcagcgagttagatccacgcccctcgttgagcgtcccaaaaaaactcccgaataaatatcctcaaacggcgccgtaacggagaaagatgacctgtcgaaatctcagtaaatacgcggagcaatatcagccgtcgataatcaaattccagctggaaaaacctgggcaactaaaccaactaaaccgggcagcttcacatctgcccgacctctttaaatacccctcaccacatttcatgatagaaaacccttaagctaagcaaatttcaaagcatttcaaaaaccctagcctatctctctttatctctcacaacaaaatctttgaaatggcgatctctaaggcttccattgttgttctcatgatggtgattatctccgtcgttgcatcggcacaatctgaggcaccagcaccaagtcctacttctggatctagtgcgatctcagcgtctttcgtgtcagctggagttgcagcagtcgcggctcttgtttttggctcagctcttcggatctaagttactgtgatggtgatttcgtacagagattgtttttgcggtataggccattcatcattattcgtcgtctcgtgtgtattccgaagcagcttatagatctcattttctatttgtccctcttcttcttcgttttctatcttaatcttcatatctgtatgaggatattactatttctttttagagtatttgtggttttgtgattttctagacgatttcttagttatgcgatatggtttttgatatgatatgaatcttattctatttatttatatggatttctcttgagatttctcttttttccttatgctaaatcatttctcaagcatctggttctgctacgattcatagttcctggagaatcagaataaattccaaccgatctaaatcgaatgaatccaactaaaattgaactgtaatccaaaagcgaactttaaatttattcaaaacaattatatttgagaaccattctaaacaaattgatccaaattagaaattacacaatcggcactaagtttcgaaatttgttcaaccagtgcgtggttcaatttcactttccagctacattttgattttcttggtatgaactatgaagataatgatctgcatcgtttgagagtttcaaaattgatcagtaaaatcagagtcccaagtgtgaatttctcttgctatgttaaagctcaagtgaaactcatatccaatgtagaccttgacgttcgttgttttggatgattgcggtcagacttgtagaatcagctgaagaattagagaaccggtacaaaaagcttgagctttcgttatcaggtaaggaagaataaatatgatgctattaagtcgtcgtaccttgaataaaggaattaagttttcttacggacgccaattcttggtcaagattgataaaaaagttggggacttatttcgatgacttttgttggcagaaattacaagttgtggaagcttttttagacgttgaagaataatcaacggttgattattatgatagtatcgacatatgtaacgtgttgtgagatacgtgtagctacctttgattttcatagctcaactaatcctactttagaagtgacttttgattaggtttaggtcatttatgtgtttacttccatcaatgcatcattatcaaaacactctaatcaattttgcactatggggcacccaaattctacaaacctggctaagtacgatttcaacttctcggatcttaaaagctaataagtacaaatttagatgcaatcattctatgttcacatgattcacagtttggttttgaggtttctatgtatttggcttatcatggtttctttactttgtggaccaccttttatatttgtaaaatgtaaaataaagttatatttttaaataaaaccagaaaagatttgggctttatcagccgtttattgagacccattgggtatatactataatctaactcaattacccaatgttatatcaaccatagatattaattaaataaaattcgttggttatatatctcaacacatctctatacaataacggtttttctttctgaacaaacatataataacggttttagaaattgcatctggcagagaatagaaagaaaaaagtaaaggaatcgccatgaaaatggttggttaagcaggagagcaatacacagatataagaatcaattaatcttcctcaagatctaatcatagagattctcgcgaagttgccgtcgaaatccctagccaaactcatcgtcgtctcgaatctatggtcttctacattccgcagcaaatatttcatcgatctgtacttgaaacgatctctgactcgtccatgttttcttttctcaataattcaaagcaacatctggttctttcactcaatctctcaagaggcaatttttgaggaagcatcactgttttcttacacaactacatcaagctttcctcttagtcttgatatacggacctttccactaagttacaatgtttgcccaccggtactcggctttatttgctgcaagatttagataaggtggtggttatgaatccaagcataggccaattcttttttactaaaactcaaaactaagagaaaacgaatatcaagattcttaggatacgatcccattaaagataaatgcaaagtcttgtgcatgacggtattgcaagttccttccaagaaagagatcgccagaagagttgaggttaaagagatcccgttctatgagagttttcttgaatcatgttgagtgtccaatatttctctaaaggaagtcttatagtatgttctgtttttataagatctgtctttcgaattgaaacttctcctctcccatttgcgtgtagtctctttgatctaatacaatgattctagttaaattagacaacactcagtttctttcatggtcgctttttcattatcgacaaggttaccaaattggtatattgattacccttggcacataatttgatattagctccttttgttaatattgtcagcgagtttctcagaagatatgacaaatactagaatctatttcattactcctgactcttgggtcttgattgtttaatcaaaagagaaagggtatgttttgatataaccataaaaaggaagggtatgtatggaattatgaaagaagaaaaaagaggatgtatttgatgtaagcataaaacatcaggggtttatatgcaattaccaggaagaaaagaaaaaaagaatccttcaacgagggttttgtaggagagttcacattttttttttttttgtctcagactccgccaattctctggaaacttaatttggatattgttaatttgttctcgcatagatcgattcctcttacggagaaatgcaatcgattcgtagcagtacaaggttgcttcagaggcatcgtttctccatctccaacactcttcgtttcacttcttcttcttcttcttctggaagctggtctgaaaatgaatcgaggatggtaggatttgattctttcccttgtaccagagctgcgacatatctcattagctcgttgaaaaatgtcggtttttcctcttcggcgatacctgtaagccactttcgttctctatcttggtttaagagtgtttttatttcgtgtgatttgtagaaatgtagaggaggttcggttagtaatggagatctaatgtcaaacttgctttaaaagtgcagccagtgtaataaaacgaaagcttggctcttggtttgatcttgctgattactgatgagtgtagtcactctcctagctactgattccactgatttcatctttcataatcaaatttagcccagagtcgttataatcggtattgcaatcactagatagacaatggttatatataaatgaacttaagcaatgattttattggtcctaagcttcgttacttgtttttcttcttaagcactttactgtttgacttgcgcctctcctcagtgcggtagtaagagttatgtagatatagaggaaccagcttgtgcggttgttatttattttcagctttgacaaaagttttacgatttcacaagttcttctactttacatgttttctctatgttcgggtctatctatattaggcttctatgtgtttaagatgttcttgggaaattttttttggcagaaacaagactttaagtattcgttgaggtgcttttctactaccggagattctgttcaatctactcctcaaggatcccctgagtcagattgtgttgtgcctcagagaatcaagtttaagcggcttgataaaaccgctaagcatataatgcaggtacaactcaaactagacaactatcatggatacaatcatgtcatcttttacctatgtcataatcttctgcagattgtagacaaggaggcagttgaggaagtgagaaatcttagagagattccagagataaagcctggttacattgttcagcttaaagtggtaagtagggccttagattgtaatttctttttttctaggggaatgggatcaaactatcttttatcttctaagtgaaacctttcataggcttgccatttactttgtttgcacacaggaagtgcctgagaacaagaggcgtgtatcaatagtaaaaggcgttgtcatagcaaggcgtaatgctggtcttaactcaacatttagaattagaaggcttgtcgctggagtgggcgttgaatccatgttccccttgtaagtacttttgtctatttctctcggtaagaccatcaagaggcattatgataagtcaagccaccgagttttatgtgttctctttgctttggtcatggtgaaaaaactgatgtgagtgagggtgtttgtttggtgacaggtattccccaaacctgagggagattaaggtggtggacaagaagaaagtaagaagagccaagctctattacctcagggacaaggtgaatgctctcaagaagcattaacaaccatataaaaagcaatctactcttatcttaaaacaattttcgaaggttttagttacactccctcaaaaggagacgatttggccttagtgtcacattgaattcgtgtaatgataatgaatctcttcagtcctcttgataactcgttagcatatcaatttatttttatctcaaagatataaatttataagtaaaacaaaatattttttctatccaacaagaaaaaataaagattttgaacgttagaaaattgtactaaactgttttataattattagtgttaaataaataaaacccttctctgtataatttggtttatttttttggttttatcttattagaaacgaacccaacctgacccgtctgggctcgccgcctcctatatctcttctctctcgattaatatctccaagagcaagcttcgttttcgtgtggtgtcgtttctaattgtaagttttactctcttactcctgtgtcgatctcaaagtatagatattgaatcaactctaattgtttctccgctctattgcataaaccttcagctagatcctgattagtagatggagaatcggattttattgtttgggtaacgaaatcaagttatgcaatcgttacatcaagttggaacactataatttttggggatctgtgtcaaatttcttaggttaagttttggatatcaaagtgcgtgttggttttttgatgtagctcaagttatctagggttttccagaagattagtgtttggaacggaattgtgtttgttaatagtcttatgattttgcgaaacttgtgctattgaaggtgattttttaatattgcatcaaaatgtcgaagaagaggaaggctcgtagcggctacttgaagaagtcatcacaaggaggagacgaagctgtggtacagcgaagaaaactagttccaaaacctggtaaaattgggaaagagattgatgatatctttgctgggagatctcagaggacgccagaggtccaaaatcccgagtcgagagacacgccagaagcccaagtatccgagtcgagagacactagagctgagatgaatgagctcaatgttggggtcaataacaacactgaaagccgacctaggacgagaattctcagtaacgacacgggaccccgatccaggacgagacgactcctcaggacgagacgaccactcaggacgagaactctccgtaacaacagggaaagccgacccagctcgagtatttttaataacgatacggaagatagccgacccaggaagacaactgaagacgggttacgagtgttcacggaaaatgaaattggtttcaacaggaaagatgctggtggtactcgtttttgtccctttgactgttattgttgcttctaaatcttcttaaaccatttcgttttgaaccttttgttttatggtgccaaaggagatttaactcgttctgctattaatggatgtatgatcttataacttaaaaccatatttttcgttcttgttcatgtttgatgagaaaaaaaattacattttactctctacctagttctgctctagtctgaggaaatatctgtctttatttactcgaaggattaagatttcttatacatggaattttgttttccagcaactataatgtataccatcttaatttgttcttccctgtcaaagccattatgtatgacttatggtctaaactctaaaccatttgtgtagtagtctgcaattaatcgatggaaaaaaattctatctttagtaaaaacatcaaaagtataagtatgatcaaaattactttttcacaatatgtaaggttaagagtaacaatagatgagactgaaaagtgtattcacctgaaagcatcaagagtacacaacgaccaaacattatgcatgtcagacactcgtttgtccgtactaagcttttgtattgtactgtataagctctacaaaacacactcgtatgtataaatatatgtaggtatttagcaatagtcagcatgtagctgaaaactggtagagagagatatataataaaagagcccataaaagaactcagacaacaaacatcttaagtttattaagtttccacaacaaacttagaaacacactcctttacatggcatctccaccacaaagaaatatgcaatgaaacgtccacgatttattatccccaaactttggtaaaaatgtctgaaaaaagtccctttcacgattggaggacgggttcgaagctcacttgttccaccaatgcaagaaatccttgcgcctgttgattttcttctgaagctggagtagtccatagagcaaagcctcagcggttggtgggcaccccgggacgtatatgtcgactgggacaattctgtcacatcctcgaaccaccgagtaggagtagtgatagtatccacctccattggcacaacttcccattgaaatcacccaccttggctcaggcatctggtcataaaccctgtgattgtattcaaacattagaagttggaatttcacacaggataaagaagaacagaaccataaatcatttgagttgatccgcatatacaacttctctcaatcttaccagatcaagactgatttctgcacatatctctatatactagtttctgactaatagttaaattcagtataagaactaatctaaaccaacttagaaagcagttaatcatctcccgaatgcatctaaaatgtgctcgtcttattggttgatgtttacacaacctctagctattaagattgacttgggatattttctaagtgtctgggcctaaagttatcattaatataagcacagcagccattggcatacgtttcttaacaacaggattctcatctaaagaacataagttctacacttgaatgaagacttcatacatcaaacaaaaaaaagaggaatctcttaagtgtgccggatatcaatttcctataaaacacacaccaagcagaaaatatgtgcatcaagtctcagattctaactaagcaaaatcatcacgcaagattctaatcagtcaacagacggaactacaaaacaagataatgaaaacatcataacaatgaacctccaacctcttactagtaagacactaacacatgtttccctaatgaacaccaagctagaaaatctgaaattcctaactcccctcaaaagacgggcacagagctcacataaaaagagatataactccaccatatttgttcatcccttaattaaaacgctcccaatttcatgaaattcgaacaaaaaacttgacgaaacactagttaaatctgcgctagacaatgaatacgaactgtatagcttcccaagtcattcttatatccatacagcaattctcaatttgtcacagacctagcaatacaatcagaatacatgaaccctaaaatcgccggaaaagaataaattccaatagaaacccccaaattatatcctccgaaaacctaattcagaggcctctaaagcagaaaacgcacaaagtgaaattagaagaaatcttcccacgacaaaactatatccgagatccaaagatataaatcagccgttaattccatgaataagggagatagagaaagataagcgtacttgcgaagagccggagccatcttattggtaagagtaccggcgacaatcatacaatcagactggcgaggactaggcctgaagatgataccgaatcgatcgagatcgtagcgagcagcaccggtatgcatcatttcgacggcgcagcaagcgagaccaaaggtcataggccagatcgatccggtacgagcccagttcatgagatcatcgaccttggagatcacaaattcggccgctttagagagaccaggaggaggaggggaggtcgaaggaggaccaggtctggtgtaggaagtcggtgatgtggagggagagagagcgggaagggatgtgtggaggtgagagaccgaggcagcggcgacggcgcgttgagattggaggaggagagggaggcgcgtggcggtgttgcgcgtaatcatcgccatttagatttgtctctctgagttttttttttcctctcgtcgtggagttgtgataaccaaacgagtctctaaccatttactaaacgcaggtggcgaagtatttatatgactcgtaatcgtatcattttttttcaccttttgtacagtatttcatttatttcataaaacaatgacttggcaataataatttactcttgtaactttctcattacaaaaactatttagacagaaaatttatcaaatctttaaaagtattaagtttttgattgtggttgtatgactcgtgatatcaagaaaaggaagaaaaaaaaatagatagaaaatttatatggaatgtgtagagccaattgtattttgatatgaattggagaaatcacatgatgtataacagtataattaggaaaaatctttctatttgttttaaaaattcatgttcgtatttacgacgttttaagtcttttgttcatagggtttagattctggagaaatcactttttcgtaattacgaaaactttattttgtctgtcggtttaagtttctcttgattagaagttgtattttaagatgattctacataagttgtattgataaagtttcatatgaccaaaaagaaaagaagtagaaaggctaaaaatggatcaagtcatagcattttctctttatttcttttaggcaaattagctgattagccaattttcgaaatttgcatttatccttacttcataaatcatttagtaactagcaattttcgttaatccacacttataaatcatttatcgtatttgccataatgaaaataaaacaaatatactagtagtcttgtacgtttttggagtgaactcaatttgaaaatgtaatgtacacattttttttttatgtttaacattgggattccctctctttattcgttcccttttctttgaatttcaatagggtttctctgtttccttccaacttcccaaaattcaaaatcccttctctgtcaccggaaaattcccaaaatgcaacctccgatttgtaaacccagacctcagagtcacctcgaatttctgaaaccgcttctcaatgactcgatcaagcagctcttgttacagtaccgaggcggacgaaccaatttctccgatttcgactccattttcactcgtattcttaacgatcttcccgaaccaccacctctcgagctcgtctggttctactccgccatcagattctactcttccaagttagctttccgggatgattccgttaggttaacttcgtgtttcttccagctgatagtttcgttttccgattcgttttccggtgttaagaaggtatcgctgttatctcccgttgtttaccagttgagtcgtttagttatttctaggaggagagatgctttgagcttgttagaagggattgtgagctatattagcatgtactgtgtcgatgaacctggaaatgaagatgatgatgtgttgatggtctctgggtttagttttgctgatttgagtcgagtttgggttgtggatgaagtggaagataattgtagagttgaggattgtttggaggtgttcatgccatttgctagtgaaattttgcgtaaagagatcgattctgagtcctgtggcgttggttacttagctggaatcgtagcttctcaggttttcttgctcagtttgtgctcgaggtttgatttggacttaggtagatccgagctagataaagatctgcaggaatctgtgcttcagatgatatctgggttccacagttgcttcttttttggtgagtgttactttttctttagctactttgcattctgtgggaaatagagaagcattatgtgactagtgactcctttttcataagcttccagatgtctcaattggttttgttttcaatcatgtgttcttgttcttgtgacagatgtcattctcaagatgctgctggagccatatctgcatctaacttcattaatgggagtggttggttctttgactaaactatgtataatctatttagtcttttctctctgggtgacttgaaagtttgaaactagtggcctgtgctttctatatgtgtattcagtcggaagtccaataaagtctgtggtttcttaaccgaatcacattgtatgtaacatggaattgagttgtttttcatggctgtttaatctttcaggttccagaagatgaagcatttttaacggaaatcataacagaagcggtgattaagtcagtggagaagctattcctcaaccctggaaatggaacttcacaaagaagtttacacttgaagaacattgctatcaactggttgtttctttttgacaagactatggcttctctaaggtatgcctataagttctatagaattaattgcttcatttgcttgattgttttgcttgatactccaaacgattacacaggagaaacaaagatcaagaaaaaatcagcatgtacacgaacatgttctccaattcacttattccttatcatttgatcaattgggtaatcagtcaaggtgaagtgattagagatgcagacacactaagaaatttgacccccgcatccttcattggtaaattgcttccctatcgttaatatataggtcatgatgattgttttcgtgagtgatttgttcccatctgttctctggagctgttatgatcacttgactaacccattgtacaaaatctgatctccagaatggcttgtatcactggaagagcaaggaccaagggtgtttaactgtgaccattccaaaaactacgccaaatctgtgattcacaggtcaagaccagatctcagtatcgggaccacattgcagaaacaagaagaggagtttgatcaagatacagacatggctgatgaacaaaatgtgtcatctatctcaattctcagcagaaacacaagaaagcgtaaagaagagaggcataataaggagggagaaacgaaagtgaagctcttcaaacatagacatagcaaccttcaagagaactccaagtttcaaccttttgtcttctcgggtagtttggtgaatgggagtgaggttgaagtttcagacatggagctatgagtctaaaccacttgtagttggtgaaatcgacttaataatcacatatggtagagatgtaagaatgctgctgaaataattgttgtctagagattatataacaagttcacatctgtaacaatttagaatcttcatatcgtaatgtaaactcgtgaatcctcttaagatccgcggcgtctttgaatcctcttccatctccagcatcaaggaggtaatagtaatgtttaggactaaacgatatttgactgatgggattgagcattctgtatagcaaatgaggtgttcttcaagaaatacagagaaataagagtgaatcaaataatggaagatttcccttaagacaaacttaatcaatggacttctgctagaactagaaatgaatcagagtttgttgtggtttagaaggtagagatgacaaagtgcttcgattcatgggtcttggtgtttcatcattgctctgttagtgttaatgttaatgggccttcgtgtcctcttttatgagcttttagttatggctatttcaaagatgaagctttggttgtgaaaaatatatttataatcacaatgggttacattggctctggttatatacttatatgtttgtgttaatgtttgggtttgggtttgcgttttcatgttatgatattgagatactctaatcatgataacattaaaaaagcaaacttgacacaaagtgatcaaaagccttaacccaagcttcttttgcttaagactttatttgaaatgaatttgaacttttagatggttttaatgacttgggtgaattgagagaagctgctacaatttgtatttttgaaaaactcccaaataaaacttaaaaccatgaaatttaacttaaaaatcaccttaaacagtaaacacacacaaaacagaaaataattagactaactctttgtttacgtcttaaagaaaaaagtctaccccaagaatgttctaaaattagaatcgttggattcaatttgaactagctagagtaggaatgtttataaacttcattttctttagccttgaagtaatggaagtttctgcaaacggacacgtagttattaatatgtgcaacaacttccatataagccaagagccatgatctcatgaattggattaaaagcaaagaaatgtctctctagctagctagataatgcaagcaacaaaactaatgtaactttaaaatatatttgtatactttttttgatgctacataattacaaaattacgaagtatgattctttcaacgtgtgggacgtatctatattacataccagtactaaatattgtcggcggagattaaaccgttttaacaaaaaaatattgtcggcgaagattcgtgtatagtcatttctatataaaatgtgagattgattcttagattagatttgatgagtgatggtggcgagatggagacagcaactaataaattagtgttactcatctttttagattaaccaaatggtaagctttaatgttgagtaatggcgtcacacgtgcctttccttttatcagaaattagggaaacatttactgttttcacgtacatttgagcaaacaaccactgcatgctttcacttacaaaactacacatagtcttaaaatagttaaatgggagtaaatatctgaattttttcattattcgctcatatcattccatgaaagcctttaattcgtaagtataaacggttgttccatttttatatattatattacttctcataaatatacttattgataatggaatggatggacctttaaatataaaagatcagtattttgtttcgaaaaaaaaatcattatttccacaagaccaggttcagttgatattttaaaatcatttataaataacaatatagtattataaaaggtgaaaatgtactggaaaatacaaaattgcaaagtctgctaagggtcactattatttgattgatatgaacaaaagtttataaaacaaattccgaaaatcaagaggcatacaatattgaaactatggtatcctaaatgtaaagattaagaaacgtggttggtgggttaatcattaaaaaaacttccatgaaaaacataggataaaaaagaactagatataaaaacaaaagctggtgacaagagctaagaatgtaatggtactaatatgtaatcattactttgtgaattagtactcaaaaacaaatttgtaggtacatttattcggtgagttgtttgagcattccttttgattaattcagccccttttaagtgtcactatgttgttgcattgcgatcaatcaataatgagaaaggaagatatatcaaatgtaataagcactattgctcatctaattgggaatattccatcgtgtttgttctatattaccattcaagttaattcagagctgttaccatgattatataaagttgaaatattatttactgtatataatagcatgttatgatatatatatatatatatatatatattttatattcgtcgaacgaagctaatatacatgtttaaaagctggaaaccataagattaaaagtttaaacaggtacgataattaaaaacctgatataaatgtctttgtttgttttgatatttttttttgtcacggtcaacttattaatatttttttgtcatatggtagaaatggttatcaatttatttatgatgctcagatatcgagcaaataataaacatttggtttaaataaaaaatgaaattcgaaagatttggacggattaataattaagcaaaagggacttacggtttaacgctcttgttgggtgccaatgacacataccaactcgacaagaaaacgacatgtgtgttctcactctcacgcaatgggccctgtttttcgccattgaaaaccacagggtgttcatattttaaaacgggagaagactaatcataaaaggcaaataacgacaaaaataagttaaaatccaacggctgaggatcctccatctccgcccaggattcaccgtggcccgtctcaccaatcggtcaaaaagtcaacagtacgtggacctttttatttcaatgaaaaagaaaattctttgttttggcccctgtacttttatatgtatcactattccccctctatttatttcagatttaaattggatcctcaggatataaacgagtagtatgaatttgtattcacattttaatcaggaaataattgtttcaggtttaggataatgtttttggtagaaaattaaaataaatttatttgaaaaatgaagaaattttgatttatttggtcagcataaaaaagaaaagaaaagtgggaatttatggtgccgacacgttatggggacgaaattgataattaagaaaataaaggggtgagaatgtaaaggttaggaaaataaaaagctgtcggtcccttaaccaaggttaggtatttgatcagggtatatagttaagccctgtgattttatttttatgcaaggtcctacattaaaccgagtcgaccgtcggtgactcagttacgagtctcgcgttaacgagttcttctctccctggttttttgtttttatattttattttagtctcacaagtcttctctatttataaacacaaaaaaacgaagatagccatcgttttggtgagagaagagagaagagagaagaagaaggccatggaaagataatactctgctttttttttagaaatatacagaggaaataaagagagagagaaggagatggcggattcaagcgattctgtctccattgatatggaggcattgtctcttggaggacaggtatgtttttttctggtcttttatagtgagtttaaggagattctgttttggtttactaagaaattacgggaagaagaagaagataggataaattgtatttgttgatttttgtttttggttactgcattcttcgagctgctttgttcctgttaatcattgttttgattacgagaagtagtttttaggaatcgtttgttactaaaacaatgctgggaaatgttcatgttgctagagctgacattagaatatcatgttttggtgtcggttatatatatccaaaattacgacttgtgttgtcgataacccaattcgttttgttttttttgggattttgtatgttctgagttttttctgttgggttctaatgtcttccctcaattcatggtttagttgacaccttaatttggaacatgtgtatttgatccaattcttgttctattggatcacaactcacaagtgaatatataactcttggattttccaaattcgtttttgcattgttctaaggttctcaagagttttttttcttctttctataatgaggttttgggttccactgttaatggttaaattccctttttgtttgaccatgacttatttgctggttaatgcgtatatgattttatggcaaagtttggtactttttaagttgctcactaatcaatttatttttctcatattggaattaatgtttctaggtgtggtcctaatctatatgcattgttcttaccttttcatttatttcatagagaatttagttactgacttaaattcttctactattgttgttgttgttgttgttggtaggaacaccttgtggagactacttatggcccggtttgtgttgccgtttgtggagatccagataaaccagctcttatcacttatcctgatatagctcttaattgtaagcattttcttttaaatcttctgctaacttatcgaatgagccataagttcagttatttgattggaaaatgaaatgctttttctgatttggtaattcttttggtgcagatatgttctgttttcaaggattattgttttgtccagaagctagttctttgttactccacaacttttgcatatatcacatcagtcctcttggccatgaggttggtaactggactctgatcgtttacaaacttttgtatgtttctggtatattactgttaaacgctatgacattcctatgataatgcaattcatatcccttattaaattgctttcttcaagagtcattgcagttgggagctccaatgatcagtgttgatgctcctttgctctcagctgatgacttagcagaccagatagtcgaggttcttaattatttcgggtaagcgaattcatctatcacataagttttacttgtgattgttatttccttgagctgcctagattctggttatatcgttatcttcgttcgttgccaaagtctttttccggagactaggcagaagaaagaaaaccaaaacttttttgcctatatagaaatagaattttctccttatttatttcttgtcgtctcttgtccagacttggtgcagtaatgtgtatgggtgtcacagcaggagcatacattctgaccttatttgctgtaagtaatggtacctcgcttacgcttttcattcaacttgatgtcaaatttttaattttgcttgaaacttaattcttccagatgaagtacaggcagagagttctgggcttaattctcgtctctccactgtgccaagcgccttcttggtcagaatggttgtgcaataaggtttttttccacaaagatatcttcttctttttttgacttggggttatgcctttgattatcttattctcatatcagatattccttaacttattatgcaggtcatgtctaatttgctttactattatggtacatgtggagttgttaaggaaatgttactaaaacggtacttcagcaaggtatggtcaagctattttcatttttcgttccagaagaagacactacttttacaagacatataataaagttttgacatacgttctcataggaagttcgtggtaatggtcatgttccagaatcagatattgttcaagaatgcagaagagttagtaaaatctttcttctctattcttgcaatcttgtgatgctttgttagtttgaattaaaattgacatgttatgttgtttaatctttgactatccagttacttagtgagcggcagagtacaaatgtatggagattccttgaggcaatcaacgggtaattctctagtttctctctgttgatttattttccagaatatagtcttaaagctgataaaatagtatgttttgtggttttggtgaaacaggagagtggatcttagtgaagggttaaggaaattgcaatgcagaacgttaatattcattggtgaaaattctgcctaccactccgaggctgttcacatgaccaccaaactagacagacgatacggtgcattagtcgaggtaccatatcactaatacagatgtcttcagttatggtttttatggccattctaagtcatattacataaaacaggtgcagggaagcgggtcgttggtgagcgaagaacagccacaggcgatgataataccaatggaatactttttgatgggatatggcctgtatcgtcctacacagagcgtaagtccaagaagtcctttgagcccaacccgaatctctccggagcttctctcccctgaaaacatggggttgaaactcaagccgataaagacacgactcgctctatagccctgcctcctctgctacacacatttacatatacgacatgtgtcaccacatcaaaatcaccattgttggattggagctgttcctctgttatgatttgagctgtagatatagacagagatatattgatcatctatatatagaaagagagggagatgaagaagagtaaaaaaaggggatggggaagggattgatatatggtagagtgaaaaaccgccatttatttttaatttggacgtttaatacctctagtatttaatttggaagaaaaataccttaattaattttggttacctatcaaaaagttggtataatcgtacctccgagttaacttccgtcaactaccctaacggaaacatattcgtataatcaagaaaagcgattgtacttatttacataattaacatgagttaagttttaaccacagttaacaattccgttagggtagttaacggaagttaactcgaaggtaagattataccaactttttaaaaaacgaaagttttaataagtaaccaaaattaactaaggtgtttttcttccaaattaaatagtagaggtattaaacgggaaaattaaaagtaaatgatggttttttaggttttctccctttacagatatattatattttgattcattaaacttgtcttaaaggtttattttgtggtagctcttcttgttctgtacattcagttgaataaaaatcatccccttactattttatttcatctctcattcaatcaaatatatgttatggcctcttcaactgcaactgttgtgagaaaaaaagttgctgaaaattggaaattcggatgcaaactgctaaaacatgtgccttcaaaaattaaacagagaagatctgattccacatatttttggttgcacaaagttgtataggccgagtatatgattacaggagaaaaaatcaaacttgttttgtgatacattacatgaaaaaaatagtaaaaagaaacaatgctaattacaagggaaacaaatgggttgtggacttgtgggttagttactcccaggaaacaaacaatgttagtgttaaaatctttttctcttcttttccacatttttcttttgtcaaaattgattgagtgtaccaaactttagttgagaagaacattttgtggttttaggagctgtgggattgacgtgacattagaatcatccgttgtttcccactttctgatcttacaatttctcctttctgaccaaaacaaaagatttctttatttagttatgttctataaacgaagaaagaatcaaccaaaaatcaaaccaacttacctctatagtactgtctggagaaaaccatttcaacaatatcccaagatgtacaactgctggtatcattttgaaaaccagcggtgtcgtaacctgcccaaaccaaaaccacctcagctacttacttgaacttgaacacagaacatataaagaggaggtaacagaaagttatctgatcataccaggcttagagcggttgtcccaaggagaagcagatagagtttcccctgacaattttcataactttaagcttctttcttcaaaataccttatatattcttaaatcctacttatgtgtatggtccattgaggaccaagttgtgttacttacttcgatgaggtgaagattggaggcacggctaagtagtacaaaggcaaactcccctatctgagccagagatattccaacctgcatcaatttgactaaggatggtgaagcaagaaagcaaacatgatagatcatataagtaatttgagtcagaatatgttaccagaagagccgtcttattgttgtatccaaatcccttaacaacggttgtaactattgttgtctttataataataactaatatcacagaggctaacagtatatccacatgtgtccacagaaaatggacattaactaacatcccaatgctggctaggaaaagagcagcaaataaattacggatgggttcgatctgcacaaaaaaatatgaaagcatctctgtcagactatggactcttttaagggtttaagatcaattaacataacgggagaaacagtaaagcctttttgataaaatgtggtcaaaacgtacttgctccaatgtatgttcagcgagatcagtagtggatatcatgacccccgcagcaaaagaacccaattcaagacttaatcccagcttatcactacactgaaagcataaaagactagtcaaacaaacatgttgaccaaaaaacttaatcccaccttatcactagagttcccaaatacacaccaggaccaaataagagaaggaacgcacatatgagaatcttcatgaacgcattacatatgatggatactacaaggaagaatatgaggaagatgatggctaagtaggactcacccaggctacaagtagacaaaacgcaacagccgctaactgatagagttcatttgtctgatatgaagaaattttttaggttaatctacaaactcgatttcattagatcagatgatagggaaaataatattgagaggaaactcatgtacctgtgacgataagctgaccattagcttcagcaaccaaggaatacatgtccgtgataatattgacaaaacagccaaaaacgaaagcaacaaaaccaccctaaataaaagacagtaaaagcatgattaacatcaaatcttcagaatacgccttaggagcaaaaagtctaccagtctttccatacacttttcctattgacaacattccatgaacaatgccagaatttccctcgagaactggaagcaaagcaaacagcaaacccacagcacagtcctacaaacagatgctaaaatcaatcctccaaatcatttgaaaaggaattcaagaataaacactatatgatctacaaagacaatggacattacatgtagatgagaacaatcagatacctgaagaattaggattccaatcgtaacttggccatgaagagaattagttgaattcttttccatgagaaacttcagcacctatagattcaaggcaggaacgcatgatgaacataaaaccaacaatattaaaaagaaagcccgctaatggaaatggttagataagcattatagagttcactgaaattaccaccgcagttgatgacattgacaaaaaggctcctacaaataccccctccgaacgtttaccaccgcataactgcaaacaggaccagttgaaaacatgtcacagagagtatatctgcagaagattttagggtctgtatttctaactttcaaatacacaacactttaagctacataaaccaaatgtctctcaaagaataaaagagacagcaggactcatttttctacgattcaaacagaaagcataactttttttccagaaccactgataaaaaaaagtgacgcaccgacactgtgataccgcacaagaacatgaatagaagaatttgaagaaggcctcccagaacagcaactgatcgaacaactttaagctacatagtaagaggaaaggagctcaagagtttgttatgttaacaatttaattcaacactatacaaatcaaagcggttgatctcaccttagcagtggagaactctagacccaaagcaaagagcagaaataccacaccaaactgggcaactgtttcaacctaaatgtagaatcatgtcaaaattaaagcgcaaaagcaacgtgtaagatgacatatatgtaaaaccacatgagcattatacattctcatctccgtggcagtctaagctctagatttcctattcgaagacgaactaaggtctctcttatgcatgataaaaactcaatttgttttgacccacagaagaaaagagtttctagtcaaagactcatgtcttgctatgtgtaatatcttagtcaacgatcctcagaagaaaatagttcctaacctgctgatctaaataagtattcgagaccttaaaggaatttctcaactaaaggtattgggagtggacgaaagacttaaatcttttgaggtcaaacacatagcatacctggaccatctcactgatgaagttcaatcctccaggcccaatgatagatcctgctagcaaatatccagttatcacctacataagcacagaatgagtcatagctatcagaaaacaaatgcatcatactgaaacataaagtcatattgatagagaataagagtagcacgaaaatcagaccggctgtccagcacaagcaaaggcgataccaccacaagttgcagatacaatgacaaccaccaggtctgatatcagtctacatgccataagaagcagaaatcagatgactgattgaaaattatagtctttttttcaagaatcatgtttaagaccaagaatcttgcctcaagtctagctgcaatactggatactttgatttggaattggatatgatgaagacattgtcctgacacaaggccaaaacttccatgtaagaagtaatgcaacaaatccaaactcagtcttcctgtgtaaaaacttacttttcgatcaatgagagttggagtgtcctcagctctgttatcattgttcaagttgaaaacatcatggagttgaaaacgcctatggaaaattagataacgcttaatacgtcttcaattccagaacatcaaagaaggtcatacaaaggaagatttagaaatataaacgataactataatagaatggtgtacttctcctcttttgtctcatttttcttggtcgactttactcgggctacagtttccagaacagcctgatcaccacaaggtacaacaaccaacctcacattcagatactcaaactatgcaattaatgagagaaatgatcaaatcttaaagcaagccttatactttcaaacaaaagacttgggagtgattttgacactgcttgaatttcctagaaattgtccaactttgaataataaacagaagcaagtatatactaatgattaaaagttaaaacaaacctgttgtccagctacactgttattgaagcttccaggatcagccactgccacaaatataacaacattgggagataatatatcgagtaaaagtgtaagaatacaagataaacactcactatccatttcaggaaaaccaatcacaaaaatgtatcttgtttgtgtaaatattctcgatctagaagaagcaaactattccacattgggagatccccaaaaaggaaagacgaatgtgggatcaatctaaagttccgaactttcaattggatcacggatccaattcaggatctacctaatgaattctagttgttcaatggccatttcaagctccataaagtagcaaaaaacactaaccttcattctggtcgctttcattgaactctttttcaagagcacgatcgatgatgtcggcgaagctaccttccttaggcttaacaagagaagaagaagaagaagcgttgagagatgcgacggaagaggaggagttggcgactgtttcatccagtagatccgaatcagatatagctcgaggagacgcgacggagaagcagaggaagaaggagagtaaaagtaagaggagagctagctgttgagaggagagcgagaatcttcttcttcttcttccttccaccatggcagaacaactggttctggattaaaccggactggagcaacggtctagcagaagaaccggaaccgtcgcgagtctctcgatcgaggacgaggagtgggcaagtggggagagagggaaagtgagattgttgcaatggtcaacaaacagtccatacataggctctctacatataacaagactatactgtacaatttacgacatatctgtattaaaattaattatcggatttttttctttttaatgttgtgttgtttctttgtaatatacagcaactgcaccatgtccatgtggtagattaatgaatggaatgggtctttcttggttatttgattttcgattaggacaaaacatcttccatttctataaaactttagctcaatgtctacgccatacttattattactcaatgcgactctttttcatgtaatcatttaaatccaataaaaatagatttcactgtatttataattctgtgaaatttgtaaacgtgtttttttagttcatggtccccaaaaattatccaaaaaatcgctgtcaattaaaaaattaaaaacaaaaaaaaagaaaaattatattatatatatatatatatatattcccctcacgacaaaaaaatatatatattcgcttctgtttttttcttctcggacaattcgtcttttgacaacaatggcggacaaatcaagcagatcactgatattgtacggagacggcttggctcgatttgtcgatccgtcaaataccaacatccattctcttgcttccgtcgctacttgtggcttcttgagccttcctaatgcacctccaggtctctctttctctctccctcgctatctcttcataaatttggttactttcgtttgattcgtcttgaatttcagtcaaaatcgctactttaagggttttcacttgttaggatttcttagtgttgatcagaattgaaccatatcgtttggattcgattgtgacttttttaatagtccaatatgaaactccagtatacaattgatctaactggccaacttagagttcttgttcagtgtcaattgacccaattgcttaagaaacaaagatttgagatcacttgtgttacattgcccttgctttgacattttgctattgatctaactcactctgctgtttcaatattgcagaaactgagaatgaaagaatagttcgagaattctcccacttgctggatgcatccgaagcttattccatagctgtgagatactttactctctactatattaatttctatgtgagccgagttttgtggcaaaatatttaacaatctcagtgtgtttacatagttattcacgaattagagattaacgaaccatgatctgatttcttaatagagtggactaaaaccaaagggaaatggaaatgatatctcaactttggctgaaaggttatacttttcacttatctctatagttttatactctctttgataatcaatagctggtatatccatatgttgatgctagtatttactttaatgccaggtttatgggactcaaagctgctttagttacggacagttctactctgacttctttcggaaaactgattggcttagatgtattacagcttagtgaaatatgccaagagagtgattcctttccttctgatgccacatcatctaaactactaaagctgcttggatttgaaggaggaaagtgcttggatgtgaacctatatgacttggtttttgttcatttcggggttgatgaatataataacgggaacaacatgggaattctcgactctttgattggcagtattatgggaatggctcaaccaggttcagagattctatcgcggttgcatctgtctgtcgttcttagctatggttctgtcacagacaaagatgtttcagtttttccaatcaagactccacaagaagacattaacccggcatttataggacttgtcccgcgtcagagctacaccatgcgaggtgaaaagacacgggatgatgttcggtaagagattcgatgaatttttgtcaaaaccaaaagaatttgatttgaacttttctgaaatcatcatttcgttcttgacgggtttggtcattcttgcaacctacaggcactactgtcctatgttggtagctcagtggcagcatggggtgacccggaaagacttagttgataccttatcatttgaagctctcaaaaaggtatggtttctgtttaatgcaagttctgctataataaacgtcacggcttcttgtctcaaggttaatttttttgttgtttctctcttttcatcatagctctgtggaaatcttgttataccggctgatcggttcatccacgaagttgctttcaaactttggaaagccccaaaatatggagcttaagcaaaagtaatcatctagtccggatgaattcattctctttccgctgttgaagttgtttgtggattgatctcaaatttgctacctttacataaaggaaagacacaaaagctgttctgtttcttctagattatgtatcgtgttatccatttcatacacacaaaaatagagatataacatatatcctgaagtggtcatggaagtgtaaagattatggatcctcttttacagggtggtaattagtaccgccgatccaaaccattctcaattcatctccatagagcctttggcctttattgtctcttttgatcctccttagatatagcccgtctctcttaaccacccaaatgcactcttcctcatccggattatcacattgccacctgaataatctctccccggcaaaaaccgttgctgtctgaccaaatggcgagccaaacgcggtgaagaacgtgcactcaaagtatgtgtagaaaaacggtatcttaataaatattggcttgaacgaccagcttttggattggcctggtttgagagcatgcgtgcccaatttgttattcgacgaccaacagttaatcgcgaggctacgattccgtcctgggtatatggagatctcgtttcttacctcgaaccgggctgctgatgcggtgtatgcaaagcacgctgatgcgatgagaaggcaccatgtgaatgcggtggctaatcggaatcttgatccgatcttgaacccaaaccccattgctctattgaacatttctgttttggtttttgaggttttatacaaacgggagtgtttgtttaacaacaacagaaaaacggtagtggttttggacgttttgttcgttgagctttcttttcccttttttcgtttttagttttagtaaaaagtttaacaaataatattcggtttggtttcaaacagttttatattgattgaaaaaatctagtaaattgaaattgaatgttaaatttgtttttcttttctctttgttatatttactatttggtttggattaaaaaaaatctcttaggttcatgtgacttttcatagtagtattggactaatagttctttagtcttttaagtcctccctagacccatttacgatactatatccaaagttccccatgatattcataccttatatagtattacattacaactttaataactaccgatgtgggacactgccaaaaaagaagcaaacaaaaactaccgaacgttatattattacaagaacacaactacacaagtaaacctaattctctgctttctctccatctatcgacttcagctactgagtgcaaaatctttttggggtcttcttagttacgtttgcaaggcgcgaggcaacaacaagtgggtttctcaaaaaaaaatagattttcgttttgatgttattcttctagtcacatgaatagaacataaatttgatcagataataatagatataaagacatgtccttaaggagcttaacagtgaagttactcgtgccggtgtgtgagaaaaacaattagtcatctgctactgccaacaaaatatcatccctcaacgaatcgagaacccctaaactatactactattttggtgtcatccgatttcacttgcttgcttcttaagaaatcagtaggcttacacacagtttcgaatacgaagaagaaacaaaatttaacagtaatttgaatatttgaatattgaactaaacgtcacacgattttcgtataaaggatacaaatcttgatatatttttattcagagaaatgaaattttcgttttaaaaaaacaataatcttaatatcagtatatcactaagaattcttctatatattagggattctggatccactaatataaaaccttagcttttctaaattctgtgaatccttcatgtaaaattgcagtacactagtaggactcttacccgagtcccttcatgttccaacaaaacaagctcctcaaatgtataaagtcacatcttcttcaacgacctcagctactaacatgtataatcacttttaaccttcacttggtaatatattgatgtagtccaaggatcggcgacatcgacctctcaatccgaatcatggaccatgttgtgtacgatgcataactttgagttgttgtggtgaccaaggtttccacggctcaactagcttctccgcgggcctcgacaattcaatataccttccaaatatagcataaggagaatacaactcgtaaccaatgaaataaatcccattaggtctaattgcatatttacatgtttgtccgtcgcatagcatcgccgtagtagacaatgtcctgatctcaacgtttgctgttcctgcgctcgaccggaaacgacaattgtggaccatcacgccgttaccaaactgaggaacttcgaattcccattgaaactctgaggatggaaccgatttgtgccatccgatgtctttcttcgatgatcgacaattgtagaaaaccgacgggttatcgacattgtacatttcgtttttgatgagtattgaaaaatcaacatctcctgaatcagctgagtttcctgtttgaatgattacttgaaaaacaaggcaaaatattactagggctttcattttctcagccatttcttattcagatactctcctctttcggattgttagttatatatataaacccaagctttgtgatattgataattgatatgaacggacaataatagaaagagcgttatgatttatgtaagctaaattagttatgtttgttataatactaatcttgtgtctttgacttagaaacttctatcacctgaatttgttttttcacgttatcgaactttagatatccgttgactcaccaaaatttcttccagaagcaaaatttcttaaaactagaaaaataaaatggtcagtattaacatagattttctcggaggcaaacaaagatagtgttagagatgaaagagtatcaatgtaagatcttacagaaatcgaaatgactacctctagaaagttagaaactgtcaatactagtccgaatgataagagctagatttgaaacctaataatgagtttttccgatacatcaagactggtttttgtcctttacatccaatttatcgaaatatacaggaatgtacagatatatttactatcaggaactatctgtatttgcgttgtgatgaagagattttcaaagaagatcggaagatggttcaccgcagaaagcttctggttcgaaagttcttgcggtttcatcattgtacgctcctgggattggcagcgaggatctgtccctaggatccctgtatgttctataagacgttgcaattggagaatcaccaaggtttataacaagaatgagcgataatccgagaataactagcgtgtttttcagtctcgcaagaactggctttacctggaaaaacaacacacacacacaaaacaaatacagaaactttagcagacccctgaaatatgatacatacattagaccaaattcaaggattttgacatgcttcgtgatggatagcttaccgagaaagatccaagaagacggtctcgtgccaagacttctggtgttttcacccatacctgttccatatcattagagattacattaagcaacacaaatgttttcttctacatagcttcttaaccaaagattgagaggtaacaaaacaaatcataacctgaccatcgtaccaaccagtttcttcatctgcaacaacacagagaaagagaaatttcaaaaacaaaaaggagcaaaaaaacatttgatgaatcacaaaaccagttcttaagctt

SEQ ID NO: 1424 - DNA, 103638 bp, Arabidopsis thaliana
gaattcttttccatgagaaacttcagcacctatagattcaaggcaggaacgcatgatgaacataaaaccaacaatattaaaaagaaagcccgctaatggaaatggttagataagcattatagagttcactgaaattaccaccgcagttgatgacattgacaaaaaggctcctacaaataccccctccgaacgtttaccaccgcataactgcaaacaggaccagttgaaaacatgtcacagagagtatatctgcagaagattttagggtctgtatttctaactttcaaatacacaacactttaagctacataaaccaaatgtctctcaaagaataaaagagacagcaggactcatttttctacgattcaaacagaaagcataactttttttccagaaccactgataaaaaaaagtgacgcaccgacactgtgataccgcacaagaacatgaatagaagaatttgaagaaggcctcccagaacagcaactgatcgaacaactttaagctacatagtaagaggaaaggagctcaagagtttgttatgttaacaatttaattcaacactatacaaatcaaagcggttgatctcaccttagcagtggagaactctagacccaaagcaaagagcagaaataccacaccaaactgggcaactgtttcaacctaaatgtagaatcatgtcaaaattaaagcgcaaaagcaacgtgtaagatgacatatatgtaaaaccacatgagcattatacattctcatctccgtggcagtctaagctctagatttcctattcgaagacgaactaaggtctctcttatgcatgataaaaactcaatttgttttgacccacagaagaaaagagtttctagtcaaagactcatgtcttgctatgtgtaatatcttagtcaacgatcctcagaagaaaatagttcctaacctgctgatctaaataagtattcgagaccttaaaggaatttctcaactaaaggtattgggagtggacgaaagacttaaatcttttgaggtcaaacacatagcatacctggaccatctcactgatgaagttcaatcctccaggcccaatgatagatcctgctagcaaatatccagttatcacctacataagcacagaatgagtcatagctatcagaaaacaaatgcatcatactgaaacataaagtcatattgatagagaataagagtagcacgaaaatcagaccggctgtccagcacaagcaaaggcgataccaccacaagttgcagatacaatgacaaccaccaggtctgatatcagtctacatgccataagaagcagaaatcagatgactgattgaaaattatagtctttttttcaagaatcatgtttaagaccaagaatcttgcctcaagtctagctgcaatactggatactttgatttggaattggatatgatgaagacattgtcctgacacaaggccaaaacttccatgtaagaagtaatgcaacaaatccaaactcagtcttcctgtgtaaaaacttacttttcgatcaatgagagttggagtgtcctcagctctgttatcattgttcaagttgaaaacatcatggagttgaaaacgcctatggaaaattagataacgcttaatacgtcttcaattccagaacatcaaagaaggtcatacaaaggaagatttagaaatataaacgataactataatagaatggtgtacttctcctcttttgtctcatttttcttggtcgactttactcgggctacagtttccagaacagcctgatcaccacaaggtacaacaaccaacctcacattcagatactcaaactatgcaattaatgagagaaatgatcaaatcttaaagcaagccttatactttcaaacaaaagacttgggagtgattttgacactgcttgaatttcctagaaattgtccaactttgaataataaacagaagcaagtatatactaatgattaaaagttaaaacaaacctgttgtccagctacactgttattgaagcttccaggatcagccactgccacaaatataacaacattgggagataatatatcgagtaaaagtgtaagaatacaagataaacactcactatccatttcaggaaaaccaatcacaaaaatgtatcttgtttgtgtaaatattctcgatctagaagaagcaaactattccacattgggagatccccaaaaaggaaagacgaatgtgggatcaatctaaagttccgaactttcaattggatcacggatccaattcaggatctacctaatgaattctagttgttcaatggccatttcaagctccataaagtagcaaaaaacactaaccttcattctggtcgctttcattgaactctttttcaagagcacgatcgatgatgtcggcgaagctaccttccttaggcttaacaagagaagaagaagaagaagcgttgagagatgcgacggaagaggaggagttggcgactgtttcatccagtagatccgaatcagatatagctcgaggagacgcgacggagaagcagaggaagaaggagagtaaaagtaagaggagagctagctgttgagaggagagcgagaatcttcttcttcttcttccttccaccatggcagaacaactggttctggattaaaccggactggagcaacggtctagcagaagaaccggaaccgtcgcgagtctctcgatcgaggacgaggagtgggcaagtggggagagagggaaagtgagattgttgcaatggtcaacaaacagtccatacataggctctctacatataacaagactatactgtacaatttacgacatatctgtattaaaattaattatcggatttttttctttttaatgttgtgttgtttctttgtaatatacagcaactgcaccatgtccatgtggtagattaatgaatggaatgggtctttcttggttatttgattttcgattaggacaaaacatcttccatttctataaaactttagctcaatgtctacgccatacttattattactcaatgcgactctttttcatgtaatcatttaaatccaataaaaatagatttcactgtatttataattctgtgaaatttgtaaacgtgtttttttagttcatggtccccaaaaattatccaaaaaatcgctgtcaattaaaaaattaaaaacaaaaaaaaagaaaaattatattatatatatatatatatatattcccctcacgacaaaaaaatatatatattcgcttctgtttttttcttctcggacaattcgtcttttgacaacaatggcggacaaatcaagcagatcactgatattgtacggagacggcttggctcgatttgtcgatccgtcaaataccaacatccattctcttgcttccgtcgctacttgtggcttcttgagccttcctaatgcacctccaggtctctctttctctctccctcgctatctcttcataaatttggttactttcgtttgattcgtcttgaatttcagtcaaaatcgctactttaagggttttcacttgttaggatttcttagtgttgatcagaattgaaccatatcgtttggattcgattgtgacttttttaatagtccaatatgaaactccagtatacaattgatctaactggccaacttagagttcttgttcagtgtcaattgacccaattgcttaagaaacaaagatttgagatcacttgtgttacattgcccttgctttgacattttgctattgatctaactcactctgctgtttcaatattgcagaaactgagaatgaaagaatagttcgagaattctcccacttgctggatgcatccgaagcttattccatagctgtgagatactttactctctactatattaatttctatgtgagccgagttttgtggcaaaatatttaacaatctcagtgtgtttacatagttattcacgaattagagattaacgaaccatgatctgatttcttaatagagtggactaaaaccaaagggaaatggaaatgatatctcaactttggctgaaaggttatacttttcacttatctctatagttttatactctctttgataatcaatagctggtatatccatatgttgatgctagtatttactttaatgccaggtttatgggactcaaagctgctttagttacggacagttctactctgacttctttcggaaaactgattggcttagatgtattacagcttagtgaaatatgccaagagagtgattcctttccttctgatgccacatcatctaaactactaaagctgcttggatttgaaggaggaaagtgcttggatgtgaacctatatgacttggtttttgttcatttcggggttgatgaatataataacgggaacaacatgggaattctcgactctttgattggcagtattatgggaatggctcaaccaggttcagagattctatcgcggttgcatctgtctgtcgttcttagctatggttctgtcacagacaaagatgtttcagtttttccaatcaagactccacaagaagacattaacccggcatttataggacttgtcccgcgtcagagctacaccatgcgaggtgaaaagacacgggatgatgttcggtaagagattcgatgaatttttgtcaaaaccaaaagaatttgatttgaacttttctgaaatcatcatttcgttcttgacgggtttggtcattcttgcaacctacaggcactactgtcctatgttggtagctcagtggcagcatggggtgacccggaaagacttagttgataccttatcatttgaagctctcaaaaaggtatggtttctgtttaatgcaagttctgctataataaacgtcacggcttcttgtctcaaggttaatttttttgttgtttctctcttttcatcatagctctgtggaaatcttgttataccggctgatcggttcatccacgaagttgctttcaaactttggaaagccccaaaatatggagcttaagcaaaagtaatcatctagtccggatgaattcattctctttccgctgttgaagttgtttgtggattgatctcaaatttgctacctttacataaaggaaagacacaaaagctgttctgtttcttctagattatgtatcgtgttatccatttcatacacacaaaaatagagatataacatatatcctgaagtggtcatggaagtgtaaagattatggatcctcttttacagggtggtaattagtaccgccgatccaaaccattctcaattcatctccatagagcctttggcctttattgtctcttttgatcctccttagatatagcccgtctctcttaaccacccaaatgcactcttcctcatccggattatcacattgccacctgaataatctctccccggcaaaaaccgttgctgtctgaccaaatggcgagccaaacgcggtgaagaacgtgcactcaaagtatgtgtagaaaaacggtatcttaataaatattggcttgaacgaccagcttttggattggcctggtttgagagcatgcgtgcccaatttgttattcgacgaccaacagttaatcgcgaggctacgattccgtcctgggtatatggagatctcgtttcttacctcgaaccgggctgctgatgcggtgtatgcaaagcacgctgatgcgatgagaaggcaccatgtgaatgcggtggctaatcggaatcttgatccgatcttgaacccaaaccccattgctctattgaacatttctgttttggtttttgaggttttatacaaacgggagtgtttgtttaacaacaacagaaaaacggtagtggttttggacgttttgttcgttgagctttcttttcccttttttcgtttttagttttagtaaaaagtttaacaaataatattcggtttggtttcaaacagttttatattgattgaaaaaatctagtaaattgaaattgaatgttaaatttgtttttcttttctctttgttatatttactatttggtttggattaaaaaaaatctcttaggttcatgtgacttttcatagtagtattggactaatagttctttagtcttttaagtcctccctagacccatttacgatactatatccaaagttccccatgatattcataccttatatagtattacattacaactttaataactaccgatgtgggacactgccaaaaaagaagcaaacaaaaactaccgaacgttatattattacaagaacacaactacacaagtaaacctaattctctgctttctctccatctatcgacttcagctactgagtgcaaaatctttttggggtcttcttagttacgtttgcaaggcgcgaggcaacaacaagtgggtttctcaaaaaaaaatagattttcgttttgatgttattcttctagtcacatgaatagaacataaatttgatcagataataatagatataaagacatgtccttaaggagcttaacagtgaagttactcgtgccggtgtgtgagaaaaacaattagtcatctgctactgccaacaaaatatcatccctcaacgaatcgagaacccctaaactatactactattttggtgtcatccgatttcacttgcttgcttcttaagaaatcagtaggcttacacacagtttcgaatacgaagaagaaacaaaatttaacagtaatttgaatatttgaatattgaactaaacgtcacacgattttcgtataaaggatacaaatcttgatatatttttattcagagaaatgaaattttcgttttaaaaaaacaataatcttaatatcagtatatcactaagaattcttctatatattagggattctggatccactaatataaaaccttagcttttctaaattctgtgaatccttcatgtaaaattgcagtacactagtaggactcttacccgagtcccttcatgttccaacaaaacaagctcctcaaatgtataaagtcacatcttcttcaacgacctcagctactaacatgtataatcacttttaaccttcacttggtaatatattgatgtagtccaaggatcggcgacatcgacctctcaatccgaatcatggaccatgttgtgtacgatgcataactttgagttgttgtggtgaccaaggtttccacggctcaactagcttctccgcgggcctcgacaattcaatataccttccaaatatagcataaggagaatacaactcgtaaccaatgaaataaatcccattaggtctaattgcatatttacatgtttgtccgtcgcatagcatcgccgtagtagacaatgtcctgatctcaacgtttgctgttcctgcgctcgaccggaaacgacaattgtggaccatcacgccgttaccaaactgaggaacttcgaattcccattgaaactctgaggatggaaccgatttgtgccatccgatgtctttcttcgatgatcgacaattgtagaaaaccgacgggttatcgacattgtacatttcgtttttgatgagtattgaaaaatcaacatctcctgaatcagctgagtttcctgtttgaatgattacttgaaaaacaaggcaaaatattactagggctttcattttctcagccatttcttattcagatactctcctctttcggattgttagttatatatataaacccaagctttgtgatattgataattgatatgaacggacaataatagaaagagcgttatgatttatgtaagctaaattagttatgtttgttataatactaatcttgtgtctttgacttagaaacttctatcacctgaatttgttttttcacgttatcgaactttagatatccgttgactcaccaaaatttcttccagaagcaaaatttcttaaaactagaaaaataaaatggtcagtattaacatagattttctcggaggcaaacaaagatagtgttagagatgaaagagtatcaatgtaagatcttacagaaatcgaaatgactacctctagaaagttagaaactgtcaatactagtccgaatgataagagctagatttgaaacctaataatgagtttttccgatacatcaagactggtttttgtcctttacatccaatttatcgaaatatacaggaatgtacagatatatttactatcaggaactatctgtatttgcgttgtgatgaagagattttcaaagaagatcggaagatggttcaccgcagaaagcttctggttcgaaagttcttgcggtttcatcattgtacgctcctgggattggcagcgaggatctgtccctaggatccctgtatgttctataagacgttgcaattggagaatcaccaaggtttataacaagaatgagcgataatccgagaataactagcgtgtttttcagtctcgcaagaactggctttacctggaaaaacaacacacacacacaaaacaaatacagaaactttagcagacccctgaaatatgatacatacattagaccaaattcaaggattttgacatgcttcgtgatggatagcttaccgagaaagatccaagaagacggtctcgtgccaagacttctggtgttttcacccatacctgttccatatcattagagattacattaagcaacacaaatgttttcttctacatagcttcttaaccaaagattgagaggtaacaaaacaaatcataacctgaccatcgtaccaaccagtttcttcatctgcaacaacacagagaaagagaaatttcaaaaacaaaaaggagcaaaaaaacatttgatgaatcacaaaaccagttcttaagcttatcaatacgttactctcaaagtaaaacgtgtatcggaagtaatcaaaaccaacaaaaaaaaaacaatttgaatcggaagagtttagagcaagtacactcgacggtggcgctaagaagacgattaccgacataagcccaaccaagatacatccttacgacagcaagcgtgacaacgaagatcccgctagagctggcggcgagaatcctcttaacaggttcatattcgggtccgatggatccgaaccaggaaacgggtaacccgacgaaaaatgcgaaagaagcgccggttaagaaaagtctggtagagtactcgattagatctcctgaagcccaggagaaagggaaagaggtggagagagattgatactcgttgattggctgctgctccggcggaacgggacaatcagtttccggcaacggccgtggaggttgaggttcggagttttcggcgccgaatttgataagagaagattgaaggggtgttttgggggacaaattgtggtgtaggaatcgccggtggcgtgacggtggttttagggacgatgtaattggactgaaatggccgagcactgttgcagccatcgcagcttccgtgtctttttttttttttccaatttcggttttgtaaccatcacttaaaaaataagacggctctcattatttcagtctattttcaattctaccccataactttttgcttacaacaaatacaccctttctcgttttatacacaaatttgatgagaaataaaatcttcttcacaaagaaaaaccctttggagtaatcatgatgaaagacaaaaaaaaattgaataagaatttgctggttctctcctaatataaccaaataaaaaaaaattagttttagagaaaactaaaatttagtttaaagcagtgcgagaactatttaattatataaagatttaagaaactagacaatagacttcttttggagaagtataggagactttacataatccaagaagcttttcacatacttggcatctccaactccttcaatctcaactcttctgctgatgtcttctttgcgatcgtaactgataataaagaaggagccatccagatatattagtgtgaatatgaattcgctggtggaatatgaagagaaaacacggacgagtcaaagattgtttcaagtacagatcaatgaagtatttgctgcggattatagaagaccagagtttcgagacgacgatgagcttgactacgggttttgacggcaacttcgcgaaaatctctatgatcagatcttgtagaagataaaatgatgagtcatcttctcgtatatgtggattgttctcctcttaaccttttttatggagattcctattgaaaatatcttagggagcagtacgtgaaacccaaaaaatattctagatctcactattacctcttgtacaagttatttccttatatgtttagaaaagtttacattatatagatgttaacattatgttaatgttatcactatatgtatagattttgtattctcatacgaaacacaactcgataaaatattttattgagtaatatttgacaatttctctgctttttctttcttctccgccagaatcaatttctaaaacggttatatatatataccaacgaattttatttcattttgcataaacaattttataataaatatcgaaaaatggtcaaatgatataagtttgggtaattgggtgagataatatacccaatgggcctcgattaacggtgagaatcgcaattctcacaacacgttacatttcctaagtgttacatatcaaccgttaatgattcttctttcttctaaaaaagcttcaacttctaatttctgccagcaaaaagtcattccagactttttatcaatcttgaccaaatttggcatccattaagaaaacttaattccctagaatgtctcatcattctttttacttttatagtttactttgactgtaacttttacaagaattacaacaatccccacatgtttacacttttacagattttggggcaaatctcaaactaaaataagaaaaggactccataggcttactgtgtattcttttcatctaccattactatttcatttcatttcatttctattctttttttttttttttgttcattcacctaattttatcgttacaagtagcaacaacaatgatgataataataatagttacaaagggttaagaatagggctttttcttttcttgttgagctcccacttcgattgaactccacaagcttttccccaacccatcaatctttttttgtttgtctcctctcgtctgaccgtaataacaaaaagaacaaaaaaaagcaaagaagaatggcaatccccacccgttggctctttgaaccagaccaggtaaggcaacatcttctgtctaacgtatcttacatcaaactttcactcgtattcgctctgttgcttatgtttagaccctgaagccgcttcaaactttgcatcagctgtgtaaacgatggccgtaaatgcggttccctgcataacaatcacaagcttaacctcacctaaaatgtatgatgaccgattacctatttcaatactgatggtttacactacaaagctaatcataaggatacatgtatcatacagctctaataaggagtagtgaattactttttgctaaattttaaggatttgagttttgaaaatgaacttacgtttgccaacattcacggattatctgtgccacagttagatcgatatcatctgggatttcaaggcgtcgattctggaatcccacagctccaacgacttgcatcgggttcaaacctttccaggggacgcgtgaagtagctaattcccacaatatgacaccaaagctgtacacgtcacatctgagcaagcacaccagtcaatatttatgtactaacatttaaaaaggttctcatagtgttaaatttcactcacttctcattagccggttcattcctcaacacttctggagccatccactcaggctgcagactcattaacaggacattgtatcaagtaagttgttcagtttatctttgcaattcatgattgagaaataaggaatagttccatctaagataaaaactaaccgttcctgcagttgatttcgaggacaaatatgtgtggtgtttcatgcgggacaatccaaaatcacaaaccttcacaacccaatttttatcaacaagaaggtttggagattttaaatccctatgtacaacagtcgggtggctggtgtgtaagtagttcattccctttgcctgcaataccatcagaaacaaagcaagtctcagataatttttagcgatatagcagtaacttttagagccttcttttcaaccaacgcaactcatttataccacatcaagagccatccgcattctcctcttctcatcaagctgatggttcggccgatggagtaatctatacaaacttcccctgcatcatatcataaaagtttaacccattaaactcaagaagaatgattaaagaaaattagaaacaaaaaaacacgcatatcatggttagaaaaggattacttcatgtataaaggatgactataaagtaaactagtagaggaagtggtgcattcacgaataaaaaaaaaagaagaatatgggactatcatcaaacctgggtaggaactctgtcaggatggagaaatttgggggacgagtaactgctcccatgaaaagaacaacgtttggatgccgtaacctcaacattatttcaatctatcagaatagataaaaacattccgaatatgattaacgttattgcaggtaatttttacagaaaataagatatctatggttaaatgatttggagttacttcagatttgaactgtgtcaatgcatcaccagagaaatcttggtccagaaacttcttaacagccacttcctgaaaggaaaaacacaatcagtccaagaactccatgactaaaatagcaaatctcttcatcgaagggaatgtgagagtgatttttagaaactgcagattaaaaaacattgcaaggataagtagattaagactacaaaacataactcacagttccattccactctgcacgataaacttctccatatgaacctgcgacagaaaagcacagagaaagagcacatcagatcaaggggcttgtctggtgtatcaaaactgaatagttggatgtaatagatcttatccacaagcataagggtagataactattagtaaatatcaagcttcaccaaaagtctctcacggataccacttcagtttataataataaagttgcataattctagcgaatccaatatctgatataacaaaccttaccaataccaatgcgctcgccaatctgaagatcttcccacataatttcccactttgcagcttctccgagcaatggattaatcccttggtcatgactatcacaaacagcagactccccatcagcagtgccaacctccatattttcggatgaagaagctttaccagtattatccaaatcaaagttcctcttcattgacaaatcgacctccactgattgttggtaactctcggctgtggggttcctttcagattctctcagttgttcagctacctattcagtgtagatggaaacaattaaggacttaaaaatctattaagggggcaggtggaatgttgggtatcttaagagtaccttttctgggtagcatggaataccagaaaccatagaattgctactttcttggcggagctcttgaagcaaattcttccccctcaagttatgtgggttaatatccataaacaaatctgggggaggtgatgcaccactttctaacaacacagcatgtaatttctgcgcaaattcagggttctttgctgcacttatgacatactttgagacatttttaactttaactttctgtgcacaagtcggtttcccagaaaatggtggcatattttcaccagatatctgctgtgagtgcattaacttcccaaaatcatgctcaaatctctctgtttgatgtttttcaacagcacatctgtcactgttttcttcctggtttccagtgaagaagtttgctaccataccagatctagaatctgcttccttcgaaactgaaaatgctggcgtttcaatttctttctcaagtacgggggatgaatgttgcaaagagtccaaattctcaggaaatactcttgtatctgtgcaagaaactggaagaaaactgcttggaacctcagaagggatcagagcacccggagcacccattaaatcaataatgtattcactgcatgtgaagaacgaattaggactctgcaaaaatcactaccatcacatacaaactgagcctaatatcaggaatctagaatgcaaacaatcaaagaataccttttgtcatctagtttaatcaagttcacagccccatcatcagttccagtgtagtaactgccttttaccagcatacatgggagattaatcctatcagcaaggacctagaaaaaagaaaaggatgggagtaattagcttcaccgtacatcttctaaccgtgaccaaaaaaggaactcagcgatgaaaaaggaaataatgagtgttgccactagaatccccaaataagataaccaagaggtttaagaccaaagctagaaacaagtaagaggatttgttataaaccttgaaaagcaaagccctgtgtcgtgcaagaccaacattaactcgaccaagtggaagaatagtagtgttcaaagaatttcttagttcatagctccgaagcatccaccttctcaatgcttcatcagcattttcaacggggccacccatttgctctacaactatatttgcaattttctgagtcaaatcacttgacacctgaccaggagcaaagtctggacattccgaagccaaagcgaatactctcctctctagctcttgtagttcaggatcaatcaatctgttaactagaatgacctcataatcaacattatctgaaatagagatcgcttgaagatcaacaagaagtggcatcttcccctgtgaaagagaattagatgtaatcccatacacatcgtaaaatccatccctgactttctggtcataattaatgaccttatgtccctacaagaaaaaagaaacatcagcttaactctcccattgtcatataaccaaggcagaaaccatccacattgaataaacccaaaaatggaaagttacacaattaggattcagaaatactcgcaacgaagagaacactgcaggcaatagccaagatcctaattcctttaaaccctcgctaatcgagcaaccagactccctaaacccctaaatccataggaatttgaaaattttcgcataagcaagagtcgagatatagagtatatacccaataacgaagcgagagaaagtcaacggcggaatcagcgtcggtgaccggagcagaaaccccaaggctaatcctcttagcggcatcaagctgagctgtatctgcattctctctcggatcaggatcagagacgctgatcgccatagctaactggacttggtactcctcctccatcaaattgaaatcaacaccatcaacagccgtcagatcacggccaacaggctcaaatgtatccagtctcggcattgtcgtggaagcgttaccaaaaccagaggaagagacggaagaagtcgatgcagggctagggctagtactaagaatagggctaggatcgatcataggtctagtcgagtcgtctaacctgtgatggtcagcaaatccgccgccgacgccactacttccgccgatgtggagcttccgtagaagatgcttcatcttcgacatcgatcgtcaacgacgaactgatctctctctctatttctttctctctctaaaaatctccagtttatctctctaacaaatgaagcttcctttcgctatttttttttttttggtagttttttctttaaaaaaaataattgtgaatattgtcacaaagcaaaattaattatagagaaataaataatgcgtacctcgtaaacatccgataaataaaataataataaaaaaaaatagtttccacagtttataaataaataagaaaaatagtagtagagcttaacctgcgccgacatcttcgaaaggtagattcggttaaaatgcgcactactcttcttcgtcaagcttcctccacttacttggtaagaatagctttgactattacacgaagctactatttagtttttaaatgtccaaacaagtttcataattatccgttcgtggaaccaacaataataccaaaaccaatcgtatattagaaacgttacgcacctatagcttggtgcctaggaatatttttatacggccatgaaaactgagataaataagacttatggtcgaatagaatggcgtttggtgattggaggaaacaaattattcttggattctgtacaaaatgaatttattggatcacgcactatgctactgatttttgattgggattcatatgcaaatttttcgttggacttttcttaaataaaactaaaaaaaactttaagctcactttatgttctgtttttattgtctgatttcaaaggatttaggcaaaaaaaaaagccaatttgaaacttgaaatgttaatctatgtgtactagtaaataaacgagaaaacaattatacagttattgtgccttaaactgtttttacaggcatatcctgtctttctctgtataccaagttcttaatttaaactaataagaaaacaacattgatatacttatatatcttctccaacctctgctcttgtgccagattcttcctttaaaagtgttttggcgatagactttacctttcgaaaggatctcccgcctcagcaggatattcaggtgcggctacagctgcatcaatcttctcccttagattgaatttcttggcgatcattggccttacatcttcaactccaattaggctttcaagaaatggcagcaagtgaaggagttctttatctgatgggtcattaaaccagctctctattggcactccattttccacttggaaaccaaatgcctaaaacattgcagaaaaagaaaaacaccaatgagattgtgcaacagccttagatcgagcttagagaattcttaatggcggttctggaatcaacttcttttcatcaaccctacaaaaccaatgagatagcttttgcaaacaaagaacttctactggattcgcccatactacctttcatagttattatagttttcctatactagaagtgtatcctacaattatagctgataaaagcatctatcgatcggtttaggtataaagcataagaatggagaactaaacgtgtttactcactgtgtagaaggataataagagtataatacctgtggggagttatcaacaatgataacacgagataaatcacgcccgaggactgacaaatccttgaggtagttaccatcaaagaaaacacacgagtcacggtacactctatggcgaaagagctttctcttagggtcaagcacgttcagaagttgctcagcataaatactttggctagctgtaaatataatgatctcaaaaagtcgggacactctctccataaactctttgaggtgaggacggcatcgcacatacaccatatgctcttcttcattaaaattcactgggaatgtgaaatctacctcaccacacggctctagagtcgagtgcacaagagtttctgcaaaataaaacatatatgttatagtagccttaaaacctggtgagaaaaaactaagatttgtgtgccattaaaacctgcaaagagagatacaattttaaacaaacgaatcaactgaaaagtagccttaccatcaaggtctaggacaagagaaataggaggacagcttcgggtttgtttaggaagcaagaccggcctgaaagttgggacaacagaagacaggttcggcaagttcttgataaacagataaggatcaaactcatcgagctcctcatcctcttcatcctccatgcataccgaagtaataagggaatcttgaccacgctcgtcaacacattccagcttagagctcttcatcgctagataaatggcagaaaccgaatccaagttacaatttggatctacggtacttgtatctagagcaagcaatcgatcataagggttctgtgcatccaaatcccgagaagaaggagagtcatcatcttccattaaaaccctattaacatcaacttgtaactgaattagacaacagaactcagagcctaatgcaactactccacaatttcaatatctgaccattattcacattcatacccaaacactactataaatctacaagtacaaggttcaatgataaagttttcaaatttaccttgtagaaactctcttcactcctgtagctaccgacaaagcagagacaccggagatagatcagttcccgagagccgtcaaattacaaacaactagctcatacactatctgagaacgaaaacagatcttggattagaaaaggagcaaagccctagatacaattcacaaagaaggaaccaaaacaaaaaagtacccagatttaaaatatttgaaagataaaaactttggagccaaaagaagcaaaattcgaaaacttttcatcgcggaaagtgacagaaatcaatattttaagaaagagaaccgaaccggaactgaaacccacgaaatcgatttcagataattttcaattttgatatatatatctagggcttttaatacgaaaaaaggggggaaaaaagacatgtggaaaaatcaaagctttttactgggataaacgatggataaatctaatctttccgctttctccgcaaatttctctgcaaatttcaaaatttcttcaacgaagcgcacacctagattaaacttcagtagcccagaaattcgagctgagattgaagagctaagaagaagaaacggagagggagagagagaaaaaagaaaaccctagagagagtatattcgtcggaaaaaagtacctccgatcaaaaacgatttcttctagcttccgtcttcttctctctctctcttcgaaataaaagagtaaaatatttgctcgaaatgaatgacagacgactatagtctacataagcaatgaaatatttcatttaaatgccctcatactttattaatatttcattagtaacctcgatagtttttgatttgttaaactaaaccccaaacattcgaagagtattaggccggtaaatgatgacgtcatctccggttggaggatagtacaacgatgccgtagagaactagagaagtgtctttttcttaaaaaggaaccttctgttttttacaaattgaacatgcatgttatggattattggaataaaaaaaacgttttgaagacttttgaatattttctttgaaaaatgaaattatacaagattatgtgacttgattagatttgatgttacaagttaagttggtttagaataatctttgtttagtactactatatataggatgatctatttttcattggttatagctagaatgctatatagaattgtggaatgttgtttcatgtcatgattatgcagatttattaccaaacacataaaagattaagaggtatgacatgaatgacgtgttctgctgattatgtttacgacgaaatccaaataaaagacaatttgatccaacacaaactgaaaaacactcaacctgccaatattattcaaagaaatgaacaacatcaaacttgtattcaagcatggcacaatggatgattcagagaggacatgatggcttaaaacaacattgatatatttacgttcccaatttgagctttagaatatatgtttgtaatttgagaatacatatgattgtttcatcttcttccccatctttctcttatactctttcgttttcttgaatactttgtagcataaagagcatttagactcttagttcattctcttttgaactttgtctcatgttaatcccatttttgtttttgtttcatacatggctatctatgtgggttacttctaagaactacaacaacacatcaaggatatataatttagcaattttcttagttaacttttccttctcctagaaacactaaccaggaaacagttaactaaaaccactcccgccaagttttgaaacgttgtacatatatataggagtgaaaatattactttcagaaacatggggtgggatatatataagatataaaaatgtaaggggttactttacaaataaaatagaatagaaacaaaacgtagacgtttagagcggtcctcgtcaactacgacaacattagagatcgatcgtcgtcgtcgtacccgtcagactcaaggaaaaagaaaaaaagagattccgccgcacgttgttctaatcgaaaaaagcgactctcaataaatctgtcttcccttttctttcttaaactggaagaagattaatcaatcagacacaacagagataactgatttatccacttcaaacaatacaaacctttaaagtcttcacctttatagagagaacttttaatggtgtggttgacgaatcaacagatagggagatggaaaaggaaacgaattttggttgtgggatcgttcctctgttggtcaatcatcatgttcatcactcccaaagttcctctcgattcatttcgccatcatatcttcgccgataaacgcaatttcatgggtatcatcatcatatcacactctctcttcttttttttttatctctctctgtctctgtgcatgtgtaataacgagagacaggtgttttgtgtgggtttgatgatgaacaggagtgcctaatacattgaatgtgatgaccaactttccctttcttatcgttggagttcttggttttgttctttgcattggaggaagcttcttcaacataaggtatcattctctttcccttttttgagttttattttgagttagtttaacaatttgagttgttgtaatgcagtttaaatggtgagatctggggatggacactgttctacgcaggcattgcaagcttggcttttggttctgctttttatcatctcaaacctgatgacaacagaatcgtctgggacactttgcctgttcgtttttctcactttacttttcttcggaacatgaatcttctttcagttatgcattcattgcttcttgattagtgatgcggtaattgtatatattgacaagcacattgtgaatacaaaaagttgaagaatcatcttatagctatgtaaaaaagcttagattagacttcatggtttttcttggattggttggttctacaagcacatagtgaagtgaacacaactcttatagctaatggaaagaagctttagagatttttcgggtgtagagttgtggtttttggttttattgaatggaaagttgtttttgctcatcatttttgatggttggtttatgaatagctgtttgttgattaatgacggtaaattgcagatattgattgcgtattcgtcgcttttctctagttttttggttgagagagcgggggagaaagtgggacttagttgcctcatcttgcttctatttatatcatgtctcagtgttgcttacgccaggtaacattaaaaccaagaaagcattacctcctctgtatacatatatgttcatggttttagtcaggtttcggattgaaattatatgtgtcttagttgatggcagagtgtttaatgatctccggttatgcatgacgttccagttgataccgtgtctggtgattcccgtcatggcggttttgttacctcccaaatatacacactctagattctggctctgggcaacaggtttttaactcaaaaccacatttgcggttttcttattagaatccacggtcttctgatatctgcttatcatgaatgcagcggcgtacactattgccaagattgaaggacttgcagacaacaaaatatacaatgcaaatcgatatatcatcagtgggcattcactggagcatttgtgttctgccgtggctacgcttttacttaccattatgcttttgtatagaagcattcggtttaataggtaacgttttttcactgactctttctctttgatctttgagttccttgaaacctgagaggatttttcacttttcttttgtatgatggaaactaaaacagattaggtgatctcaaaggccgtccttgacattcattactgactcctcaagttttttttctcttgtatttagatgcttctggattcttgtattacaaattttgtttggttgctagatagattttgacccatgatcccactaaaacatcgttagcttggtgtaatcttggtttctggttctgaaacagctttggctttaaggttacttattcaagtcttatatatgtgtttggacaatggacaattttacatgtagtaactaaaaagaaaccaaaagaataatcataactcacaaatacaccttttattttcggtcttgacttgtgacctgtttcttattcatatgatcactttattgaggactttaaatcatagcacagaatgtggaaaaatccaagacagcaatagcattatagaaacgtaatcatacaattcatctaaaatagcaacaatgatgagtaaatctcggagttcatagtccttcaaagaaacgtaaatggtcatcgaatgtctcagcatgcctgatcttagtgatcgacccatcttcttcaacctgcaaaaagaagaatataaatcaatcactttctctcaggatcttgaccctccgctaaatttccgcagaaaacgataataagaaacagtattgttacccagtattccgggggacgcatcttgagattgtaagtggaagccatactcatacagtatgcaccagcgtcatgaaccaccagaccagctccctgtaacgtatacaagaaactaattagattccatattacttgagctgccaaacataatcagatccttataatacctgtggaggagtgggaagctctctgtctttgcccaagaaatcagcagattcacaaacaggacccactacatcgaatttggtaacctctgcttcaggcggtgtaggagagaccaactcaatatgcttttgcgttaaaaaacaaaaacaagaggatgtttagctatagttcaaagggactagaatctgcagatgctgttgtgaaaagtatatttgttttacctgataggcatcataaagactgggacggataagctcagccatacttccatcaatcactatgaagtttttagttccattcgtcttcacaccagttacatggttgacgaaacaacatgtgtttgcaatcagtgatctccctggctcgattattagattcaggtctcgtgaaagaaccagctctcttacctatgaaacacatccaggattctaaagattctaccattccagtacttttgagatcaagataaagaaaagagttttgagctgttgttcttacggtgttgataagatccatgggtgtaggaaggacagcgccggcatgataataatctatccctaaaccaccaccaatgttcaagtagctaacctcaaagccttgacgccggatttcatcaatgtattcaatcatgagaaccgcagcatctctgaatatatccacctgaaataaacagaacatacgtgaatatgcaaagctcaagactcaagagttaaaatttaagagattgattacattaaaacacaaattaaaaggaactatagtcggagttacctttgtaatggtagaaccaagatgacaatgagctccaacaagcttcagctctttgggatgtgccttcacttcatccagaaaccattgaagcttctcgttcctaataccaaacttcgagttcttgttcccagtagctacatatggatgcacctaaaatggtaacaaacagaaaaagctcattcatatccaagctaaagaatagattctaggacatgctgctaaaagattgaaaatttaaccatacctgaggatcaacatcaggattgatacgcaacaacacattgacctgcttaccagaaattcttgaagcttccacaatgttattcaagtcaaactcactatcaacatttacgaaaacaccttcttgagcagctagaactaaatcttccaaagactttccatttccattgaaaatacacctattcatttcatccacaccgaagacatggtcaaaaactacacatcaacatgagaccaaataaaaaaatattcaaactttattattggggataaagaatcgtactttgtgggatcgaaaccagcaagaagagcaagcctgagctcatttccactaaccaacacagcaccacagcccaaactcctcaaatgctccaaaatcttgagattgttattagctttaatagcgtaaccaataacagatctcactccttccaaagcctctttataagcctcaaggtttctcgtgatctgaggtttgctatataagtaaaagggtcgtttctcgactgtttccatgatatcttgaaccttggttccttcgcaatagagaaacccatctgatgatttcttgaaacagtggtcgaaagaggaagcagattctttcgtgagggttttggtggagttttgggaaacggcggctttgacggagaggcgtttaagtggcttcaatgttgacttgagagacaaaaatgggattcttgagagtgaagtctgattcaattggtactgatttagggttccgcggattgatgaaggttgggagagaaattgagtaactgccgccatggctggaggatttttgttaggtgtgcgactgttacagtaacactgaagggtttagaaaaaaaaagtcaacaagtttaagagtagttcctgtcgggtccggttttagatatccgacaatatcgaaccggtggttatagtcgaaccgatggttaaaagaagaaagaacaaagtcgattttaacttcttttggatatggtttttgtccttgggggatagtttctgctagtgtttgttttgttcggttgtgttagttgtgtgttgtaataatcttgatgcttaaggggtcacctaaagcagtcatggaaatctagccctatctataaaaatttgccatttctcatcacctaccaatacttctatttgttcgtattatgcggatattcagaggataatgtaaaacattttgttgaatgctaacgatgaagtgctctatctagccgtgcacgttgtggagaagttatgttttagaatccacatttgttgaagttatgcttatcatactctcttaattatctatatctattacaaagagcaaggaatgttcttagttaggatttgttttgtttggcaaccattgcttctggttatttgtgctctgcctcctttgtaagttaggatttgttttattcttacaactttgcttctctcgtcatactatataatctctgactatgtatgtaattgcattcatgtcgatggttgtgggatgtatatttaggtgtttgactgtaagacgttaaaaacaaactttaccataagttattgggatgtctagacacttttatggtttggtgaagtaggctcaatgttttgccctttatgtttccattgttgatgtttatgtaccttgctggttggaaccacttgtggatgtttccgacaatgcttctctgtaatgcagttatcttttaatgaaatgtgatcgatcttgagtgttatttatttttatttttttaaagactttatggtgtggacacttgaccgggtgataattggtaactatactacatagttagagagctcttgaattattaatcacgctaaatcttgggaattgagagctcggaagcaaaggttattaacaaaattcaaagcagagcagcattgccgatgaaataattattgacttgggatttactctctgaagtctgaaccaaatcgagattattctaattatatttttaatttcggatccctaatctattaatactccaatatctgcactcatttaattatttcctctttttttaacctgcactgacttaaattcaaacttatttcaattgcgtgcacactttagtgaactactaccactatcactatatgtgtcggtggattattatttccgtcattttgatatttaattacatctttaattgttactcttttttgcccattcttcttcttcatttgattacattatactctattgtgaattactaaattctgaaaacaagaaaaatttgagtacacaggacacatcttagtattactcgttactaaaatactacacgtgtaaataattttttcagaaataaatggggccactttgtaagtaataaatcagcttacattaattattttaccacccaataaaaagattccacagacttggcatggaagtcatgaacattcacaaaaatctaagaaaaactgaaaaccgaaaaaaaaacaaattattaaaaagcaataaataaataaactcagaaaaaaaagctattaagattccacaaaaactctgtattgtctctttctctctcactatctctctctcttttgtgagctcagatctgaccagagagaaagaaacaaccggagaagaagaagatgactgaccgagtcttcccagcttccaaaccaccaaccgccactaatggagctccaccagttggttccataccacctcctccagctccggcgactgtaaccagcaacggaacaacaaacggaatggctaatcagaaacctcaagtctacattccagctaaccgtccggtttaccgtccacagccttacagtcgccgtcatcaccaccaatctcgaccaagctgccgacgaatttgctgttgttgctgtttctggtcgattctgataattctgatcttagctctcatgactgcaatcgccgccaccgcgatgtacgtgatctaccaccctcgtccgccgtcgttctccgtcccgtcaataagaatcagccgcgtgaacctaacaacctcctctgattcctccgtctctcatctctcttccttcttcaacttcactctaatctcagagaatccaaaccaacacctctctttctcttacgatcctttcaccgtcaccgttaattcagctaaatccggtacgatgctcggtaacggaactgttcctgctttcttcagcgataacggtaacaaaacttcgtttcacggcgtgatcgctacgtctacagcggcgcgtgagttagatccggatgaagctaagcatctgagatcagatctgacgcgcgcgcgtgtaggatatgagatcgagatgagaactaaagtgaagatgataatggggaagctgaagagtgaaggagtagagatcaaagtgacatgtgaaggatttgaaggaactataccaaaaggtaaaactccaattgtagctacttctaaaaaaactaagtgtaagtctgatcttagtgtcaaggtctggaaatggagtttctagagggaattttgataatttcacaattgaaattttctatataatcttcttctttttttcttctggattttgtgaaacttttggaatgatccaaaaggagatttcttcagttgttagttaaaaaatttcagagaagagtcagagagataaggtattgtcaagtagaagaaggccagagaattcacggcttctaaaaaaatttcttggatttttgttttgtttggaactttcttacttgaatttatatttaatggatacagaaatataaatgtaatacttgtaacgaatggagtactaaaaagctggagattgcagtgactgcgtgatagtgagcattaaagtgagatcgtagtagtaataaacagaaccttaaaaatggaaaagatgcgtggggtttgtgaggagaacaatgaagaacacgagagatgtgttaaatgttagatgttgaaccatctatcgcattatacaacaccatttaagagaaacgtgaatcgtctttagtactctataaagcaagcatatattctagcagttgcatgttataaaattaatacagatcgatcactcaattcatgaatatggtttgatataaacattaaattaaatgtcatgctgtcataaaagatgaattatatggttcatttatctaagaaactttttattaactaagtaagtaaaagtttgaagaggtcatttgcaagtgactccgaccagggatagactcctgaaatcttatccaactatggacgacgacttcatgtcggtgtgtccaaaaatgaggaaaaggaatctgcccaagggacaaatggcattacccgaaacggcaaagaagaaccgcaggaaaaaaagttgacaataacgtatgaggtgtgactgaaaaagaaaaacttgtagtttggtttatgacgtaaatgaataatttggaaatgacaataagtcatcatatctaatttagtgcatgacctccaacgtcggcatatatttgagtcggtgaccggatatccagtacaaagtaaagtacaaaccaaaaagaaagacaagacaataaaatgggtaaagaagacttgcatacacggacgtgatagaagaagacatgcatagtataattctgactttctgagacctttaatgaaaatatttggcaatgtatttcaagaataactatggcatatctcttagattttgtgaaaatagcccataatcgaagaagatgatagtaaaaaaccgaggcccaaatagaacccatttacccaaaatatcaaaaagattagtcgtttggcaatgaaattagaagcccaacacatgtcctaagcctttttcacttttcttcactgtttggttttccgacatcattaacttcgcgggggcaagcgactaacagaagaaaaaaagcgactaacagaagaaaaaaacgaaaaggattattccgccgtagaatccatattctctccctcatcactttgataaacaagagtctcatttttcgcttttccaaagggaacaacttcttcggattattatctatggcagagaagcttgagccggtgaaggttttgtactgcggagtttgctctcttccagcggaatactgcgaattcggtcccgatttcgctagatgtaagccctggctcgtcgaaaacgccccagatctctatcctgatctcctcaaaggtaccttcaaaccctaatcttataattttcgaccgttcttcagaactcgtttgattttaggtttgtagtgcctcaaattttttattcttccaagggctaagcgattcacacaatcgaaaagatgaagatttttgttttaacttgaattataaatttatgggtctgttcaatttggtgattatgttatgttggattgtcaatgctgttgtgtagagttttacgattttttggtaccctttacacttctgttttactggttatgacaatgagtttaatttgatttaagacttactaatatttgagtttgcatacgaattttaaatttgtccagaagcaaatgagaaggcagcagataatgtttctgacaaactccagtcggtgggaatctcttcaggtggtgctgatggggcaccatcttcagctcagactggtaaggaaccgtgtctatgtgtgtgctttttcttgttcatactattgcatacacgtatttggtactgtacatcgctatgaaaaattccaaactgaatggctggaaacatctttaatgtatttgtttttctggggaatctgcaatcgaactgttaagcatgaacgataaatattgctagagtcactgattggtgatgatgcctatgttgaaaggatttggcttttagttgaatttctactcagtaatcaaaggatcttccaatatataggagggacatccaagaaggaggaagtgaagcgcctacctggggggaaagttaaaaagaaagtaagtaatatcgtgtaaatttcgtcccaccttactggaatgtcttaatgcattaccaagtttccatggaaacgtacaaaacaacatgcttggacattccctgactcacatatctacgttttgctttctggtttccattccttcgtctttgacgtggacatgtttgtccggttgtctaattttctaatgtttatggatgctatataggatcgacaggaagttatcattgaaaaggttgtacgcaacaaacgcaagtgtatcaccattgtgaaaggactagaactgtttggtgagttatttacttctttggtgatatatcttagtattcttattgcctggaacaaacctcattcatttttaacccttgcaatttgttcgtcagggataaaactcagtgatgcctctaaaaagcttggtaagaagtttgccactggagcatcagttgtcaaggtatgtatgtagaggatgaatcaaaaagcaaatatgtatacgagatagttttatgcttagacagattagtggtattcggttttgttctagctgatattgttgagcagagctcatggttctttagagtttgtaactgctttagacctgttgtggctctaatttcaaaatttggtgtccagagaaaagtatgaaatattcgtccctagatacatgacttttaaccccttagtttgttttacctctctcttcctcttatgctgagatttttctaatttattgtgtttcagggaccaactgaaaaggagcaaattgatgttcaaggggatataatctatgatatcgttgaattcattacagacacttggcccgacgtaacatgacttctccttttctaatttgttcttggttctcactgcattcgtttgaaaacttatgattgttactttgccaatttctaggtacctgaaagatccattttcttcatcgaagatgggaagaaggttcaggctggttgatgatcacctttgtcctcgttttttggcatggcgggttcatgtagacgagctagttcctgagttttcctatgtgtttggaggaaatcgcatcttgattataactttcaacgtaacgtatagttggatttatcatactattttcttattcgggttgcgatagttccagacatgtttctccaaacatttctctttttgggggtcttaatatttaaaatgtgtcttgaaatgaacgcgttcttcatccttgacccatcatcagctttgtaagaccaaatatactctcattggccaaaccggtgatgatctctcttgtcagccaatagtttaggacagccagattcgaaaactgatcctaaacaaagcctaagaaaacaagtgaaacttttatgatcgattttgtgttgagatatttaaatagactgtatactaccaacaagattttatccataagaacattttggtttctaactgtgtttatcaaaccgtttattatcacccccgagaccgtgagacattaagtaactcagcaaagcgatttaaattcgcgatgtaataggaacaactgatctcatggagtcttggttacttgtactgatatcacctgactcatcatctttcttaggatccaatttaaagaatgagagaacgattgaagcaagctgatgctggtgagaagtgaactcatgatcagctccttcaataacatacagcttatgattctttatctgtttagcaaattcggacgcttctgttacatgcacaatcctatcatttgacccatggactgtcaagaccctgaaattttaagagaagcattagttcctctattagaatgaaaccaaaagagaaaaatccttatagagtatgatgatagacctgcagttttcacgaattgagagacatgcttcatgagcattggttgtgagacggtccattagactctcttctgttacccgatattcaaactttcctgcaacgacctcgaacagtaccggtaaatgccaaacaccatgtaacctggttctaacaatcataaaactaaaaagataaaagaattaccctttctgttgctaacatcaatgaatccattatctttgattctcttgaagtagtccttaccaagccgaaattcgattcctctgtcaagaaaaaaccgccctgagatattcacaacagtctgcacatcattgtactttgctgcatacaaaagcaccacatttccacctgcacaaaattcaatgacaacaacagcaaagctccagtcttcagatattctttcttgaattttctgaaacatgagatccacattagttttacgttcatatacctttactatgtccgataatcgcagaaatcacacggttaacaccacgcaagtgttgcaaaacagagcgcaaatcttcaacttcacggcgatagttaccatactgaaatgatccttggctttccctgaagttgagaaacatgagtgtaaaggcaaaaaaacaattcaaccagtttaaaagaaagaagagagatgttacaatttacccgttgccagcaaagtcaaaccggaaagaactgatcattgctctttcaaagaaacttgcaatggtcagcattggaatccgattctagaagtaaatttatgaaaggttacaatgtttagagaaaaccaatacaaattcaaatctcatggaatctaaaatgtgaatcaaaggaagttgaaaatgatgagaatggtacaaaaaaaaagacctttgatgaacgaaatccatggcagatgacaacagtctctgtagaaccagtatcatgcaaaactcctacgagtttctcaccatgactgttctcaattacaactctttggtgctgaatctctgcgcataatccaatcaccaacaatgttaaagcagatataaagcttgttctatgatcaatcaaacattgaaagccgaatacaatcaaattggtggttctaggaacaatttgaacataacctcacacatcaaaatcgcagtacaatccaaatgataagcgaatgtcagaatcagaagtgtatggatcacaattcaatggtacaactttagattttgaggggtcatgaatcgagaaaggagctgaagcctacctgatttttcgatttgttcatcgctagactgattccggcgagtctctgacatcgtcgcgcggaggagatacctcgaaaagcttaaagtgactcggaattttttcatattatataattccaactagtaaataattaatgtatgatatggtcaacgtaatttggattaggaagaaaatcaatattaatgtgtcgaatatagaaagtgactcttgggattttatcacaatttgttttttattttttttcgtttttagtacttgatcattttgatttgaggttataaatgaaatattttgtcaaaaataacactttcactttttgtgtaataaaaaataattattcgacggttcatgttattttgatctgaagttagaaaaggattattttatcaaaaaaaaaaaatgtataagtttcaaaataatactttccctttcagtgtaatgaaaaaattgtgtcaaaacatgacacaaatgatatctctttgttataatcacaaatttgaaggccttaaatgattgcatattgaaaggaaattccttacataaacaaagaccatcgaccaagttgattaaaagcatgactatttgttaatcaaacgcataaagtaaaatagctatgatatcaaatggcaaataatatgatatcaagtaaaaatagctagctatcagacaaaataatatgatactatttgttaaaaacaccctactattattattggtgtaattacttggtactaatcatgaaccccatattgttgttattggtgtgattacttggtgctttcaacgacttaaggattgagccatacgatcgatgccgtctcattctctttaatacaaactttaaagattagattattacaacttgaaagggtcttttcctcaaacaaagaccatccatatacaggtctatcatatactaaagaaaggataagtattttcataaacaatgactaaggaccacattgactaaaatataattaacaccacttgatgaagtttccgcaatgataatagaactcacatttagtgaataatccaaagaccttacctgtaatgtattagactattagtattaacaaagactggcgactgcaaagcttaattaataattataataaaaattcagtagagctaattaacaactatcagtgggtttcttccacgatacttcgagcttaagacaaaataagaagaatttgtcaatgtcaactccaatggcagtataagtacgatgaatttttctgatgactctataatcatttgatcttggcaagatctcgagagcatttataaagaaattaaagcaacacatacacacatcaatttcgtaatcgttgcagagtaagaccgatcatcgatggctgatgtaatggaacagaatcttcttcaaaccgctgtgcttaaccggacgtccttccatttccaacctcagagaaattggctcaacggttctatttctttctttttcctcctatttatattcatatatatatatatatatatcatgttggttgtgaacaaaaaagaaaagatcatgttggcaaagatctcttatattattagttcataaaaccaaaacaaaaaaatggttaatttctgtttattgcaatttatctattgaatcaggttattaatttctactatatgatactgaaaactaacgattgtcttaattttatgtcacttctggtcctctgatgcattttggaaatctcaagatccaaacggtaattaaatactctacaaattgctaacttgtgacacaaggaactccaaagttgttttatataatgaaatacgtatatttataatgttgtttcagcgccaatgtattacaaaggattctaccatttgttctaccagaataaccctttggctcccgaattcagtaggacaagaatcatatggggacactctgtttcacaagacatggtcaattggatccagctcgaaccagcccttgtcccttctgagtcctttgacatcaacagctgctggtcaggatccgccacgatcctccctgatggcagacctgtaattttgtacactggactcgacgtcaacaacaaacagcaagtcacagttgttgccgaaccaaaggacgtttctgaccctttgcttcgtgagtgggttaagccaaagtacaatcctgtgatggttccgccaagtaatgtcccttttaattgtttccgtgatcccacggaggcgtggaaagggcaagatgggaaatggagagtgctcataggagctaaggagaaagatactgagaaaggaatggcgattttgtaccgaagcgatgattttgtccagtggacaaagtatccggtgcctttacttgagtcagaaggaaccggaatgtgggaatgccctgattttttcccggtttctatcactggtaaagaaggtgttgacacttcggtaaacaatgctagtgtgaggcatgtcttgaaggcgagttttggaggcaatgattgctatgtcattggtaaatactcttctgagactgaagacttttcagcggattatgagttcactaacactagtgcagatttgagatatgatcatggaacgttttatgcctcaaaggcgttcttcgatagtgttaaaaataggaggatcaactggggatgggtcatagagactgatagcaaagaagatgattttaagaaaggatgggctggccttatggtaaatagagatatatagtttatttaaagtactagtagagtatgattacttgtaagaaattggatgaactgggtttgtttttggcttagactcttcccagggaaatttggatggacacaagtggaaagaagctgatgcaatggccaattgaagaaatcaacaatctccggaccaaaagtgttagccttgatgattgctatgaattcaaaaccggctctacctttgaaatctcaggcatcactgctgcccaagtaagttttctcatagtgttttgttaggaatcccatattttataaaatataatttaatagattcagataaaaatcttgaggtaaatgcagtaaaaccatgtaatatttgaattttaaagtcaacatatatatggattttagtcatatttaaaaatccatttaaaataacaaggtttatctttatatttgagattttacatttgaaacttggtaaatctcaaatataacaacacatgatttacatatatttccatattgattaaaaaaaaccaaataaattaaaccattcaatgtctattaagttttaacacgtcttctctagaatcatccggctaatactatttcagcaacttatatatttttatctttgtcatgttgttcataaaggcagatgtagaagtgacttttaatctgcctttcctggaaaataatcccgagatacttgatgctgaccaagttgatgatgcgactctgtttgatcgtgatagctcggttggatgtgtttacgggccttttggattgctagcattggcttccagtgatttatcagaacaaaccgcaatcttctttaaagttattcgtcgcggtaacggatatgcagttgtaatgtgcagcagcgagaagaggtaagattttgaatttgatctaaaatatgaaaccaaaatatgtctgattctctatcatgtgtaaatatgatgtttttgttaacaaatggtaattgatatatatgtaggtcttcgttgagagacaacataaaaaaatcttcgcatggagcattcctagatattgatccaaggcatgagaagatctcattaagatgtttggtaagctaaattaagccctttagaaatgttgtttcttttatttcaccctaattaagactttttattttaaacaatctaacctatgaaaaccacttttttttttttttatctcctagatcgatcactcgattatagagagctacggagtaggaggaaaaactgtgataacatctagagtttatccaaaattggcaattggtgaagccgctaagctttatgtcttcaatgatggagaaaatggtgtgatcatgacgtccctggaagcttggagcatgagaaatgcccaaatcaattcaaacccaacttattagttaatcatataatatgataatctttggactgccctaaaacaaattcttatcttgtcatgtattgtggaatgtttaagatttatgcgtcgtttgtattcaagttattggtgtggtttatgctgtcgttccttgggtgaaataatgtaagtcttctcatgtttcttattgaatttgcacaaataataattagccttctcatgttctatcagtaagactaatgtcatgagttccatagtgtttatcaattgattctcatccatggacaaccaggagtttatcttaatcgatagatttatatcaaaatttaacaagacaaaaatatcgaataattattttaaattaaaatattaaatattaaaacattgtaagaactttgttgtaattttttttggggtaaaatattaaatatttgttgtaatcttctttttctgtctttttgttttttgtttgtcaacattattttactgtaatatatacatcaaaaggatagcatcatacattagagggagtggttttctaattgatatgatttcaggaaaattaaactgctcttttttgttaaaagacaatcaattttttcatcaacaattataaaggactatacaaaattgttaaataattatactaaaatagtgtggtcagttcactagtggtgggtgagtggtgtatgtgagctcaaattttttagggaccgtccatgttcaagtataacacatgataatgtagagtataatgcactgttaagaagaaaaataaatatgtgaactctattggatctacactctctttcaagatttttaagtaaggaactatgacaaagctttatttattgggttttgcccccaaaaaaaataaaagctttatttattgggtttctttactgagatagcattattatgggaaatatttgcgaaaatgatgccatagcattttcttaattaaatcctatattttttttgtactaaatccatgctattttctttttaaaacacacacaaaaatatagaatattcaataacatacacaatgatttatgaaaattctaccacgtcatttctgtgtcatttacgataatacccttgtttttccccactttgttcttttgtttcgagatatgtttaatgtttttattatcgtaaagagattgtcaacttgttatcaaaatagattttgggattttacgcagtgccccttcttaaatttgtggtggagatctctcaattgcattcattaatcatacactagtctttttctgtatcctttaaactgtggccattgtaactcaccttcacttatgttgccttttaatcatttcgtttctttaggtatccctctttttaatattgtcgttatatataataatgtgtgtgcattacatcattcaactctcattggttattgctatactctgccttttcaataattaaaacatcaaactatagatcatgggttccttacaagttgatcccttttctgttttattatatttctccatgcatactttgaagggtgatatgccgctgatgcggttacgagcaacacaactgcaacgaccaaatttcgaaaaaaacataacataactgcaacactgattacttcacataaagtccgtatcataaccatttttctatatattctataaactgaacaaaaagaagagaataaatgataataaaatcataaaaagtgttgatgtttcaaaagaaaaaaagaacttgtttcccccagacgctaaccaagccccaccccagcactgaggagctcccaacatattttatttgcgtgatgggtaggtatggatctacgggtagattttttgtttttgacatgtgaaagttttgtgccgaaaacaaataataatatatttttctgatccggaaaaaaaatgatgtttaaaattttagattagcactagtactatcatttaagaaagctcactattcgaaaaaatatcaacgcaacgaaaaaaatgaaaagcagaagtatcttgacaaaattcgtctagcttgggtgaatcgtgttaccgaaaagaatttcagaagagattcaataaaaattacgcaaaaataaagggttttaccgattcacatacaatactatttagtatttacacatggccatggggctgtgaatgcatcaatcaaaattttagtaaaataatagtatgaagctttgtctctcacgtttcgaagaagaatccaacggcagtgattgtgcaataattgcgagtgacacctacttttacaccctaaagattcttgggccaaaatctcttgcgatacatataaaataaatgccaaaatttgtcatattaataatatatagagcaagatagcagtcagattccgtggtaatcaacggattctatttacatattaataatataattttcataatttcgaggtcaatatttaatcgagaccggtcatcgatgacatattgtacttaaaatgtctctctttcagtttacttcccaaaattaaccaagaaaattactagatggaaaggatcgatcagcagttcagcacttaaaatctttagaaataaatactcctcacatcaagcacaatagtttttgaaccttgtttaaaatcaagcacaatagtttattctcctcacatgttcaacatatatattttttatttttttgatcaatttcaacatatataatacacttttttttaccatatataatacattaatacttcaatacggaaattaaagaaacggaaatcattcacaaaaattgtaataattatgatggaacaaatcttacacttgatgatctaaacaatacttaccgactggcaaaagataaagaaaaaaaaacatttttgtgtttcagaaagaaagagtggattaatggaaaattttacaatggattttattatcagaatttcttaaggttataaataggctagacttgaaagaaagaaagaaaaatacagaaaattacaattatgcccataaggctccaacctcgacgagtctaggaataagctgaccacttaggtgaagtgctacaagtgactcgaagccaccgacgcaagtaccaccgatgaaaagcaccggagcggcttcaacggcgaggtaagcaatttctccgtcgtcgatctcgatcactgttgggtgaactccaacggtcgatagaagcttcttcatgacgtggcacatgcaacatgaggaaaatcgagtgaatatgatgactggatgctctgatatcagccgtccgatctttgactctgatgtttcctcttcatcgaacgacaggctcgtcgaggcggtggaggaggagactgttgatggtgctggaggaggaagaggaggaggaggaggaggatgaaccgtcaggtctagcgttacggcgtcgtttgagcagtttcgtaaacctcgcatcgtcttcattagagagaaagagtacttagagagggagagagagagtgggagtttttgttgatgtcaacgcgagatgagagcgaccataaatggagaaattgggtgtcactataatgacgtaaccattagctaattaattattttatttgtttttaatttatatgtcactttaataaatttgttttcgacggtcaccttggtcgcttcttatttatgacttatatactgtagcttggtcttgttttctttaacaaccatatagcttggtctaaaattctaaattataacttaatatatatcgaaaatggacatataatggttatgggcatctaagaatggaatactagatattttgttggcattcattaatcttagaaattcaaagattttattacattgtacatgaaaaaccaatatatctctcaaatcagcggttttattttattttattagactgtttctcactcacatatacgagacatatatatgttaacaattttctcatatatgtaacgtaaacatgcatgtaccatattttacagcttgtttggtattatagtatgtaaatagatataaaaggaataaaaacccaaacataaaagaaacaccttttggtttgagttttccatgaaatctggcgtacgtggaggacgagatcctcaaaatatttatatataacttggtatatacgctatacggcagcatcatcgttaatcttacgatttcttgttaatgtattggtttgaatcccatgacgttaataatgctttttcaaatcaaatgctaataaggacaaaagacaaaaattgaatacgatttctacgggttcgtacgttctgcctatctggaaaaaaaaatctaatatttgtttttctattcaaaatttggttggcacatgtgagaacaagtttttagggaccatcaccgtggttaataacatcgtttcaattattgtttgagcataagaacaaaaactattcggttcataaacaaataagaacgtatagcaaagcgctataaaaactgctagctagtagtacccaagacttttgtgagttaagtgatgagacaagaatatcaaattcttacaaatacatgagccccaacacctctaatttgatgcttatttaatacaatattatatgcatgttatacaagttattggatgtcattgtctaccgcacatgaatatgaacaattgtagtcaactaaatcaatgttagttttagaatttttttgaaaaattatgttgttactaatacatgcaatatacaagaagaagaaaaacagtcttttttgatgaactttttttacaggtttaggtaattaatttggagttgaaaacaatagttaaaaagaaggagtattgacaaaaatggagcgtgtagcacacgtagatgaatgagaggagaaggaagcggagagtggtcacatggacggacttatgtgggctaaagtaataaatgatgctgacgtattttatttgatttaactcagggtaaattggagccacttgacgtcatcagctatcagatcaccagaccatgtctcagctaacgtcgacaacggtatcttaccaaaatatttttattatttttgataataatataaaggaacattgaaattcatacatatcaaaaatatattggtaaaggacttgaaaaaataaaactagtgatataatttgtcaatgacatttttaatttctttctgttctatcttaattcttaatatatgttttctatcttagttcttaatatatgttttagagattacctttacttgattttaaatatattattcgttttagtattatgtagtatttatatcatacagagtttttccaattattagttgaattgtttaagttatttatttagtactgcaatatagtcaaaacgtgattattagtgcggctttaacgaagtttgacatgagtgacaaattgcaattggcaatgaacaattgagaatattcccaaagaatatgaaccaaccaaatgtgaatcttaatattcaatcttttaaatagacatgaactcattgtagtggaagatgcagtagagtcatcttttctcttaacatttcctccatgtaaacaagttttcttcatcttttctcttaacctatccatattaatgcttaattatcttcattacttttagatttgtggaatatataagtagtttaccctcttgggcttacattagattttttgatgctttgaagggttaaacatattgattatactcatcgttgattttttttctctttttcttctttgaatactcatcattgattatactgaaaaaaatgtttcataataatttgaaatattaattaaaagtaaaaataatttatggaagatatttaaattaagttgcgttttaaatcatttttgaatataatctttttgatatattaagtagttttaaagtctaatttattagttttttttgtcaaacgtctaatttaatagtagttacttttatataatttagttgatatctgttttaaaataaaataaaatagttgttggagggtcgacagattcagatcatgacatcagggaccaatttttcttcacaacgaaaaaaactgtcaacgtcggattgcgtcacgctaatgtcttttttccttttaacgtctgcgtcacgttggtgctatagttaaattattatgtccatattcgctagttgtttcttctttcttaattttaatagtgaccaggatttggtgttaaaaaataaaaaataaaaaatttaagatttcaaaaacatgcaaaacagaataatattaaacatgtaaacataaaaaattaaaaacatacataaacaacttttttagatagaaatttcttaattctcaacaaggtaatatatgaaatttgatcttcaaaaccattattttccctgctgtgaagagcaaatcgttcgtcttttattttgttgggtctaacttctacataacttcagacttcattttaagtggcattatattgtatatatctatatgtattgaaatgcaaaagagttaaaaaagggggtttgtgaaaacgcatatttacaacatcttaagcttggtccagtggtctcttcagatcatgtgagtgagttaaggtcaactaaaatttttacatctatgaaaatcgatgtgattaatttctaaccacgtttttgaataagaaaaatatccacgtttccggagatctattccagctattataaacaaaattggtaagagaaaagaaaataaatcctggtcactgtgtattacactgttaatcttttttaccaaacccataatctgacagttcaaacaataaatttgtgctgcaattcaacctcaaaaaagcagaaagcatttgcttaatctagattgggttaataataaaacggcatcacaaactcataaaactctattattaaataaagtaacgatgaaatagagaatattagagttttaaattaagcaaataccagaagagtatttaagtttttaacaaactaataatgtcaacgttagctaagtaaaagtcgtttcagagaagataactgattagttatgagagaaaacgctagcctggcattaatacgagaccattcattatgtaaaatatattcaagaaaacgaaaaactctgagacattgatatcttgtagatttttccctgcagggaaaaatgatgagctctatagtctcatggtggtttttttgggtaatcagtgctgtatgtattctcaaagtggagtttaacattgtggaaggaggagcctatgaagagactaaggtatatattatgtaacaatttccttaattactcatggagacaaacgaaaaacgtttgggtaaaggaatgattatacatatataggtccacatagtataccttggtgaaaaggagcataatgatcctgagcttgtaaccagctcgcatctcagaatgttagaatccctactcggaaggtaccaacaaaccaagattagacaagtaaaacagtatgttgttggaagtaatatttaacagattttgtggaaatatggttgcagcaaaaaagacgctagtgagtccatagttcatagttatcggaatggtttctccggctttgctgcccatcttacggattcccaagcggaacaaatctcaggtgtgtacatctaatgactttttagtagaaagatataggaagcaaattagatcaaaggttaattaatgatttttaatcttcataattatgattagagcatccagatgtagttcaagtaacgcccaatactttctatgagctgcaaacgacaaggacatttgattacttggggctttctcatagtacaccaaaaggacttcttcatgaagccaagatgggcgaggacatcatcatcggtgtcttggactcaggttcgtttttcgatattaaatttccgacaattggacacaactagtatatacatgtacgtgtgtttgtaggtgtgtggccagagtcacagtcgttcaatgacaaaggcttggggccgatcccaaaacggtggaaagggatgtgcgtggacggtgaagatttcgactcgaagaagcattgcaacaagaagttgataggagcgaggtattacatggatagtctattccgaaggaacaaaacggatagcggaataccggacacggagtacatgtccgcaagggaaagcttgcctcacgggacccacgtggcctccacagctgggggatctttcgtctcaaatgtgagtgacaacgggtttggagtgggtacaataagaggaggagcccctagggctcgtatcgcggtctacaaagtgtgttggcaaagagtagaccgcacctgcgcaagcgccgacataatcaaagcgatggacgacgccatagccgatggagtggacttgataacgatctcaataggcaggccaaaccctgtgctgactgaagttgacgtgtataatcaaatctcgtatggagcattccatgcagtcgccaaaggtattccagttctcagtgcgggtggaaactttgggcctggggcttacaccgtccaaaacatagctccatggatcataacagtggctgccaccactctagaccgatggtatcccacacctttgacactaggcaacaatgtgaccttaatggtaaaccaaataaaagaaaactagctagtgtatgtgtagttgattctcttttgacatttaaatgcatgtgatcttctaatctatattactatgtaggcacggaccccgtacaagggcaatgagattcaaggagatctaatgttcgtatatagcccggacgagatgacgagtgcagcaaagggaaaagtggtgctaactttcacgactggaagtgaagaaagccaggcaggttatgtaactaaactttttcaggttgaagcaaagtctgtaattattgccgccaaaagaaatgatgtcatcaaagtttccgaaggtcttcctattatcatggtcgactatgaacatggatctaccatatggaagtacctaagtatcaccaggtagttattaaaaccatactgcttattttgacctttcttattatatgatttgcattgtgtttaatattgattgaataaccacttaattacagaatgcccaccataaaaataagttctgccatcgcgctcaacgggcgtcttgtagccacaaaggttgctgatttttcagggagaggacccaattccatatctccatacgttctcaaggtaaacttgatttttctgatccatataatgataacatattacccaattttaaatgatcgaataataataatgaaaaaaaaactctatttatcgatatttcttttttgcatcacacatagcaacattaactttttacagcctgatgtagcggctccaggtgtggccatagtggcagctagtaccccagaaagtatgggtactgaggaaggattcgctattcagtcaggaacttcaatgtcaacaccagtagttgctggtttagttgcactacttcgagctgtgcatcctgattggtctccagctgcgcttaaatcagctctcatcactacaggtaaactaacactttttttttttttttttttttttttttttctgtagtttttgtttagcagaaaaccttatacaggtttgaatacgtatagtgacataataacaatattaatacagaccaaattaagatattaagtcaagatgtgtatagtaattaatctaattagttactcatttttattggttaagcttccacaacggatccctacggagaacctatcttctcagaaggaatgacacgaaaactagccgacccatttgacttcggaggaggactagtgaacccaaacaaagcagccgaccctggtcttgtctacgatataagcgcagaagactataggctttttctatgtgcatcccattatgacgagaaacaaataaccaaaatatcaaagacacatacaccatatcgatgtccgagtccaaagccttctatgcttgatcttaatttgccttccataaccattccattcctcaaggaagatgtgactctcactagaaccgtcaccaacgtcggacccgttgactctgtctacaaactcatcgttgaacctcctttgggtgtcaaaatctctgttacacccaacacactgctctttaactccaatgtaaagatactcagctataaggtcactgtctccacaactcacaaatccaactcgatttactattttgggagcttgacttggactgatggatctcacaaagtcactatcccattatctgtcaggacacaaatgttgatgtacttcgaccagtgagtttgcatttttttcccaattaccatgtctttacttaacccagagcggtggtgtgtaaaaaattcaataattgtgggggaataacatatactatctaaaaaccatcatatactgcaacctattgttttctgccacttaaagaaaaacatggattcaaagttgaaattctaaacaaatagaaacacacaaaaccaaaattttgtgtttggatgttcttgataagcattacattatttttatatatctatatatatattaatatatgcgtttgcaataggtaacaaaatgtatcttataatttgctctcttttttttaatcattttttcattataatttccggttgtccaattttatttgtagggattattagaaattttcgaaattttcgggatatccgtgaagttgggccgaagcccattcgtctctacgtgtcaaaatgaagtgatttggtttttcttaataaataatgaagtgaagtgaatttcgatgaagaaagaaagacatgttataaatgctgactttttttatttcatacatttttaagcctcgatcgagcggaatacaggtacagagaggacaatcaattttaggtaagccatgttggggacatcacttttcaaattgtcttggaaaataaattcaaatattaaaaggttaatgtctttttctatataacagcataatccatatatatatatatatatatatatatatatatatatttttttttttttcgcaatgcattaatgaaataattgcattagaaatgaatcattcatgttacttttatttttatatcataaagaatcccatcgaattttagatatcgtaagtaaaagatacggccgtgaatgatacaaaacagaaaaaataaataaagatatatattggtgcatgcatttgggtgcttgcattggttttgtatacaaaattggcccggtcaatggtaatgaagacatgtatcatataaaattgttgtagatatatctaagattatttatttatgttggcatgtttaaagaatgataaacctacaaactcttggtaagaaataaaattattaactttcgaaaagaagaagaggctggtaactgaatgcattataaaattaaaatttcggccgccagtgactttttagtcttcatcaaaagtgtgaatacttagttctggtcacgcatgactcatagagtgaaaaaacaaatacgtacgggagacctgatactaagtttattttataagaaatgaaaaccaaattctgaaaatttgctacttaacttctctttttcccaacaatgcaaaattgaatatgaatggtgagataacaacactattaatacaatcattaggttatatatgcatgacatttatactattttaatttgtttatgtttatacgattatatattcgatgtttcggaagtgatgtgtcttatatgtttttaatttttctggtttttttcttcatatcgggttattatgggaaagataactggttgctatatcgatgtattgaaaataacctaaaaactaaatttagaataataagtaacgttgttttcgaatgatttccaaaaaatcggaatggaaataagaattaacttctcaacaacatgactctaagatctcaccaaaaataacaacatgactctaagaataagaatatcaatgcatcgttatatatatcagccagcaccaccataccatgaatgcatgatcaactataagtttataacagttcacatatccattaatctaaaagactaaaaccaagaatggatcaaggtagttccgtttaatttattgcctcaaccattaataccctcaagaaagcaaacacgttaaagaatttgatatatagtgatcaaacgagaaaaaaaaatggataccttatattacatagttgacaaaaaaaaagttggatataaaaatacaaaaggagacagattggcgttggacgagggaaggagctgtgggaggctcatgtgggcttcctctgttcgccatataactaatttcgattttagtgtatacgtatgcaattttttgtcacctatggccgttgtccctggatgatgaccatggcctacaagataaacaaagaaaaaaaaagatctgcagtgaataataaaagattcaaagtgttcaggtaatttggttgagtatgtgatgaaaattgtctaatggtttcaagaaaaaaaaatcaagtttttatttgaattttggatttttgaggaaaaaacatgtaaatacgctaaatgcaccaaagtgatgtttttcaacatcttgttaactgttattcggtagattaatttaaagtattttttttatgaaactccgatcgattaaccgccaaaataactttttatttacctccaagataccataatcattatccaccacattttcttaataattattattaagctctataattctgtaaaaaacccatttaaatacaaaagccgatttcttccaatctcaagttagagttttttctccattttgtttgcattctatatagtatcgtcacacaaaggtttcgtcttgtcactttactttgtttgcccccctttggttttttgtgcttcccttctcttttttttttgtttgacgacctgagggaataccttgatttgtagatttttatccattaatggaagataatcagcgaagcagattcagaaaaatctgtgtcttttgcggaagccactctggtcacagagaagttttcagtgatgctgccatcgaactcggcaatgaactcgtttgctctctatctctcttctcttcttcttttgattgcttcttgtttggttttgtgataaaaatatgaacttttcttcaaatcaatacagatatcaccttcgctcggtttttgaatgtcaaaatacgaactttttagtttacttgttcatttcaaacaatgggtttggtggattttatttgtgcttgcgtctattgtaagcttttgtggtatttggggtttgttgactctttaaatctaggcatgttgtcatttgacaaaactgtgaaatttcttcaagtgttgaaatgggtcttcctctgtttttttaaatgtgttatctttgattgtgtgatttttggaatgtgtaggtgaagaggaagatagatttggtttatggaggaggaagtgttggattgatgggtttgatatccaggagagtctatgaaggtggtttacatgtacttgggttagtttaagaatcctcaattagttttatagctctttcaatctcttttattttcaaacttagagtgattggattctctgtgattgcagaatcattcccaaagctttgatgccaattgaggtatgtatcttcttctagaagctcatttgtccaggaagtagtaaacttggctggagttttgaagtttgtctaatgatgaatcatgtgtctgcgagttattcattttttgcattactagctcttggttcttgcctgcgtttgtatgatttaagatcaggagagaaaacaatgttctttggggattgtatggtttgtatcgtgcccctaatcttatgacttgggtcgcatcagatatctggtgagactgtgggagatgtaagagttgttgcagacatgcatgagcgaaaggctgcaatggcacaggaagctgaggccttcattgcactccctggtgagaaaacgctttaaaactgaatcctagctaattgttaaagttgaaagttttggtatcaaaaactacggggttttgttcaggaggttatggaacaatggaggagctgttggagatgataacatggtcacaacttggtatccataagaagacggtatttttaacatttcctttgctcagtcaaagaagtatgctactaattcctctgttgattagtttgggattgtttctgtaggttggtctattgaatgttgatgggtactataacaatttgcttgctttatttgataccggtgtcgaagaaggttttatcaagccaggtgcacgtaacattgtggtttctgctccaacagccaaagagcttatggagaagatggaggtacattaagttagccttcccttttcttcttattatgaggttctgcttttacttcatcttatagagaagaaatcaatggttatctcttagtgaacacaatctctttaaaaatcaaaaggaacagcaattgcgtttcaataagcttaggatgtcatctttcaaagattttagacattattggtattattgtgtaacacaaagttaagtgggagtgtgttccataattttgtttctcaaagacttatcataatcttggcaggaatatactccttcacacatgcatgttgcatcgcacgaaagctggaaagttgaagaactcggagattacccgggacaagaaaacaagccgcaataaaagcaattattattgtttagcataagctatttccatttcaagtttagtctctaaattatttgcagaatccacaatgtgtataagaaaactcaaatcttgttgcaatatgaaacagcacattgggtccccaacatgaaaatgttgctgattatgttagttaagtttggtattttgggtaaagaaccaaaaaaaaaaaaaaagacttcaccttttgtgttgttgtgttaaaattttggtttcccccaaatgaagaaaggaggaatctttttgattgtgggtgatgcagaaaagtccccacaagtgtcgtgtcatagtgaatgtcctttgggataggagtgtggtcccttgtttgtatcattcgatggcttcaatagaaaagcacaaattgtgaatgatgtgtgaccaagttggacatggatgggtttcttcttttttgcttagtgccatttgtggtggggattgattggctatcttttcctctttatttatttcttttgtgtgtcacattcttgtttctacgttggatcatttcgattaggtcattgactagtttaaaggtgatgatgatgaccttcatggtaataaaagatgattttcgaacgtgtttttagatggtaactaaagttttattagagattcggtcaaagtttgattctttaccactatttaaatagataatgacagaaatccgctagaagagagtaaaatatttctctcatgtgatgttatcgacaacgtaccgcaaaacactaatagtagcttcaaaatttgcattcaaattgcatacctatcaaatatattttaaatagtgtgtacttgtttgaacattgtatgtagtccagcctcagttagtcgattatatgtttaaatctcgcacatatgggttctaaaactctacttcgaacttcgttgtattctttgtcaaggagaatctctatcaactttaagaactggtttggaaggatttcaaatcataatatcttctgtgttttggtacaatcagttgaagtacctcgaatcataaaaatcttgaaacattatcatttactagtcacacttgcgttaagggaccaagaaaagctgaattggggtgtggggtttgggacccttgaagggaaaaaaagaaagaaaaggagatggtaaaatactaaaatagtaaaatgtgaaagtgtcacttcattgtcaaacatacttgtctccttcagttttgatgtatgtcctgatttggtaccaatataggttaagccccaacctaattgtagttgatgtttgtatctcttgcattatgtgcatctcactttcttccatcttttccccaacaatttgttaaccggtctttttcagtttctgtaccaacaaccgacttccacatccatatctttgagtttttttttgttctcaagatattaatgaatatgtacaagagacgaccatggaagaacaagtacattttaggagatatataacaaaatacttagcagtggtttataacttggcttggttttactttactcatttgcgcaactcggactagagaagtcgatatataaatcaaaccgaaccaaaattttcaaatataaaccgagtcaaaatttgagaccaagtgtctcccactcaactcttaatgatcgatcatgagaatgattgatcgaccacagggcctaagtgatgacgtgtgttcgttataaatgatctgtcttcgttcattttctggtcttttctgacttaaccggtaactcactaaacaaggatacaaagagtataacacaataaaccaaagttggttcgtatatcccagattgtttgcacaattagagtaacatgtccaagggaactcatatttcacattttagacatcaagttacgtcataaattgatcccaagctctgacttttaagctgttcccacaattggaatatcaatgaaatgaaaccccggaatatgaaaatctgacacctttagtcataaattcgagaaataacttgtgtaacataagtatgcactccgcaaatattcttcggtgtttctgaatccatttagtctttgtcttttgatggggatgataagagatggtgtaatgttgctgcctggataaccgcacttgggtttgtatcctttggtgtgtgagaagttgtccgccttatgttgaaacctctttctaaactggtttgccttgaacgccggaatgaccgtggaagatgtctgataagccgtgatgaagtcactagtaatacaacacctagcatgataagtaacctgcaaaaagtttcaagagtccccaataatcaaaatctatagctctgatggcagaaaaactatttggaaagatcttttgcaacttctgattcatgtgtaagtgatgtttctctaatgactgatagaagttgtctttaactagcacactaacaatacaaagaaagtaatgagtagaactttaccatcccaggagaagtaaaagccgtccagatggtgaagtgggtaatttctcacccagagcaaacattcctgcaaccacacctgttacaattgatgccacagcagcgcaagtggatactacgattgctctcccatgttttagtccccgagtctggtaaagtaaaaacaaaaagaagacgagaatcatggttacttaaaaaacctgaatataaacctataaaaaactacatgtacagagagaatcctttatgttatacatggcggtgcattacacattcatatggagataagactatgaggaagtgtaaaaagactaagctcggacaaagtacctggtagaaaaatccagttccactacagcatatactaatcgaaatgcacatgggaatgaacattgtagaaaatccctgctccacgaatacaaaacccatctttgatactacagatgccattctgtgatcaaacgagttataacttattgtcagctacgcaacaaacgataaaatcagttcaaatacatttttctctatctcaaatgtttctgcagacaccaggacataggttcttccttttatgttttctaaaattaacagcacatgttaatggatatataggagataatcggtaaacatcagaggctcggtacataatgcgaaaacgatatgctctttgatgtttatgggcactgaaagatacccgaataaaatgccagattccaagccatatatgatttcttccaccacttcatattccccctacaaaaaataaattaggctaagtgcatttggtaggagaaattaaagagagtaacattaacggtgatactagttcttatagctcaaaaaaattagatagctaagaggatgatataccagctcctgctccctgcgctggcgtttgaagatatgaagccacgcatttagtagtaccttgtcacaaaaatccaacacagaagttattagaaacattgccattaccacagtaattaaacgatatactgatattatctgataaaaacaaaatataaaaaaaaacaattgttttacaactcaatgatgtatacaagtcaagagaaagccatcagtcaacagaagataaaaaggagatgatgacaatagaggaagacgttctatcatataccatggatgaaaggtacctacaaacaagatggcaacaaccaatgctagccacagcaactggaagacagatattaatgatgcttcttgctcctcaccaccagccccaactcctacggcaaaatgtataaatcgtcaaaacatattaggtgatttcctgtagtatcataatatctttaacagctaacaacagtatgcagaagatgacagtaagcaacactcaacgaagcaacaacgattgatgttacctatggtcccaatgccggcaacagtaatcccaatccagtcaaaaacattcatgacttccttcaaataaaaatgcgaaaagacggaaagaatggcaaggccacatcccgagactggctgaacaactgacacctggaagcaccagatttccaaaagctcacaatcagggtctaaagttaaccagcacagtaaattatcataccagacatctcaaaggcaaactatcttggcaacaaaatgaaagattgagaaaactttacttacaggagcaagtgatagtgctctcagcatcaacaaagcaccaacaatgtccataagaaaacctaacgcccatggtttgttttcagcatatgctcttaacacctgaaattcatcaattatgatcaaatgtgagcttcccatagatatattgaccacaacctctaactcatcaccatgattgatatgaaaaacccaagaaaacatcgaatcgagcctccgcaatactacgaatcagacaattcaactcgatccaattccgatactcgaaattcacaaaatttcatcaaattagttgtaccaatcacgaaatcgaattcgaatttccagatatcaatcggcaatttctcgaaaattacgttaatctttagagatccgtccaatcaaatagcatgcaatcaaaatccaaagcaatcaaaagggggagacaaaagagaaattccgaagaatagagagagaccttaagcttaagggagagaggagggaggataatagtgcccttcttctggagaaccttgccgatattgtttccggcggtggccgcaagcgttaggcaaatcgattcccacatgtctctcaaaacgccgacgagaaacgaaggaagaagctttttaatggaggaatgatttttgccgatgtcttacgttattattatttacttccgtttttttaacttttgacaggtcgtgggtatatagtaatttccttttttatagcaattgtattctatggtaaaaaaacaaaattaatctctatgctttcgtgttcaaaaaaataaaaatctctatactttaattgactttaaaaaatttaaatttattatattgttgaatacaaaagaaaataaataaaagctggcaaaaagacacagctaatggcgtttacatcacatgtccatttttttcacattttaaaagtacaaaatacttcaaaaagaattaaaaaacagttttgcaaatgtaactacaaatgtcaagtgtaaaacctagcaaaagaaaaaaaatgttacgttatgaaatatacatgctacatataaatgtaaatgtgtatacaaacaatctaaaccttaaaacatgtttcggctattctcttgcaaaagaccaatatgataatatttatggttcaaccattttagcagctatcataattaaaacttggaaacctcaaacacccttttaggcagcttcttcacaacttgaaatatgaatcgagtataaaattaatggtatatgcatttacgaacccgatgggtatttaaatatatatatattttggttagaatgcttcatttgattaaataacccaacttcaacaagttcaacatgaaaacgttgctaagcatgctttagctaagtcgtccatgccaacgcatttagcagtcctctcctctgccctcaaaattaaccgaaaactggatagtcgaggaggcgatatataatttcgttgattgctttggttatctaattcgttttgttgatgatattgaagagacttgaaacagttgtgatatggaaatagtatgagtctgcgtctgccacaagtttgtgatattgttcaaagaactaatcagtgaaaaatttcacctaatcttagttaattaagattatagtcttccaagtgcagtctcagatcaaaagtcaaaatcgacaaagtaagctaaataagaatgacacatacaaatagagaaatggtccccaaataaaccgagttattgtcagcttttcaaaagccaactttttactcgagatcatactaacagaaacatgctttataagatctcaagatctaacagaaacagaacttgagatctaagaaacatgttggattgcctctaaaatggtacttaagaatcattcaaacacgcaaaaaataaactgctcttgttcaataaaagcagagcttctgattcgaatggatgatcaccaaaatgatgtgaacataattaactaccagatgtaacaagccaatcacaaaaactcaaccatgtcaaaacctaattgtatacaatagagatgataaaccaagcaagtatggatcatggcatgatattggatggaggaaacaagagaccgtttcacaatctattttgaacaagactttagaaaactaataatcttagcaaagagcatcaaacaagaagattctccatcgaacctaatttctgagtacaaaagattcatactttttgaaactaataaatgatcatatataattttgttgcgatgaagccaccacagttacattcaagattacaacacacaaacacaaagatacataagaaagagagagagagagcacaatcataattacttgagaaaatcaaaattcaaaacaaagctcaagaagaagaaaaacaaagtaaaaaagtaaaaattatagaaaaagatgaaaaaagaatcaccaccaaccatagacgacctgtgtgtacctctgcttaagccatctgaaactgtttctaaaagagcctttgactttgccttcaacaccatacatcttataactcgcgacccgtttcttcctctggagctccggatccgttattccccaagacttggatcttgctatcgatttctcctttttcacatcgtatatattgttctccctcgtcccgtacgatgcgctatagctcctgaaatcaccgccttgattaccgtggtaaggctggatctgcatccctccgtctccgtatggtcgttgacggccgaaatcttccatggacgccggcaagtttgatcgagagaatcttttttttgtttatgttattacagctcagagaataattggagagaaaggaggagaataatagtaacgcaaaaaaggacgtgtcttttgagctggtctcaatttgttgctccacgttatatgaattattttcatttgttttctgtaatttaaaagagagaaaacaaataaagcaaatggagataagaaaaagcaaataagaaaaaatgtaacagatattattataacgctaacgcgtttggaaaattttaataattaagaaacagaagataataaaattaagaaaatttactagagtgtgaaatttcagacaaattaagaataatggaaataaatatgaagtagaagtttgttttttttgtgtgtaattgaccgttgaccgttgatctgcattagcggtcaacgggcaagttgtgtgtgataatgttcacgaatccaaaaattaattgataggcgtgatgttctttttttcttttttctttattgaacaacaaatataggcgtgatgtttgtattcagtagtcacacattttcctgggaatgtgactaccaactaacatttaagaccatattatatactgcacaacttttaatcaatggcttcattttccacgagctatcattttcccaaatgaaaaagtagttgatagttttctataattaatgtatcagaaagtaaattgataaatagtattataaaaaaaaagaccgaaatatttatcatagctaaggtccaaaaccgaaaactgaaaaaagtaaatgtgtaacatacaaattgacaagttttaagacatctggatgcagcgaatggtctcttaggccttttactaagcccaagcccagtagcccacaggctcctcaacatttccggttgactacttaaccgggaatatggatatgccatataccgacaattaaacttaaaccaaatcgaattgaaatcttaaaagagaaggataaaatgatgagatgacccacttgaccagcgtggttctgatgtcgtctcgtccacttacgatgtggggttgggcggcatattcgttcccaccacgtgtctcctcaggggctgaccacgtgattcccacgccgaaagtggaaagagaaacagagtttgagtatcagaggagaatcttaatagtaatattaaactcttgttctgtctgtggtcactttatatattctttttgatttgatcaaacaatggtaagtacaccatctgtgattctgtatcactagtactgtcatctgtgatccgtctcacgaacattgccttatggatctctaacatcaacactaaagcaatagtgatatacttatctctttgattaggattttaaaacatgtacaaacaacagatagagagagagagcctaaccatgttatgatcgatgatctgaagtacaattatggactttggtttggagctttttgatgatagaaaagaggaatgaaaaagagacatattaacttccattgcactaattaagaaattcgcttctagaattggatttggatacaagttttgatttttgtagtcaacgaaacattaatgattacatgactagtttatttattcagtaactaatggtaaacggatagtttttgattaagttgatgaagtcacttgcaataaaattacaattacttagttttcgtagaaatacattattaggtctaattaatgcattttaatttaaccatcttctaactttgtttcttctttttccttttgttgaggcttcaaattcaagccacaccgaatccataatggatccaaattagaagtcaaagtgggtatggccctcaacatttgattcccttatcgttcgatgatataccataaatatatatacacaattaatttttggaatttctataatgtatatattataccttccttttgtatatctttttattttttgtaattttcatttacttgtaaattaagttgaaacatgcaagttatataagtaaatatcaaaaatgcatgcattaaaaaaaaaaagagcaataacagaaaaacaaaaatcaaacaaaatatgatgcaattgtgtgtgttttgcctaaaaaggaaagttgtcaaggaaggacaacgtatgcgcacttccatattcggaattatcagccagaaatttatagtttaattattgtggtggtatctatcctcctctgacagaaaataactaattttattctactctgattgaacgcaccaccaatgctgcaactgaaagcttgcaatgcaccaggtgtcatcatcattacattacatatgtattcgcattctcgacagatctcatcaccgttaattttattttatttcaaatgaaaacttttgaaatcaattaacaatgatgtggcttgttccaaatggaacattcttatagttttatttgtcattatgtaccctactaattctaatttcggatggttatatataagatgatactagctagtgatgttaaaaaaaaaaagatgatactagtataaattattagggatatatatatgttttagtagaaagattcttgtagttatattatataatttgtggtggtaataagacgaatttaatttgtgatgtaagaaatcataccatttataaaatgtttttcgaaaagcatgcatgctttaagatgctttagtttagcgccgtattggatattgagggtgtggctgaactttttcatgatgaggctctgttgatttgtaattggtcagtccaatcttttgttccactaatagttatgctttcttccagaattgttaaattaatctatatctacatgttttaatatgagaattataacatcatccaatgtttgttcgacagacatgatccatatgttattccaaagcttttggatccttagtatatatatatgcattgttagttgatacgttgttcacattaacattagttcattttgggatattccgtaagtaacttgccaccaagagcctatatttaatcctgtgattttatatataaggaataaggtatatgtataatgtattaaatagatattagatatatatgttaagaatagaatgctgattagatatctctgtaaataaacgtgcaacacagataaaaagacaataccgtttgactatttattttgtgattcgaattagcaattaagtttgacaaaaacattatcattagctaaaacatacgacgcatatgaaaaatcaagtagtaaataaatcagcatttagttgatagttatttagacccaaaaaaagttaagaaaaaagtagaaagttgcagttcacgtggttagaaaatggaacaaatttatcaataattcatgagagagatttgagtttatatctttatcagtttttttttaatcccaatactctatccccatttggctataaaaagccccgacaggtctcagtttcttcccacatccaaagatagaaagatgtaaggtctagagtcttgttcttaatcccctaacagaacaatgatatatataaataaatatgggtcgatatcggctgtggaggacgactagctacggtttcgagcctggtcacatgcgtagagtgtgaaaggtaattaggaggtgacagaagagagtgagcacacatggtggtttcttgcatgcttttttgattagggtttcatgcttgaagctatgtgtgcttactctctctctgtcaccccttctctctctctctcttttcaattacaaggttaattataactagtaaaaggtctctgatttggtatgatatagttaaggttttaattagttatattatcatcaaacggatcaaagtaggtcgaagggatgagtagtacatatgcaacttttgttataatactatgtttttatatatatcaaatattttgttctgaattgtaaacgtcaactcggtaatatccacataaagtactctaacattttaattatgcagggtttaatcagcaatataattttgggaaaaagtagatctataacgtacgatgaagcaaaaaaaataaaaaataaaaatcattttgtcattgttttcaaacataattagatatagctactatgtgtcttctagccataagcatatctattagtatttatttaaaattaatgactatttacctcctaaaaacaaacatgtacatgtttttgtttcaagatgtttggagtgcttatgttaatctctatgcagttagacgtatatgcctatcatattatatttgttataagaatttggctaccaatgtactttggtgtactttgtgtgataaatattttgtcatcggaaatttgattgaaatcctaaactttgatacgtttgttgtaacatgtaagtatgatatttggttgattaagtttttctatgaatcgaatgcttgatttcttttccaaaatcacaaatacaattttttaaaatctgaggagcaaaggaagccgacatagacgacggttgaaattagggtttataaacgttatttacatgtatatatactttatgttgtaaaattttcacataggctagtgatggatcatggatgctaatatttgttcatatacgattatgttaattatttataaaaataaaataaaatatttacttaaattttccttcaaaacaattatccaaagaaaagtcttcaataattatattgacctaagtcacaaaataaaccagttttaacttttaacataacttatggaaattgtgactaaaataccagtctgatatacctctgaagctgccctctcctacttgaaaaatgtagacgaaatccaaagacgtttcgccaaatttctcaataattcaaagaaaaaaaaaactcaaatcgcaaaattgctcatatacatgtttttagatgtattagttatgcatgtgtactcatccacccaaagaaagagttaacaattacgaaaaaaagaataggactgggtgagatgaggatcttgtgtgactaaatcaaagtttcgaaaaattcttgcaagaatggctccaaaatcgtactttcatcttttcatcagtagtaaaaaaattggatgcagtctcaattcgacataatcccatcaaatttataccataatgcattgatactcttcacttaattttaaagcttttgttgtctctctctctctatgtgtgtattagcatataattcttacaacaaaagacaaatttatgaaaaatttctcaagactcgggtgttatctcaggagtctgcaaaggaatgggactgttatcttcttctttcgcgtttggattctcggcttgtttttcttcaggttgggaggctacaccattctctgatgcatcctttgtgtccgtgctgatgacctttggagatttgttggatggttcttgagaggacgatgcagctaagatgcgacccagaccttcgtatgcactcttggcatccataacgattgtggcaccacctggataacatcggccaaagcatgtggcgcaatgtggaaaaaccacctgtaagaacaaggaaccaaagagaaaaaaagagcaatgtgcgttaggacatagaggtgttcaatctgaaatggctactgacttttaacttgttaatacaaaactgagatgagatgagattcaaaactcgacctcgacaaaagctcggcaaagtgaaaggaatagattggattcactgagtcgaagcatccgagttgtattgtatcttagtaaggagtcagacacggcctggagtcctttgatcagttcatgagcaacaacattctttagacttagcggggcacaaggacgtaattcgttcaaagcagaagatacccctgttgacatagccgggattatcaatcacaatcagactgtgaaaaaaacatccataagagagataacaactttcattttgcaacatttgacatagttgggagttaggacactcattttggttatatcatccataatgttaaaaattgatagtatataattatctcaccatttatgaaaactgcaagtggcgggtgctccatcaagtatgatggaggtgtgacgtcatccttgctatcttcattaataccacttgaaggaaagccaacagatggtaatggaacccatcgatgtgaatccaaaactaactggaagtaaaacattctgaagaattcaagagtgtgacatgtggataattggataccaaacactgtttgagttgagttccatgccagaacaaaagttcaaatattgcacctgaaaattctcaactgctgtactcatgttcttggagaataagtttagaaccgccctgtagtaagtatgcgagttagatactgaacttttacagaaataagcgaaggttatgacagcagttaaaattagattgaaagaattgttactcttcaaaaagtggaggaagcagaccccggaagtctagcccaaccccaccaagccccatcgcacagtactgggtggacatgagaagaaggtaaaatgtcaatcatcggagttaaacagtgaattcaaaaaggaatacacaagatgcagaagaactcaaccatgcactgatccaaaatatttgatagagatcctccttcagtaatctttggaagcatgatttttagagtcttcaggtgtgatgttatttgatgcatggcccagctaaacaaaagtccaccatcataattttcttcgctcccagatgtatcatcagaaaatatagctcgatattggttaaccacgtcaaataggtgcattctgtgacagtttatcatgccttttaaatactcataggcatttttctgatctaaatcctcaagaattccagtgagccatgcctctcggcatcttaagaactgcatagacaagaagatccattaacaagtgaagacagagcttacagaatgaacaattccatagacaaaggaatacaatgtaatggaaggataacctcaaatgttatatgtcaaaatatttcacctgtaatcgcatttcatactcgccaaagacacctattcggcgtaagtatccaataatgcggagacattctggtaactgaaacagagagcatcaaccagatattgagccttcttgattgctaagcttaaccattccatagttactgaataccaaaaataaaaactgtattcacatgaaacctgtatatttgagcgtagtttctggagaagctgtgagagaagtgactgagttgtttgtctaacctccgctgcaagtgcttggataactggcaatcttgacatagagagaagatataatgtttagagctaaagcttgatggttgaggccttaagtaaaagtatcgtgagaaagattacaaaaaactcacttgggatgcagggtagcaagtttcgatacaaatgcttccaggtcaagagcctcatcaaaatttccattcctcacgcatctgacaaagacacaaatcattttgaaaagataagtacacatccagaagttgctaacgccaggaagaagatccgctaaagattgactagaaagcagatcaaaaaagttggcacgaggtctaatagcttacgtgtccataagctgaggaatctcaagcaagtcaagaagagtgctgtgatttgccagcaatgcttggttcatcttcctcttctccaaaatattctcagcagaatcgataaattcagtgcaaccagacgttagttttgggacttcgccaatctacaaaaggtgaaaagtacagaactttgacatcaaaatttgaaagaaaataaaacatctccgaagatgcaactgctaaagtcagaggatgttttctatagatgtgcgataaccaatcttgtttactgaaaacaaggaggctgaagctacactcctaatccaatgattcattcacctattatcaagaccttaggtatctcctagactacaacacaacaagatcaatcacccaaattttgcatacacagagtctaaaaaactacaagacttgaaacaacatggttctgcaactaaactagattttctaattccctaactccaaaactattgaacgctccaaacacgatgcctcgaactcctccaacctcaactagttttaggatcttagcaatgatacttgcactgtgactaatcgtaattttatcggccagggttcagaactaatcaagtgaagcagtagaactcaatttacaaattgaaagtaaaaatataatttaccagagactcgagatgcttatcaatggaagaaacttcctgacggatcgcaagcaaagcatcagcagcggtgataaacgcgcggtaatttccaacagccacctcttgcatttgcctctgaatccgctccgcatccactcgaagcagctccggttccttcaaattcagtaaccaatataagattcacaaaaatccatgagcgcagagatttcaaaagagagttagagagagagagagagatgaaccttgtggagacgatcaagagtgaaagagaggagctcggagacgtacggttgctgagtggcggaagcgagagagagaagactcgccgtcgcctccggctgagacatctccccaacctccattgccattcccggatcttactcctgtaaacgatgctatcaaaatctcctctaagaaagtatacagatccagaaactcgcgattttttcaaaaacttaacatcaaaatgtttctgtgatttgttttcctgctttggatctgaaatttctctttcaattttattttctcttcgaactaaggagtaaaccaagttgattttaaccgaaactcggttccattagacttcggttcggttaggaaaataaaccaacgtacccggcaaaatgattactgtcatgcatttcacctttttttttatgttacatgtaaattgcattagctagattaatctagggtttaatttggccaaaaaaataaaataggttaagggtaggttttggttagcttggacaaaataggttaagggtaggttttgccgttcgatgtccattgatgaaaaagtaaatcttatattacaccaaaaaaaaatgaataaacaatattaataagtatacaaaatatagaagagtcttttacactaacgaaccgttaagaaaaatagatagagaagatacaacaagagcaatcaagaatgaagaagaaaagagaagagttgcatttgatgccgtgtagaaatagaaataaggaaatggataaggaggttgctgctgcccttgtgactgtccctttggcgacggtggtgacgatggtactgatggtggtgaaccttttccatcgggagatagcggtggaggaggtggtgtggactcgaaatagtaaaaccgtggtggtggtggatggatgacggtaattaacggcggtggtgaaagcgattgtgaaagcggtggtggagagtgtttgtgtggcggaggaggcggtggcgaagaggataacggcaatgagggagacggaggtggtgacatggagggagagggtttagagggcggaggagagcaaatggtgggacacgtggagcattcgctgatgcaaagaggagtgaggacatttgtttgatcggacggtgatgatgcaactaccatgaccatgaccaatgcaatgatgatgacgatgaggcccatgatgatgatggtgtttggagtaaaatgttcattgcttagctgagttggttggacatttataaatcataaggtggcttgatactaagatgctttcttgatggattgtgttttgctggaaagttaatattataattgagaatatcaaaaagacaatgttaagctttagatgtttttatttatcttagggtaaagatgcaaacatagctttttcaacattttgataaatgacttatgatattcctttctcgactcatactcaaaaatagtttatgttatgaagcaatacaactgattctagaactaaaaagtgtcacactctccaaaatttttcggtatgtactcatttttctttttatactttgctttcaaaggtggctttgtatcaattcccagtttataaaggtcaccattgttttgattagtttatctttttcttaaatttttgttttagttttataatttctctgttctttggtaaccaagtagtacttttagcttaacattgataccaagaaaaaagtagtacttttagttgtaaccgggtgattttatatgttgaagcccaaattgagttgaactcttttgagtttttttttttttttaaacgctaacctatccacacacaaaaatctatatcaatatcacatactctcaaaaattagaattaaaacttacaaaggaacataatgacaatgtttcatgcaacgagaacattaacaataagccattgcattttgttcaatacttttcatcggaaagctagaaaggtggaagtaatatgttacagagatataatataaacaaggattagattttagttagtaatctcttcatggcacttcacttaccactttcttactttcttccttgagaagcaagcaatctctctattcagttcctcacaaaagtcttgaaaatatttaataagtatatgatgatcttcagacccggttgttatttatggcatcctaatgaaagtgtaagcaattaagttagtattacttgatagattcaagactttgtttagggttttatatgtatagtaatatacctggttcattgtccttccccaagtttcttaatcggagaagctctggaactatttcttttccaagatctggtctatctctcttccttagctctgcacatcttagacacaacttagcaaaatttaatgcttcttcgacaggccaatctggcacgaccgggtcaagcatatccttgaaagttcctttgtcgattgccctcgacacatgatgagccaaacccattggactcttggcagtgatgatctgaagcagcattatccctaatgagaatatgtctgatttcgtggttaacttgcccgtttgctggtactcggggtctatgtaacagaacgttcctgctgcagatgtcatgtggtattgcgtcactgtgttagccactgacgcaggtactaaccgagctaatccaacgtcactgatcttgctcacgtagtttttatctagaagtatattggcaggttttaggtcacgatgaaccagaggctctggctttgcttggtgaaggaaggagagtgcggtagcgatctctgcagctatttgaaaccttttcctccatgaaagtggaggcgagtttcctctacgaaagagtctatcctctaagctcccattgtccatgaactcatacaccaaacacccatattctggacacgcaccaagaagaagaaccatgtgaggatgtcttatgctacttagaacctcgacttcttgttgaaactgtttctttccttgagcagcatcaggtctcaagacttttatggcaacaggagtgtgatcaagtgtgccatgatagactggtccatatccgccttctcctatttttctgttgtttgcaaacctctcagtagccacttcaatctcatctatagagtattttctgtaacggacatcgttctgtaccaaagcactaagagcacggtctttctcctgtgattctcttcttgctttcatctctgcttgcttccttctttgtccttccaactccgccattctctgcgctttctcagctgcttccaaagcagctctgcacttggccttctccatttccgctacagctaaagctgcctcttcagcattcctagcttcctcaaatcttctagcttcttccattttccactgattaagctcatttgccttcataaaacatgagagacagaatatatcaaataaagcaagaaaaaacatcctcatcaactagctcttgtacacctaacagttcttactttcttttttgcattaagtgcttctttgcaggctgagctatacatgtccatggtttgcttgagttcaatctttaaccttttcatctcagcttcaatatccctctgcaaataaaaatccaaccaatttagtgcatactaatcttatcaaactcgatatcatcataaagtctattgctctacttgtttacataccgttgactgcgaagcagactcatcagaagaacctgatccaccgaccatatcaaagttctcagcacttaggtcaatagaacccatcatcatcatagacccaacatcagacgattcatcagaaaatgaacttcttccagtagagttcctttgaccctttccctgcctaaactcataattgaagtccaacgatccatttgtagggattttatgcatttctctcacaggtttgaagcctttattttcatgggaatacctctctggaactgtgtttctcccattacgctgactcctacaatatcctcaagaacaaattcttaacacttgttatatatatacaaacaaaacatagcaaaaacattcccaagagttttggctaataaatacctaggtgaacgatcatggtcagggtcaggtagatgaaacgtagaagaaggtacacgaggagggacaagtgtattggtgataggtctttgagcagttcttgaagagtgaactttgcctttagaaatgacatagacggaacaaaactcaggcgttgatttgagaacggaagatgcaacgtcatgtgacttggtgaatttgagagatcttgcaaatggactctttgaggatgatcccaacacaaggttggtcacaaggttattgttcacgtaatccaaaactgcttttgaaacgtcggtatcgtctagaataacctccatcattgaaatctatgtaagacaaaagaaacaattactaagtctttaatgcatgtaaagttcaacgaaatgcttgaatgagaaatgatacccctttacgtgcacaatagcctctgtatggaacaaaaagctgatttaattcactatcatcaatgtttcctccatctgcaacaacatttcttgattcatccaatttagaagatgcgatttgtgtatgattagagaataaaaaagatgaggagaagatacctacgattagaatttttgagacgaacatggagtagaatcattttggaattaatgatcatattgaagagatgatcgacggcccaacgaacagcgaagtgactgttcttgtctttgtcaatggcgaccaccgtcgagttcactagcgtgtggctatcgtccgatgggtgaggacgagccattattaccgatctatgttgaaatgaataagaacaggtgttaccagacctctctagttgtgtctgggaacaagaagagaggagagaagaagatagaagatagaagatttattattgtgaaaggtttcttcttctggtctttaactttctctcctctcttcttcctgtttcaatgtttgttgctccgaaagaagacgaataactaacttctttttttcccttagagcaaagtcagagaaaaaagcgggaatcaagatttatattaaccattgttttttaaactgcctttttttaaggagattctctatttcttcatccttttttttgtggggtttttagtaacaagagattattttttctagaatattacatgcaaatcttttttttcttcatatataaagatttgcttcttcatttcaagtttggattggatacaagtaatatgacaaaacatttgtatccttttcccaaaaataggtcacattaaacggtaaatcaccaaaaaaacataaacttatttttttctatatggatggatcatggattacatgatattcatgaataatgggaacaaaagatgaagtaaaaataaataaacaaatattcaaacaaaattcattaaaatagaaatgaaaatgaagttaaaacatttatgtaaatttggtttggttctaagaaattataacaccatcaagatttgaaaatgagaagatataaatcttctatcgtatgtcggtttacatctgatcagtgggtccgaaaagaaaagaagtggctcctattggtgactcgcacgctaagtaagagccactagactgcaaaccagtgacggtaacctaaacactaggaagaagatgacatgtgtgtcgttttctactgaattagcatccaaacatgtcgttttttaaagcaacaacatagcacaagtgttaaaaactaaccttgttgttgtctcatctcacagtccacaccagagaatgaaaatctcattgagcttattatacattcatgtctaacactcatcaaaagagactggaaataaatgtatagtatgtgtatataatttaattttcttctattgcctcatataacatctgtgatctaaaggtacaataatacattatgcataaaccaaagaatcaaagtaagtttagtttatcatatagaaggaaattaaaagaacatttccattatcctttataggaaagaagtacccgcgaggccgtgatgcaatagattatgtgagatagtatctctagccttcatcgcattaaccgatctcaatacgttttcaggcaaaacctcatcatcaatcacttcaaccatcagctctggctccatcttctcctctctcatttcacatatgttgtgaagcacacaacaagcacccaaaacggtaggcaaatcctgcagcttcacttcagtccgtttctgcagacacgcccaccgccctttcaacctcccaaacgcttccttagccactccctgcacttcgctcatcttctcattaaacgcatgctgcgtccacgtcaagttctgttgcgtatacggaaccaaaacccagtccaacaacggatgacccggtccaccagcaacccacatccccttcaacaaacctccattgttagctctttgatacaacaatgacttctctaacaccttatcatccggcattgacccgggccatccgatgcacaagtcagtaaaaacacctttcgggttcacaacggcttgaattgtaatcgaatacgacgtcttctggttcctctcagtatgcctcttattgaaataagaggctacactaatcttaggagctataatcggaatgtgagtagtatacatagagccaacaacgtttggaatacccgaaaccgattcgaaacgttctctaatgtttctaagagattcatcatctggccattgaagatacttaggcattaaaacgtccttaatagctttacatacctcaagaacaagcttgtgacaagttgagattcctaaaccaaacttcttggagacaagacgaagtggctcaccggtggctaatctccatatacaaaccgcgactcgctgacgcactggaatcgcgtttcttaacgcggtgtcttctttagcaaccgctgaattaagctcatcgcagattaactcaaacgttgatttagacattcgaaacgcttttttgaaatcttcttctggataatccaatcggctacactcttcccaccaagctctgctccgatctttaacccataaccgtctttgctgacccgaaccggtaccacgaaccgatccggatccggttatctcactgctctccgcctcaatctccgaagcagcagcaacagcaacggaagcgacggcgcgtgagacgcgtgacttcttcagattgatatctccactttcctcagcatcagcgtagtaatcgttgagatcggagtagtaatcggacatagttctagctcttttccggtaattagattgaaaatcagacatttcacggcgagaagcagcgttacgagcttcctggtcttgcttctcgtgctcctccatcaaaagcaaagaagtgaaaaatcctttgaggtttttggtttcgttgtttctcttagactctacctcgccgccgtcgaaaacattacagacttcttcttcttcttcttcttcctcctcctcgtctccgtcttcgttacggaaaacggcggctttcatcgaagttgtgttgtttcacgtttttgtctctgaaaggtcttgaatttttggagtgtagaagaagattaatttttttgagggttcataaataagaaatctgaagaaattttttttggggatgagaagacgaaacttgtgggacgagtgtgaacacgcaagttgactttactagagagctattgtactcttttttcctttttaataaattcttgttatttattactcatttttattcttgttacattctttagtatttttttggacaaatatttagacagcggtacagaaaaagcagaaccagtttgattcttgtaatagattcatatttggaagcaaactatgtgaaaacgtttttttaatataattaaaggatatatatgtcggaaaatattgactacatatcgaataattatcagtatactctgattgaataaattggaatctaaaacgttatataggcgatacaaactaattttgaatctaattcttagaatcgtgatcatgatcaaaccaaattcttaatttgcttgctgcttttgttcaaaacaatcttgttactatattaagcatgtctatttataagtacaaacttatcagttttagtactatgttgtacttttcttagaaacatttcttcttatctcagaatggtgattttgattcgaatgcgaagttgctaagatatgttttggacgcactattaactttctcatttttatacaaaatccaaacgatagcgagcaaaatgtttaaagtgaatatcagaataacaactaaaaagattagataacaaaaaagaactagactaaatatataatagatttgagctatttatcgatggaataaacataacatgtgaatgaagtggtaaatttcaataaaatcggaagatttcgaggcgaaactcaagaccaattcctaagctaaaagctatgtaaatattttcgtagatatttatgtaatactactaaataagttgtttttatattcaaatagtttgtgatacttttgttggcaaattctccattttgataacttgatattgagagatgaacaagacctagaacaatacacgtatgattctctttcttagttaaccggtttgagaaactatgagttccatttccaccactcttttatgttattttatcattgtcaacagataattgtaaacgttgtttgttatacacttgtggagagtgggtgttcacacacatatcttatatacgaacccaataatattattataaaataagatctcaaaatgattgtacctataaactgaaagaaagaagtgtgaacacgtcaaggaagtatcggacattgtttgttagtctaatgtatttggcggtgtggaacgttaggtggccgatggagacttttggtcccatgcttcgtttccttttttcttccttttctttttgtgtttacttgagttgccaaataaagaaggcattaggggatctgctaacattttttataacttacattagtggcctctttcatgcatcctcgcctagattcatgttgttttttcttgtttaatcagaaaattaaaggtataaatatagactaatctttctcacattaatccaagcaccgcaatacaaaaactatagggtgaccagagaatagttggttaacgaagaagaaatggtctatgttgcctttttaaaggcctcaagtttgttggaaaatattttaaatgagaaggcaaagttcatatcatactgatgataaacagattaataactttgtagagatgatgaatctaattcacgcattaaaccatcatatctaaccactaaaatggagagaaaaaaaatctaaccactaaaagatgaataagtgatataaaaattaaagtagaatagaatccagtgcagttgaaatcaaactttgcaagtatttagtttagtgatacatatttagtagaaaatatatccctaaactatcatttgatttttgaagtactttggataaaaatatgtgaaatgaaagagaagagctttcaggccatcagaaattcacgagaagcagcacagctgtacaagtcatctagcagagtcacaccaatattctagcaaaagaaaccaacaacaactggttagcaagtttgaatgatttagcaaaaagataatagtccataaagtagccgacaaagagagtacatagggcagaaagactgattcctcgaagacatttcttgcttttgatgaatcattaatcaataagttcatagcaaaacttgatataaacatttagaacgtggtgtatttgaatgtaaaatcataatgacagcaaaataaattaacgtttccttatcaaaacacttggaagcataaaattgaatgtgtatgttagagttctcgcagatattaaactattccactgaacagattcataaattacttttagggcctaactccaaacgtatatttgttgactgtataggtaatggtaagcatatttggacttagatggctaaagagatgtgttggaattagtagaagaaatgatcaccaaagatatatgcttaaaaaagatgaacaataaagaacaagtattttaagttatgcaaaacagaggactgaccaattggtctgtcacttggtcaaattaaataaagtgaagtatgtatcacatgcagttatctgtttcacataatgtaagtgagcgatttagagatgtatattaacattcttatttccactgggccaatagatgtttccagaactttgatgtggaagattcttataacaacttcattaatttgaatatcccaaaggagaatgaaagaaacagaacaaacttttatttcatcttagaacaaaacaccatatccctcacgcattccgattacattcatcaaatccataaatcaaaacaaaatagataaatccaacacacaatcacaaaacaaactcaagcaacttgaacttgaattgtctttggtttctttggttccggaggaggaagtttctgaacagtaaccttcaacacaccgtcatgacaaacagcagagatcttgtccaaatctgcattttcaggcaactgaaacttcctcatgaacttacccattcttctctccatcctcacatacttcacaccttcgttttctttgttctctctctgcctctctccactcaccacaagcacattgtcgttctcgacctgaaccttgatctcatctcctttgattccaggcatgtccacgacgaatgcatatgcgttagggtgctcgatgacgtcagcaggtgtagcagccattgccttagcgtctcgcatgtaaactcgtgaagggttgttgcgggtcttctcgttgttgtggtcttcggggacttcaagcatgtcttcgaggattgagattattggaaaccttcctaaatccattgttagttgtgttgtgtttgctttcctgattctttgattcttggctttttgttttctttgatgagtttgatgtgagaaatgtggggacttaaataggagtggagatggatatttctagaggattgtcgagagagcgattgtcgcggtctttagaagttcttccgtattgttcgagaaacgtcttggtcgttctggtttttgtgaactctgtaactcaggtttgataaaatatgagccataactttacagaatttttaatatctatatgggcttttaaattaggaatatatcaaggcccattccatatgtgaaaatagttcatgattcataagattagtgttttagcaaattaaagaacaaattttgtgatttaaggaatccgaacaatattgctcattttaaagaatacattcaactggaaagtacatacaattgctgaagacttggattacaagtgtacaacatgcacctcaagatcagaagttcaaagtcttaatgatggaaacaagactaaattagtatatgctctggtttctggtcagaaaaattaatgaaagaccatatttattttagtgaccaaagaaaaatactatatatgtggtagcactaactcactgaataccactaaatcgtgtataacgacattaatataagctattaaagacggttacaaatctgcacaaaacttgatttgtcttaaaactcagttgatgttatttgcattcgcaaatgcaaatttcatttaaaaaataatgtagcagattgagatatcagacttcgtattatactacagatgtagtagctgaagattcagttacgttatccaacatgaaaaaagtacaaagagttgtttggattttaaaatcagaataacaaaattgtttcctttcatctaatacttaaaggataaaattgaatatgtaagagtttttgcagatataataacactgtgttactgatctcatacccataaattacttcaagggacataactccaaaaatatattttgctgactgcagagataagggtgaaatgcaaatgtggatttgatggccaatgtgctaaatagcaccaatgatattaggaaaggatgaacagtaataatttctgcaaaaacagaggaatgaccattcggtgtcttttttgttgtggtcctatttttgcctcataagcatggatggttcaagagagcaaaaacttcattgatttgaagattgaacacaaagacaaatatgaacagagaaaactatttttatttcattttacaacgaacaccaagaggtagttgcttatcgattacattcattaaaacacaaaaacacgatcacaaacaaactcaagcgacttgaacttgtatagtctttggtttctttggctcaggaggaggaagtttcggaatagtcactttcaacacaccgtcattacaagccgcagagatcttctccaaatctgcattatcaggtaactgaaacttcctcataaacttccccatcctcctctccatcctcacaaacttcacaccttcattctccttgttgtccctctgtcttttgccactcaccacaagcacgttctcgttctctatctggacctgaatctcatctcctttgattccaggcatgtccacggcgaaaacgtacgcatccgggtgctcgataacgtcagctggtgtagcagccattgcctttgcgtctcgcatgtaagctcttgaagggttgttacgagtcttctcggtttgttcttcaggggcttcaagcatgtcttcgaggattgaaaatattggaaaccttccaaactccaaatccattcttagctgttgtgttaactttcttgcttcttggctttttctttggtttgattgattttgattttgatgtaagaaagtattaaatagaagttgagttggatagttctagagcaatgtagagagagcgattgtttcggtgttatagaacttaaaagcgcttctctaacgttcgagaaacgtcttgatcgttggagaagtgtagatggatatttctagacgaatgtagagaaaagcgattgattcggtcaggcccaagaccaattcgttttcaggcccatatgtattctgttttggatttagtaaggatgttaaatttatccggtttggtacgatttcattcgaatttagtgtataaaattgattgaaccgcgtcaatacggttgaaacgcaaacgcagaggattcatgagtcatggcttttgtgaggtgaagtatcaatatcatctacctacctatatgatcatcggactaaagtgaaatgaagtcagcaatttcatcgtcactcttcttcaattcgaagaatcttttaaaccctaatcctctttctcgcttcatttctctcaaatctaacttcctccctaaattatctccgagatcgatcactagtcacaccttgaagctcccatcttcgtcaacctcagctttaagatccatttcctcttccatggcttcttctttcaaccctgaacaagctagagttccctctgctcttcctctcccagctcctccgttgaccaaagttagctcctttcttttcatttacctttgggttttcaatcatttcagcttttgattgatttcttcgttccatgggtaattttgtagttcaacatcggattgtgtcagctatctgttacatctgacaaaaagagaaacatctctcatgctaaaaaagccattgaagaagctgcttctaaaggagctaagcttgttctcttacccgtgagtttttcttctttgtatcttagctcatagctctttgtgagttcaattctaatgttctgttgctcaaatgtgtaaaatttacaaaaagtatgagctagtggtatcgtctctatggggtttaaaaccattcaatgggtttgtttcaggaaatttggaacagtccgtattccaatgatagttttccagtttatgcggaggagattgatgcaggtggtgatgcttctccttcaacggcaatgctttctgaagtttccaaacgtctcaagattacaatcattggtggatctataccagaaagagttggagatcgtttgtataacacttgctgtgtctttggttccgatggagagctaaaagctaagcatcggaaggttagattttttgagattaaactttcatagaagaaataatgaactttcctctgctttaggccatagaatgaaagatgctaatcttacttctaaaatcgttgttcatcttttatcatctgtttttaggatctaatagacttagaatcagtaattagaatgatgtggtagttatgttctggttcgagttcttcctctatgattcataaggacaaattatgaggcgagatggccttgaccgttttatgcttatattatcaattctcagaacatcttgtttttgattgcttgcacttatttgtgtttgtacttgtgtgtgcatacagatacatttatttgatatagacattcccgggaagattacttttatggaatccaaaactcttactgctggagagacaccaacaatcgttgacacaggttataatcttggtttgccaaatataattccaggtcatgcataaacaatcatgtatcttacataaactcattgtggtactatctaaaaataataatttaggattaaggatttaaatttccagtcagatttgggatcttcttagctcaacagtgaaatgattcattttcatgctggcctagtgtttatgaataataatgtttttaagatcttgccaactattttgactggggaaatgtctttattgaacaatcaagtcatagtaggaccgttcacatcacctctcactttctagtacttatgagaaatctttaacgcggtgcagcgcttgagaatgatagttttgttggttgttgcagatgtagggcgtattggaataggcatctgttatgatatcaggttccaggagttagctatgatatatgctgcaagaggtgagtcttcatatcataatgctttatccaaatggactatctgcttcctctctttttcgggtccattacgttttaaagaacctcatcacccacatgtttactttaatcatatcaggggctcatttgctgtgctacccgggagcctttaacatgacaactggaccattgcattgggaattactacaaagggccaggtatgattcacagtctactacattacgactttcttggcttatttaatcatgggtaaatcacaatgctcatcgatctgttttgttccatttcagggctacggataatcaggtacatgaaccaagttaaatacttgtattgatagccaaaagagagatacaagttctgacatttcttaatgaattcatagcaaacctgcatttttctttgagttatcaatacaagtattatcttctgctctttggggttagttttacttaattgactgttatcaaagtcatggaccggttaatagaactatgtatgctactttctccagttatatgtggcgacatgctcacctgccagagattcaggagctggctacactgcttgggggcactcaacactcgttgggcctgtaagcactaaactttttctgtgttacttgattgataatgaagcttttagctgatcactaaactttgaaacatatatattatttgacagtttggagaagtactagcaacgactgagcatgaggaggccattatcatagcagagattgattactctatccttgaacaacgaaggtaatcacggaaacaccagaactttcttggtttttgatagcgtgatccgctaactgaatctcgttttttttaccatcttaggactagccttccattgaataggcagcggcggggagatctttaccagcttgtagacgtacagcgcttagactctaaatgaacgcagcagtaactgtatatctgagagatattgcgagttgagcacgatttggttacttacaacttcatgcatgatcagtcatttctccacaactttgctgagatatgtaaaagaataaaaatcaaacttttgagttaaaatcgaacaaaggcaagtaaattctgcttagataatgtgaactccacccacttgccatgtgtttgttgtttataaacttcaatgcattctgataacaatgtagacttgtgattcgcaatcagaatagcatttgacttttttatcaaaatatatacactatttttgtgaatttctcagtaaatgtcattgtctatgaaaaaaacaactcatatcttcattccacaaccatcatattcaatatcgagtacttacttaaactaaaattgttataactggttcttcaaatgttcacacctactcaaaacgtttcatcacataactcaagtcaagtcaaagatagccatggtatattttgctacacatcaagatttgtaatatgcaatgtaatttgttttagatgagaagaagaaaagagtatatagagtatgcagataggttcatccacaagcacaagtgggatataaaagatttgaaaatgaaataacatataaacttttgtcagcggcctcaacatgatttgaagatccgtggttattgttgaatgataaatgaccggacgacaaaatgcagttacaacagcagaagccttacaagattcaccacagtgtgtagtggtttcgtctttggagaagacacgtggaccaagcctatagggtaaagaaagacgtagagtggtccatgctcgtcacagggactctgcgaaagaaggaatgccgtacgcgtgtgggaggccgcacgtgctaggggcccatgtggccatgggctatgcttcacgtgccaggtcacgtgtaggaccaaacctcaccacagttcggtaccaccgcgtgaatcttctctcttttctttgtgtcagctcttattgtctctccctgaccagctcaatctctgactaccccgtgcggtattatttccttttactcctgtttcttgctcatatcccaataactcaaatagttgtttccattttttaagattcatttccattttatatcattttgtaaccctttttttgtaaatattttatctattcaacctcactttagcgaacattatcttacagtttttgttgcttttactttatagattatatttctcttaaacatacaaatagaaattagtgtaatgtttgtatgatgtgtaaatgatatctactcccaaatagtatcactcaattttggagtatattattgttataggcatagtattttaaacaaggacacaaaaatatttttgctttcataacaatcaaacaagaagtcatgtttatgtaagtttctgttttgtactatatatcttgtttgtttttttaactgtcttgtattattatgtttaggtaaaagtatggtccaaactagaaacaatatttacgggggaattattcgaaactggatatgataaggagatgtcaaacgaaaaacattggccgaagtgtgacaaagatatatagaatagacacacaagaagacataagtgtttttcataacgaaaaaagaaaaaaaaaaagaagaagaagacataagtgtttatgaaatgaggaacaatgaaggaacaagaaaggaaggaagcatgtgagactgaaaaagacgcaaaacaagtacaattccttaaccggtccttgtcgacccaaccaatgagcaatgtggtgtaagagacattttgcttatatttaaacatattaatcgtttgattaattaagaccctacttgttcctaatcacatccttttcctaaacctatatacgcttgagatctgtctaaacaatatgagacaatccgtaatgatatggctacatcaagatttcggcaaatcgttgagaaacaattgttgatgttatttttctaaaagagatggttttgtttcattgatccaatgcaatcattcatctccaattgtgtcaaatatacaaattttaatgattacttgattataaagaatcaagaaacaacttctgagatacatttctataggaaaatgttgagatataatctccataaaatcattagtttctcacattatgaggaaaatgacatataaattgggcattggacaacatattattaggtacatgcacacataaacaaattgaagtatcctctagtatggtcctaacatcaatatggtcagcatacgtgaacaacacgcgccgagatcgttgcttatatatacgtcctctctccctcttcttctatcttcattcgtcgtcttctttctgcaagaaaaacaaaaaaacagttacgagacataatctctctttttcctcctttgtctcttcttctcattcttctttgttatcgatcaaaacatgcataaatccaaaagaaacccgtcattctcctccactctcctcgatgaaatctacaattccatcgatcctaaaacccaaaaaacacaaccttatgtcggctctgttaacactactaccaaaaaacagagcattgtgacaagatcggttcctgaccggaaaatccaccgtgatcgtttctttggctctgtatcttcttcctctgattccaactctagtattttctcatcttcagacaccgaactaactcacggtaagaagacaacttcttctaggccgttatgtttcggtccttctaagacaaaaccaagaaaaacagaggataaaactctgttccaccaaaacagagctacccgagtgtacgacgactacgattacgcctccgacgtcccaaaattcaatagacacgacgagaattgggagaatacgagaaacagaagatcggtgaagagctccggaaaccaaaagaaaccaaaaactccagcttcacctggaggaagaatcgttaacttcttaaattcgttgttcagcaacaattcaaaacaatccaatgcggttaagagttatccaaggaagactagttacgatgattctgcttacgttaggaaaacaagtaatgattatcattcatctactactacgtgttcttcagcttcttctttctcaaggtcgtgtatgaacaaaggctacgagaaatcatctgggcgtatcaaaagaagcgttagattttccccggtcaatgttatcgtccccgagagcttcaccagcaaagaagaagattatttcagtaacggtaacgctagaaagtcggtgaagaagaatgtggaagatggagggaggagatcagtggaggagatagcgagagagttcttaagagattatcacaagaatcatgaaaacagtttggttaagactaatggttttgaggattatgaagatgatgatgaagacgatgatgatgatgatgttgcaagtgattcgagttcagatctgtttgagcttgatttagttggaaatcatcatcatcataatgtgtacggagatgaacttcctgtgtatgaaaccacttttgctggtttgatcttgtgaaactttttctcttttctcttttttgttcatgtttatttgttaatttagattttcgttgtataagttttaatccatgtgattgttgaaaaaaagaaaaaaatcgcatgtgattctccacttttgtgtttgattcagtaactatgttgtgttataaattttgtgtttgtaaaaatttgatccaatcatgttttattagatcattttagctttcaattcttctgtttattatctaaaataaaaaggtttaaaaaaaaaaaagaatataaactattacactaatttttatgtatgtattatagagttacacataaattttttttaaaaaatctttcgttaaaaaccgttacactaattctaagcacaaattgaaggttcaatgtaaagtataaatgttataggtgaacaaaacatcaatgtttaacacaaacgcataggctataaatgcaagcataagcacaaacacaatagactaaacaaaagctcttaataaaatccacaaacatgaatttttagggtttcaaagctaaaacgccaaacacaaatgtatatttcttatcaaatgtatgtctcactcatgtactattttaggctcaatcagctcttgcaacgtaactattcgattcgtgcttttctttaagttttgaaaataatattgttgagaaggatccgatccgtgcaaagtaaaatgatttgcgggagataattatgtgaaataaagtggttgatgatcccaaaggcaaaaaccccaagctaccaacctttctctttttctatgtatctatcacatgctttagatccaaattttcatgaatgctaacactttttcaatataatttcattttttcatttctttacacatttaatattaagaaaagctcataatttatttgattaaggcttttacggtgaaatggaaatttagggcagcacagctacaaaatcaacaactatacacatgcctatacaattggtcataattcactaatatgatgtgcatataggagcagaacattgtttcgaaatcatattttttgtccaataaattgaaaaacacgctacaacattggtccatcaagtagtattcatgtagaatgtacgtttgactcgcttttcttggaaaaaaacctatctttaaaatagttatgtttaatttcaccaaaacaaccgttttgatatttttacatgcatatgtatatgtgaaagtaacacatgcatgttgtatatatcttatagtataataaagcatgttgagtaataaaacatcgaatcgatgatatgtacgtaaaagtgttttgttgtgtataaaaagaaaagaaagatgggaaatcgagaaattcgatatccaaatgagaagcaaagggtgattgatgaggatcgtgaatggacacattaaagcttaataaaatcgaaaataaatttaaaaagaaaaagggtaattttaaaataaagtgaaagtagtatttgtagcgatggatgaacatgaagtactgatatgcttccatgggaacagagaaagtcgagagcttttgctttacttctcttttttcactttgatcatctttaaaagttccgattacaatcttctccattacttctcgacaataaaaactaatacttcctacacggacggtctcacgtacacatgacccattttcagttccgtgtcaagtcattttgatttttgtttaaaattgttggaggttgataccttttagtttaaatattgctttgtaatgttagctttatcatttagttttgattctataggatattttgcttatatcaaagtaaagtgtatttatcttagatttgaaaactttgctggtgtgaggaagtttttaataagggtaattttatagctataaccagacttctaatacatgcctctttatacaatataggcgaacaattcaatattcaaaccccccaaaggcccaaagcatgcatatctatttgcctttggtagtgcttgttttgcttgctcctgctaatattccttgactttaattctataactgaaattactgtaaatttataattgagattaatattttaagaggagacttatcattttatcaaaataaatagttgtatggttgctttttatatcatcacaaatgctactttttccatactaaactagttaaacaaaatgaatagttcgatcatgaatataccattgcgtatttctatccaataatgcggcggattaaattattccgtcaagcaagcttattgcttgttaccaaaatcaacaactaagtatatttaacgaagtagatgatttaatcaaagatcgtgccatgtatttgcacacaacaaaactccctcaaactcctaatgattgcacataatacgtaatgaattttaagtaaattatgttgtattaagataagtggatgaggattacgcgaataatacacatatacacataaatattgcataagtttcacatgtgacatgtcgggggatgtaaccgttcttgttggaaaaaatgaatttctctgaaatatataagttaccaacttttattgaaagctgattgtttagtttggtcaattgtggctattaaaatatagtgcatagtaggtcactaggttggttataatatattgttcgttaatctatactttgattaattatgagtttgttgttttggatcgaacaacgcaacaaccttacatttaaatagagtaattaaatgcggagctaataatgttctgtaagtgaatagcacgatatggttttgttgtaggaccaaagcgacgtaaccctttgagcatgtaaatcaagtcaaaagatgacatattactttccactaacttaattcgttacgtaatcagtaatcacgttatgtcagaatcatactattatcgaagggggaggaaaaccgaaaacgccaaactaattcataaaacttttgtgtggcccaatgggctcattctattgctataaagattttgcatggcccagatatgcactgattcctgataatgtctccagctgctgtatcgcctctgggtctggattcctaatactacgtatattgtttcagaaaagtatcttttgagcaaaatttagtattaacatttggcagtaaaaagatgaattattgtacctagcgtcggtttccgaaagtgacttaaacatacagtcaaattataacatcggtttaggaaccgaagcaaaaaattcttaacgtgaccttaataataagtaaaggacgttattatattgaagccagttctaacctgatgttagacttaataaaaacagacgtaattcccttcatttttgtagaatgatgtcattatgagactatacgatgttgccgatatatacagccaaattgccaatatataacacttccttcaaaccaaaattccgaagatgccttattagttatttactttaacttagcaaaaaattgttacaaatctcaaattctcaatttacttactagattacagccttacaggtcgttggtcaatttagtttcctctaatgttgcacattaccattataccatacaatgtttctctctttgtgataatatataaaacattaaaagccatataaaagcagtctaaaattttattcttggcaacacaacaaatttatgtccttagattcccattccaatcataacatatattaaatgcatgatcactttcactaaacatgcatggcccttgtatgcttatatcccagatacaattgatgcatgaaatatgactacgaacaccatctctgtcatcatcgtaaatgtcaaacctttttgattgtccaggccatgtgaaatgacaatagaaaagtgtcgttccaacaatacttgttctaaacttaaacgaccaagaaccattcggagcgaggattttgaggccaagatcgtcatctgcggacttacaatgaaggtttaaggtcaaaccatcaccaaggcggtttgtgatcctcaccatttttgaagtagaccaattaacatcaaaatcggttttcacttgtgagaaagctattttgatgagtagatatattaccaccacatgaacttgtgtttttaggatgtttttcattttctgttaagctcaaaaactgttttctactgaatactttttgttttgatttgcattactatatataggaagtattcgatgagatcgtccatgacgttatgagatttctttccaaaacggttgaccttgactacttgactacattgtatcgaaacaaaattaaggaaacttaacgaggatgctagctagaatatcaagatttatccatttttgttacaaaaagatataatactatttgtgggttattcttatatcttgaacagaattatattaatctttttggatcttcaaatcaaagagtcaattgtcagttataaaatctctatatttaacaatgattggatcataaacttttattaatttatttatgatataaattagtagataataaagagattttgttttatacattaacgttttataaaactatgaatttgagacaattagcgttttcaacatatttggaagagtttcagaccgacaagaaagaatttactaccttttctttatctttaatctctcgtaatgtaaatgttaaagcaaatcatttggcacaaaaaatttgtgcataaccgctacacattatttatgtaaacaattttccacaattttagttcgtttgagttctaaataatatctgatgaccaaaaaaaaaaaaatttgatagaattctaactaaaataattgttttggatattataaatttgtagttttgaaattattattttttcatatttataagaaaaaaaaattcaacactaatacaaagactttagtttagatgaattcacttataacaacactataatttaaaaacacagcataacaatgtaaaacacatgtatagcataacaattgtgtttatacaagaaaatttagaaatgcgctctaaagaaattataacagtttgagaacactaaaaataaacactaaaagcatacaaattatcataacaacttatatgatattaacggaccatattaagtaaaacataaaatcaaattataaccgacggtactaaaaatcgttaaatgtaacactaggaaccgaagcaaaagttcttaacctgacctttattacgtaagtgacgttattatatttaataaaggcagatataaactgatgttagacaaacttaataaaatccgacattaaagcccttctttttgttagaaagatgtcattatgtgattgtacgatgcgaccgtcaaaaccaaagtcttaattggttttataaccatatatgtatacacatccaataacactttcgtcattacaaaaactccgaagatgccttaatacttagttatttctctaacttagcatataattgatacagatctcagtttacgaaattacgtacaagtctttggtcaatttagtttcctttattttagcacattataaaatgttctttcccgtcgtaaacaaattcgaaggtttgttctttgtgtagtttatacttctttttttttggacaattgtgtagttcataccaaaagtaatagaacaacaatttaaaacgaaaacaaacaaacaaacgaatgattcttgtggttttcttggcaacacaacaaattatgatcttcggtttccattccaatcataacaaatattaaatgcatcatctatttcactaaacctgcatggcccatatttgcctatatcccagatacagtagatgcatggaatacccatacgaacaccatctctgtcatcatcgtaaatgttaaaccattttgattgtccaggccatgtgaaatgacaaaagaaaagtgtcactccaggaacaatacttggtctaaatttaaacgaccaagaaccattcggagcgaggattttgaggccaagatcgtcatctgcggacttacaatgaagttttaaggtcgaaccatcgccaaggcggtttgtgatcgtcaccactgattttaaagtagaccactttagatcagaaccgggtttcacttgtgagaaagctatttggatgagtagatatattaccaccacatgaacttgtgtttttagcatggttgtcattttctttgaagatccgaaagcgttttctacttttgtttttgatttgcattagtatatataagaaatcttcgatgttgatgcccatgacgttattagatttaatttgtttccaaaatggttgactacattgtattgaaacaaacttacggaaagttataacggtgatgcttgaatatatcaagatttatacattgttagaaaaaaacactatttttaaatgggttatttacttattcttagatcttgaacagaattttatattaatcttcttgtatctttaaggagttgttaattagttatatttaggggtataaaccggccttaatcaatccaccttgcttgtgatacaagaagattaatctaattttgtttaatatctacattctacaattagatccttatttttaataaacaatgtataaatattggtatccttaccatagtaatgaatattgcgatgttttttttatatatatatacaaacctcacataagacttttcttcttattttgtaacaaaacttttgtacaatcaatacatgacaaatcatttttgacagatcttgcattttattcagattttcaaagactaagatttttatccataaaatgcctaattttgtaaaatccataaaagttgagtcggtttagaaaattgatttcatcatctactctaaaagccttaaacaaaacagtatcacaacgtttggtaataataatgtcttataacaacggtttagaaaaaacaccaaaccggttttaaattggttctcatcagttcttctttgtgagattaatgtcttgaggaaggagagtgtagtcgatgtgaaggtcctccaacattctcttaatggccaaagaaagttcggttcttctaagattcctctctctgttttcctgaaacgtgatggtgtggtcactgtatagggccatcttcagcttgttcatgttctctatctccttcaccaccaccgagtgaaccggtgcccaatgttgcgggttctgctccaagtacctgatccacaaaccaaagaaactcattcaaagacaagatctttaggctcagtggttaacaaaacagattcaaggtacttactcggcgattctttctttgagatgtgctatcttagagactggtgtcgagaaagagatagagaattccactgtttctcccatattcggacttctgaagtaattgcttatcggtttcgtggccaaaacagcgttcggataatacactttctcgttgttaagcttcaagaacactgtcgttaagagattcatttcttccaccagcatctgaaaaacccccacaagaatgtgtttgtatagagtataaaaacatatatatgagtttaaaggatctttgatgttgaagtttaattaccgcgacaccgtcaacaacacatcgatcaccgacatcataaggatgcatgacgaatacgaacacaatggattcaaagaggtttttgcatgtgcttccgattataaaagccagagccacgagttgggtggagaagaacagcaaaaccttagtcgttgctacttctagaaggagcagccaaatgacaacggtaaccaccatcaagattgctgtcacaagtttgtttaactgcttaaccgctgtttttgtgtcgtttaaggaatgcgctaaagctctccggctcgtgtacaccttaacctgatcaagttgcaacacaacataagtcgttaaaaccaagaaacacatactctcaaggcttttttttttggaataagccaattcatttggcgtgacaccactaaaaacagtgattggtgataagaagaacctgcaggtctgcggttacctatcagactcacaatctagtagttctcacttctccattttttcataccattattttatttttattttttttcataccataatttatctttaaagaataaaagcatgaaagtgttctgaggagacttaccacccattctgtgaaagcttttcttgtaattctcccggtctcagcggcaccatcaaacaatgggaacacaagatcaacctcttccttaatcataaacctaagcaagtcctcttcctctatgtaactgaaaaaaaaaaaacaaatccaaagatgtccatcagcgaatgcaccaagaaagagaaggaaaaaagagcaaatcaagattgttttcctacttgaagaagggctgagcaacatttctgaagacatggtaagcagcagccaaagcctccatctcactagtaatttctctgtcagcttgctctttcccctcgccgtatgctgtttcgtccaatgtgtcagagatagtagagagacctgaagttctaaccgcttccatcaaaactcgcatagtccaagccgaaactttctcccgcttcatcttatgaactttccccatatcaatcactttcttctctttaaccgttccttttttcactacagtcgcgaaactcaaatggcctgtgcttggctcacgcccgaccctctctgcctcttccataagtggaagacccgagagcgtttgtagaacatactggtggaaaacagaatcttgaatcctatcgaaaaagttattgacgttgaaattcgctgcaaggattttcaacaagagtgttttcaccagccaaaagaatgcccctgtaagaatggaaataagagtcctggtaatacatttgaggactttggtggctgcgggggaccgtttcacgtcgtggttgaacaacaatatccaagcaacaagaatcaagcagagccaaatgaaaacttggacgctcttcttcaagccgtgcacaaagtagagcacttttctcctcaaaagaaagtttgtttctatgaggaacacaatcaaacgcatgaaccagtttgtcaccaacattccactgaatataaccatcacaagcacacaccatttccagacttctagcccccagaaggtgtgatgtttcaggacattaatggttaaactcgcaaccaaagcgctcaaaatcaccacaaagaaagctgactctatcaaagccaatgtacttatcttactgcgcatctctctgttcagcttaaccttcttgtagatttcctcatcctcatctttctcaacaacgactttacttggagtaaccggtgctggtgacccgacactcctattagatttgttattcggagaagctctactaaaagaaaaaccagcaccaagttgctccctaacttcctcctctagaatacttgtgtctacaggacaagatggatcaacaaaccgggacttgggttttgagtaaaccgaccttgcaaaagatttcctctgagttagacccacattgttctgatttggagctctaggaggcttgttaggactaccaacaagcttagagatttcaggagaagggcttttactaaagggaactcctttctcagactctggtgaagccatttccttggaacgccttgatgcttcctcaactggaacattgataacaacatctcctcctcctcctcctccgttactactcttttgttctgccattccaatgctactaccatccaatttcacaacaatgcctctggaaaatttccaaaaaatcaagattatagaagaacactgtggggatgttaaagtaccaatttattttagcttgattcaaataaagtaattagattttgattcatcagacaaaaagggtttaagaaactatattttattaaagtaaacaaagtggaatataaaccctagattcctgaagcatagatttgtaacaaagcatatagatttacagaggaagattaactacagacaacaacattctttaatcctactaaatctgtaagaaagatccaaacttcacaaataaaataatcagaacttcttcagaaaaacaccaaaaaaaaaaccgaatttaaaaattacagtcaaaagagggaggaaccgagcttaccagtagtgaaaaatccaaagaaaaatcttcttcttctgtgagtattagctcattcttgaagaagaagaagaagacctgaaatatagccaatgaacaaacaaaaaaaaaacagagagcttaggagatagtacacaccacgaccacttaagaattatgagagatggaagaattcaaacatttgataaatgataaagaagaaatccgattatacataccaaaagcaaaaaaaaaaaatagcagctaaaaaagcagagctgcagaggcggtgggaaaaaaatggcttaaacccagaaaccaacaaaataccaaaagccaactaaataatagaaaacataaacatggaaagaggaaagagagaaaaagatcttacatgaacaaaaaaacattaaggcgggtccaaagagcaaagagatgtcaagactttataagccacaaaaattaattgggaaatgtaattgacattactttttaaaattggagatggcttgatggtggagtagttttaatcgacctttaaaattccaaaataattaacctttttcgtcaacagaaagattagtactaattttatattagtaagttggatatgaatatgaaaccaaatgtattggggaaaatgttcacacaaaacgtggttattaaaaaatcgtgtaataactccttatgtactatctgacaaaaaaaaacactgttctttactaaaatgttgtacataactttttttaactgtacatacttacatccaaaatttcaaatttgaaaatgtgcacgaaaatcaataagtttagatatcagtgagaaatgaatcaaacataaaatcagttaactggattgatataatacaaaaaaaaaaaactggaaattggttaagaaaattgaaatacattttgttttttggttagacagaggaaacgattttcctttgactagtgaccactgaggcactgaccataccactctctgtctccatcgattccattatatgtctatgtcgtttttctttcttcttttcaactctataatgaatgtctctcgttgctaacgagctgtgtttttaatcattccgttaattaataatgtctgagcatgtttggcatgtctaactggtgattggtctctggtcagctctatcgtgtgttttagttttcaaaaatataatcaataatttacacgacaagaatatttagacaatccacctatgtacaaaattgttacttaggattgaaattaagtaagagaaaaaataaataataataagtaagaggtaatggtgtaacttaatgctaattcaatagtgtcaaatttctatttttttttgttccatcctttgggtgatatatatcatgttatttattaaatgcttattttcaaatatctttatttgtgtgaatgaataacatatataaactgatagtaaaataattataaaaacttaaaatttggatatgttaaacaacggttacctaaaagttaaggaagaaatcattttttaattttcagataacagtttaataaagaataaatttgtctatatgccattcattgtcactcgttagtcgttacctagttacaataatctcaacataattggcacaatggctgattattgatatccctagtttgcaatgtgtaaaaatgaagaatccaacggacaatatttactttcaatggcagaggcaatgtaatgactagattctgagtttctgaccgttggataaatttggtagattctgacagttgatttattgacagcattgtttttggagattataaatcatatatatgaaagttggccaactctctccaaataaatgacacatcatcacacaagaaaatgacatgtgtcattctatattttttaaattaaaatattaatcaaattaaataagcaaattaaatatatcatcaatcctactcttaattgttttcttcaaaataaaaataaaataaaaaattaattttaataaattaagcactacttttattatactctttttattttactattttttttgttgtacttgttcgttacctaacctcttattagtttagtaattttattttgagtctttgataacattgacattcaagttttttcaaataataaacatttaaaacattagacctatcaaataatttaatacacgatcatttctcttatatggatagatgcaatgagagaagatctaaaagtattgacttaaatgctgctttaatttttgcttttttttttattcttttcatatgaatacttttgaaatcttattcagtttatatcaattctatatatttaatcatgagtcgataacactgttgttggaatattatatcaggtgaatacatcaaaccagaaatagtttatttataatcaagttagacaattttcaaatcatttaagacatgatcatttctctaatattgatatatgtaatgacagaagataaaaaaatattgacttaaatgacatataatttttgttatctttttattttttcatacgaatacttttcaaatcttgttcagttgatgtcaatccaaattttaatcataagcctatcacaatgttgttgaagtacataaaacaagatttggtttataattgagttaggcaaattttaaatcatacaagtaacatagttgctcataattttttcagaatatcatatattgttgttatatgtattcatgaagtgaaaatattaaaatcttataaataatcagctttatacatgaaatatataaattgatatttcgagttacaaatgaatataaccataaaatataattacatactattgatctaattttattaacaatacaaaaataaataaagaataaatataaatttgcaaaaaaactatcaatgtaaatattttttaacaattttcaatataaacccatcatctagtatagagaaaaaaaggaaattgaagaaagacaaaaaaaaattgcaacgagagagaaaaataaataaaatgccgacttaaatttaacccataaaagtttccatttttattcctctcccactgcaatttcctttgttctttatagatccaatggtccagaacgtacgaaattgatccaacgcctcgtgaattagatccaagtcagacttgaaccctacaaaaactctataaatatttcatgtttcttctctttcagtacaaaatcctttttcctctctcgctacaattctctctaagcttgtaactcagttctaatctgaagaaaccatggaacaaagttctgtcgttgcaaagatgcaatcgaacgaagaattcgtcaaattaatagagaaaacccaacaaatcaactcagataactttcgattgaataacttgtaatcgacacgatgttcataaaacaccaaatgatctcatgctagctctcgagatgagagaaactagctacaaagtttcagagaaaaaccttagaagattacaaaatgattcgatgatcgaaaacgatgactctcctcagcgtcatatacacgcctaacggccaattctgatctgcaaaccaacacatgccacgcgtcacttccagatccttctttattcttcacttacttcacacgtgccaactcccacgtgcgggttctgcatcaaatctccctccttttgcagaaccttgtcctcaaggtttcaatcaacaaaagctgagaatttcttctgaagatcaaagagaaactcccaggttgcctcctctactggttcattaacccacttgaccaaaaccttagtagctgcacgaccctgtctgttcaccatcttgcgttccagaatagtttcaggtgccttctcaaacacgtccggaagaacagaaggtaagtggtgtgtggtatggacattgcccaccaagaccttcagttgggaaacatgaaacacgggatggatttgagagtactcaggtagcttcagcttgtatgcaacctctccacacttgtcaattatctgataagggccaaagtacttgggggaaagtttctgattagaacgcagaaccacagactgctgcctatagggctgaagcttcacatagacatactcaccaatgtcgaattcatgctcagttctgtgttgatcagcaaaaactttcatctgatgctgtgcacgcatcaagtgaaatttcaggtataacagcatattctctctctcctgcaatgaacgagccactactgccaccttagattcaccgggtagatatggtaaatgagttggaggtgcctgaccatatacaacctcaaaaggagtcatatggcttgaagtgtggtagttagtgttgtaccaaaactctgctaaaggtaaccagaaactccagagatgaggtctagcatgacacatacacctgagatagttctccaaacaacgattgactacctcagtctgaccatcactctgtggatgatatgcactagaaagcttcagagcgaccccttggagagaaaagaattccttccaaaattcgcttgtgaacactttgtctctatcactcacaatagaattaggatttccatggagcttaaagacattatccagataggcttgagctacagttgcagcactatatggatgagccaaagcaataaaatgagcagctttgctaaggcgatcaactacaaccattatcacagacttacccgctgaaactggtaatccatcaatgaaatccattgaaacatcactccagatcgtttcaggaattggtaatggttgaagcaaccctggatatgctgcgttatccggcttacactgttgacacacattacaactcctaatgtaagcctaatctcttttaccatacccttccagtaaaacagacccttcacccgctggtgagtaacttcacgacctgaatgaccaccaacgcctgagccgtgtaaccattgcaaaatattatcctttattttcacatcagcagggacaactatcttgcttttcctgcgcaacacaccttgagtccaagaaaaatgtctcttagcagtaggatctttcttcagagcctcaatgatatcgtgaagacctgaatcagtgatgtaacccgcctgaatttctttgagaaggtcacattccaccacggtcatcgccatatgtaaaacctctgaaccttcaactcgagacaatgcatccgcaaccaagttctccttaccttgcttgtattggatttcgtaatcaaactccaataatttgggcagccactgttgttgaataggggtatttaatcgttgttccagcaagtatttcaaactgcgttgatccgtctttatgataaagtggcttggtaataaatagtgacgccacttacgcaccgcaaagatcacagcaagtaactctttctcataaattgacaaatgcaattgcttaccttttaactgtctgcttatatatgctaagggacggccttcttgcatcagcacagccccaatcccttgcccacatgcatcagtttccactacaaactgtttatcaaaaagaggtaaagctagtaccggtgcatgacacatggcagctttaagtgcatgaaaagctgtttctgcctcgtcagaccacagaaacgattcagtctttgtgagagcatgtaagggtcctgcgatagtgccgaaacttttaacaaaccgcctgtagtagccagccaaacccaaaaaaccccttaactgcttcaaagtcgctggtcttggccaatcttgaacagcctgaatctttgcaggatctgtagaaataccctctgagctaataaaatggcccaaatactccactctactgaccgcaaaagcacacttacttcgcttagcatacaacttgttctcacgcattacctcaaagacaagcttaagatgctgctcatgttcttctagtgatgagttatagatgagaatatcatcaaagaaaaccagaataaacttcctcaaaaatgtcttgaaaactgaattcattagactttggaaattagcaggagcattagtcaggccaaacggcataaccaagtactcacagtgtccactatgtgtcttgaaagctgtttaatggatattaacaggtgccattctcacttgatgataacttgctcgcaaatctattttagaaaagaccacagcacctccgagctcatccattaaatcctctattaatggaattgggaatctatccttaacagtcattccattgagctctctatagtctacacacaaccgccaggatccatccttcttcttaaccaaaaccactggggatgcataagaactggaactaccttggattgtaccagctgctaacatgtcctcaacaatcttgtctatctcattcttttggtgaataacatatctgtacggtcgctggtttacaggattagacccctccaatagtggaatgcgatgatcatgttgatctctgaatggtggaagctcagtaggttcaacaaaaatatcttgatatgtattcacaactctctccactcctgagtctacttctgtctccactgctaaggtgttaagcatacaaagttcactatcaacttcctcatttgactgaatctcttgcacacataccatggctaactgaacctcctcctccttaagtttctgtaatttctgaaccttcatctcacggacagaaccactgtgaatgccatgtaacaataccttttgatttgcaaacttgaatctcatttcgagcttcttaaattcccaagaaataggacccaacgtttcaagccactgtacccctaaaaccatatccacaccttgtaatggaatcaacaaaatatcagactgaaatttagtagattgcagcttccactcaaagtcacgaatcttgccctcaactttcagttttcgaccatctgccactgaaactctcgataaccctgcagtttctacctgataacccagtttcttagccattcttgcgtccaaaaaattgtgagtagagcctgagtctatcagaataaagataaccttcttgtcataagtacctctgactagcatcgtcttgtaatctgagataccagccactgcatttactgagatctgaggcatgtgtctggggtcctgatcttcatcttccaacaagacctcagaagcatcctcaaactcttcatccacttccatacggaaaagttgtgttttcctgtgaaccaagtaatgctctggagtgtacttctcatcacagaaataacataaccctttagctcttcgctcgctcatttcttgctgagacatcttcttgggctgctgactcacaggcttgaaaccaccccgcgacgaagattgatcaaactttccctccttatccttagagttctgagaataaccaccagcttgagtgggacgagacgaccgatttgacactattggcttcttaggatgggctctctcatatgtttttcccaagaacaagcaatgcctaatggattgtggctgaaacatgcgaacatgcatttgggtgtctgttcttaaacctgccaaatacacactcaccaagtactcttcagaaagattgactctagtcttaatgagttcaaacttctagtgataatcaacaataccatccgtttcatgtaaatgtttcaattcagccatcagatcatcacactcatcttcgaacctttctttcaacagtttaacataccctctccaatcatacaaaacctccaaaccaataccagactggataaaagactgatgccatgtggaagcatgactatcaaaatgaatcgcagccattttcaccttcatatcctctggagtcagatccacaccaaagaattc

SEQ ID NO: 1425 - DNA, 90020 bp, Arabidopsis thaliana
aagctttatgcaagtgttcatcattcgccatcttcttaaggtggactgaaacagcaacaaactcgctatagttcagtgtcccatccccatcaacatcagtctgcaggaaacaaaaaaaaagagttttaattttcagaagtgatatagcacttgtttcgagctaatcgctctgaaatgaaagattcatacagcttccataagaatttgaagatcagtatcagctatctgttgtccagctttttgaagtccatatttaagctcctcgagatttatcttgcctctcttgtttacgtccatcatttcaaatgcttcctttatccctgctgcttcctccactgacaaatgttcagctatcacctagaaggacgaaacaaatttacattttcatttttgattctgaatcagactggaagcaaatcgataatcagtgacatggtttaacagaatcaatactcgtagagctcgtttcttgagcttgttcataacagaaaactgctttagtcttgctttcacagtctccccaagagagacatttggagccttctttgcattcagtatccaagtatgttctgcaaatggaatatttatttatgagtttacgatttcagaaagctcagccttgctgaaaacagaagcctaccgagaacttgtgcagcagtaagccgttttttgggatcaggttcaagcatctttctcacaaggtctttggcgctgtcagaaactcttggccatggatctctcttaaagtcaataactgatctaatgatcgcttgagccaccccttgctcagtctctgtacccaaaagaaagataaaaacgtctgaaagaggtcttaaagtgaataagccagaggaaacaaagagaatgcggtaaagcataaacaaacctgcccaaaatggcggaacaccacaaagtaggatatagaggataactccagcgctccacacatcgatctcaggaccatagtttcgccgcagcacctcgggtgccatgtaataaggacttccaacaatctcattaaactgctcacctgttacagtttagaaaattcagctcaagtaaagatacactaataaatgtgctccattgatactcatcaaaagctgatgttgtaaatgtaccaggtttgaagaatacagataatccaaaatcaatggccttaagggctgatgtctctttcttatttgcaaaaagaaagttctctggtttgagatcccgatgcatcactccttgcttatggcatatctgtaaagacaaaccagcgatgtgtgaacataaaacacagacaaaaggaattggggacttcagacattgtaaacacagctatatatggaacctgaacaacttcaacaatagtcttcataaccgcagcagcagcccgctcagtgtaatgacctcttgcaacaatccgatcaaacagttcccctccttcacacaactccataactatatgcaccgcatcatcatcctcaaaggaatccttcaaagagacgacatttgggtgtttaggcatatgcttcataatctcaacctccctcctaacatcctctatatcaactgctgttctcagcttcttcttagatatggacttgcaggcatacttctcaccagtttccttatcagtacacaagtaagttataccaaactcgcctcgaccaacctcacgtccaagatcatactgcaaggatatatcatgtcctgtaggatctttcagcacagagagcttaaaaccagctccagatctatctgttgtagcgtattcattgctgtaaaaaggattgtttttgttcttgggtttcccttgtttactctggttcgtagccgaactcggattgccacaacaattccccatctaatcaaatctcaaggttcctgaaaaacccagaaagattaaaactttgagcactgttcttcaaggttccattagtaacttaagccaataactatttctaattaacaacatatcctaaatcaaacagaaccctaatctaatatactcaaaccagattagtaaaccctagctaagatcaaagacaagggaaagagggaaaacacagacctcagaacttataatgggtagaaacatttaaatgggtataaatcagttgaagcaaaagaagatatgtagctaaaaaggataaattaaagagaaaagtcatcatacgctgtgaggaaaaacaaatgcagtgatagagagagaagaagagaggaagaagacgagtcaaagtcttcctctttctctctcttcttcaaatgacaaaacacacaaattgactctcttcttcttcttcttcttcttgcttgcggggattcaaagaatgacaactcttaattttttatgtgtttccatattctctttcatatgctcttcgtgttttttgttgatataaataatcgatctgcccgttgtagatttaacaacttcttttttttcactgtccttttcaaatctggtttatatgcaaacttgaaacttccatgagcaaactatgcaacttattgcaagctgttttttttttctttgcaaaacataatgtttaataggtttcttctactttctaatcactctcctccggtcaaataatgtttaagttggcgaaaacagagaatttgactacaaatctgaagcattgttatagccttgttaacactttgtggtcagaaaggcaaacgattaagcaaacgtatttttcaattttgcaaaagagaaaaaaaaggtcaaagaataaaaacaagacctacttgctattccttagtctcttgtctccaaaatctaacacctaacataactcgctctttgtacattcatcataactgttaaacccacacaatatgagactctgacaagaacaactagcaaacacaaaaacgaaaaagccaagaatgatttgccggtttgaggcaatgattatattagccaaagtgtgtgtctctctctcctctcagagctttggctttttttattatggtgcaccagaagaattcagggtctcattagagtctgtctcaacttgttcagagcctgatgagttggttgctgaacccctttctctgtctctccctcctgcatcctctcccgcttctacctcacttttcttcgcaaaccggcctccactcgctcgtgcccttctcattgcatgcttgtgtcttgactcgtgaagatatggctgtcgcatttcaaacatagtcaatacaagtttaccgagcgacaaaccaaacttgcaaattcttaatgctcattatcaatccttcatatagcatgggtccacttctattatggactctacaccatccttagattaccaggacaccaatcaagtacaattttcataaatgagaaaaaaatacctttctgtcccggatgactttcctctctagctctgccttggcacgtgcttttcttcgccttagaattccctcgtactgctttgcattcacataaacgggctcttgtgccatgtcaagtggcagagctgttctttcacgaggcattccaagatatggacgaaaaccctgtttaaaccaatgaacaaaataaatgcaacaaatagactcagatcatcgaaaactttacatataacttataagaccccaagaatccccattagttgttctcgataatttcagatataactttggattctcagttatttcagaaatgaactttaaaagcatctcactgactattgctgaacccagacacattccaacagtaaataaaatcaccacaaacgggtacttagtggcaaaagcgcacatacatcaaataaacactgcaccatatggaactattgtagagattgaaagaggtttcgacaagataccaattgctgatgaccatatgctcccatcaatcccccataatatggatcctgatatgggtttgggacacaagcctgtaaggaagttttgagtttatcatacatatgaaaagggcgttatacaagataaatccttttgagggaccaataagaagtcaatttaacagctcaagaactcataaagcatatatatatatatattaaggaatgagaggaaaccacatacgatatagtgtccaacaagctctggtggttgtacaagtggctgatcatgcatgttacggatagagagcgctgggtcatttccttccattccgtgattatctactgaagttgaagaaagacaccattacaaacaaaataaagaaatcacaatgcacatatcaacgagacagaatctccttggcatggatagaactatgaaaccctacaattacaatgcaagtatatttcaaggaccagattcatgaacttgacacgccctatagtgccgaatcacacaaatgcccatttaatttccctgcctgcttgaggaacaactcttcaccaagttgcaacattccgaacgtggaacaacatcactttcgacagtgatcactaggtcatccagtaaaacagtactgcagaaatgatgaatatgaacaatacaccaagtaggcctaaagaccaagaactcaaacctgaacgagaggaagttgcagcttgtgaatccttccaagtgccatcgttttcaccattcaacgcaccgtcttcagatgctgaatgaacatcgtttgactcggaaccattggggcaatccaaagaagaggaatttgatggaattccagaaggtctcgcttgaggtacaacaccaaaggagttgtttttccaccagggctctgcatacatcatcggctgctgaacagcatggtgattattgacttcctcttcgttttctcttcccggttttgattgcatctctacataatcaagtcaacacatgttcagtaaccaattcaaaatccaatcaaaaaaaaaaattcatcactaaaaccgtgaaaaagatacagactccaactacaaaaaaaagagagcaattttagggctatgaagcaatgcagaagcatgcaaaaatatgagaaagcaccaaaatctcacatgtctcgaatttacactctaaacctacataagctcgtaatattcaagagattctttagccacctgcatcaattttttcaatcccttcacgaattctagcaaacaaaatttcaaaaacagaaaaaattgaacataccagtggaaattcacagcagagcactcttttgcaatcgccttcgaagaagattaacttctttcagaaatcaaaaaaccctgaggtgaatttaatcgatcacgattttgcagagtttaaagagaagaaaaaattgaccttgaaaaaaaatcagaatcgaacagaaccagagaagaagttggtgaaggagaatcgattcagaaaacccgacagccggcaggaatggagaatttcgtagaagaaaagtgaaattgggcgagaagaaaaccctagattttggggatttttcttttttgccagaattgtggtttttgatattaagtaatttattgaaaaatcgaaatagagtaagttatatgatgatgatgaatttacacaaaagaccgagatttgataagatcacttacgaaagtgaaaaatctttttgccacgtggcgctctatgaaagatgccagcgcgcgcagatctgggatcttctccggctgacgttatcataggttcatttttaatttgttttgttttttcttatatactagaaagaaattaaatttcttttaaaaaacaggagaaatttgggtccaagtgacacgcaagtgatgggctgggacgagggacacctgtaaaatgtggggaccctattggcaaaaacaattaaaagatttttttttgttaaagaaataagttaattagttcaatatttgtaatttctttctttcacaaaataatataaagtgttttcccttcatgaaaaaaatatagttgttttaagaaaataataataataatacaactgaaaaaaatattttccataaataattgtaggtaaaaaaaaaaactatgaaaagtttattaaaatcatattaaatggttacaaaaggtaaaatacgttcgaagtttagtaatttggtgttattacggagattaaaggatccataacacataacatttatatgagttttggccagatcgtctttgtgaacaataattgatttatttgttggaatactaaaccgaattgagaaatttcgctgtgcatttctcactataacacttgatgttgatatcatcattgattatgtattgtttcaggggaacagatggtaattatattttctctagtgaagtgtttgttgtgagagcgaaattaattaatcggtcatggacaaggggatacacaaatatgatatggaaaatgacaaagcataatatatagcatatgactcagacactcagacactcagacactcaaccaccgaacgttagccattaaaaaaaggcgaaaatgatgaatcatacgcaatatttatatttagaaagaaggtggggagaaaatagagacactaactcttgttatgcttttaaaatatcttgttattttgaatactaacatatattaagtggaaaccatttgattatatatgtgtaatggtctacatttgtgtttgaagtgttatggtgaacaaagttttggccgcctagataaaagataccgtttatcatagcggctaaagcttcccgtgagccgtgagcgtgcgtttgacaatcgtgattcgtgagtttaaggatcgacagtcgtcggtattcagctttttgcttattcaattttttattttttcagtaagtgatgatatcaatgaatatcaaaggtctacacaaacaaacaaaaatatcgtttatagtagaattgtttttaagatgctatggtttacttattttgtatacctagttataatcatctatagatatgccatctttagtatatatcaatcatattgttgatcaaaataaccgctaaaacgtttggttttgttctagagattatctataatttaaacataaaatcataactaaaaacattaagcaaacactttgaagtcattaaaaatataattaacatgcagttcataccaaccaagtttcgaactagtaaatactgacatgcaatccgtttaactttcttgattactatcgcggttttgtgggaaacaacaaacgttaacccgcacatccatgtggtactgacatgcaatccgtttagattctatattacatactacaacaaatcatacattgatacacgcatactgactttttttttccccaaccttaacttttcatatacatatgataattatccaacatatgtcgattcatagtcttgtcacatgcatcatataagtacgtcatttaattcatgcagtgataaacacccacaaaaccaagctttttaaaatacgaatcgtaaaataggcatcacacacacacacacacatatatatacatcaaatcaaagagaattcacgatatataaacaccaaacctaagtcctaacatacaagaaataatactatctacttcacttcaacgtacgactccaaataaaataacaatcgtacgtgattgaagactggtgtcaatccgatcattggtgtgtatgaggattcttttgacatacaaaagaatactcgatcattggtatgcataaggattctttttctaatacgaagaaaatttccaaatttcattttcttgttaactttttcttcaaaccccactttttatggcattcgaacccgaagtcatagcttatgggtggtggagtcgagccactagccaaagaatttaaaatattattctttatttaaaatgtataaaatattatatttaaaaaaaaaaacaaagacctgcagctgattgaccaccgtctaaagagtcactcaaagtccgctcctcaaatccaacggctgagatcgaagaatcagattctttataatttataacgtggatttgaaacccgtattccaaaacgcttaaatataccctcacgcgcccgccaccttctaccgctttatcccgtcacatacgctgcagagctctttaacctctttacactatctctcaccacttcttccggtcacaccagttaccctctcatccgttttcgttttttttttctctctttcaaaaatctctcagctgaggttgatcgatcttcttcttcttcttcctcactctttagatttgttccttttgcattttacacttttggatctgaaaatgtggttctctgtttcgcccgttaccgtttagattcagttctgtttttttcttacccgatcgcttgattcggactgtgatctttggtaagctttacgtattagatttgctgaagaacttcagtttcaaatgattcttttgatttagtttatcaatctgaaatatatttctgggtgattgagattttaagtcaaaatagttttgagatttcgattgtggttgactgttcattgacttcttcttttttatttatcaatttgtttctaattaatatggtttttaaggttagttggttatattgaatcgtctcttcttaaagttgtttatctgatttggttggtaggaatttttttctgagtagaagaatgtttagctgaacgatactgaatctgatgcttcttagatttagttttcttctgtgttaattcatttcagaaaagtttattagatccgtttaattctttgagtcttcttttggtaaatcttctgactttcgttgtcaaattctaattactttgtttccttattttctggtcaagtttttattattataatcatttatcaattcaatagctttccttaattgctgattttgattgaccaatattttttatgatatacctcttctctacattgcaagaagcatacgttattggttgatttcattacccaagtaacgttttttatcttttggttgattgtttcagatcttttttcttctccagtgccgtgaaggatgtgtggtcttgctaagaagctggatatagaggatactttgacatcactgtcagaccaagagaatgaatctttggccaaacccatgaatgatgctgctgaatgggaacattcgttttctgccttgcttgagtttgctgcagacaacgatgtggaggggtttaggcggcaactctctgatgtgtcttgtatcaaccagatgggtctttggtacagacggcagaggtttgttagaagaatggttcttgagcaaagaaccccgctgatggttgcttcgttatatgggagtttagatgttgtgaagtttattctttctttcccggaagcggagttgaatctgtcttgtggtcctgataaaagtactgctcttcattgcgctgcttctggtgcttctgtgaattccttggatgttgtcaagttgcttttgagtgtaggagcagatcctaatatccctgatgctcatggaaatcgtcctgttgatgttcttgttgtgtctccacacgctcctggtttgagaaccatccttgaagagatcttgaagaaagacgagattatatctgaagatctgcatgcctcgtcatctagcttgggatcaagtttccggtctctctcatcatcccctgataatggttcctcgttactctccttagattcagtatcctctccgactaagccacacggtactgatgtaactttcgcatcagagaagaaagagtacccaattgatccatcattgcctgatatcaaaagcgggatttattcaaccgatgagtttcgtatgttctcgttcaagatccgcccatgttctcgagcatattcccatgactggactgaatgtccatttgcacacccaggtgagaatgcaaggagaagagacccgaggaagtttcactatacgtgtgttccatgcccggattttaagaaaggatcctgtaagcaaggtgatatgtgtgaatatgctcatggggtttttgaatgctggctacaccctgctcagtacagaacacgattgtgcaaggacggaatgggttgcaaccgaagggtttgcttctttgctcacgcaaatgaggagttgcgtcccttgtacccttccacaggatctggattgccatctcctcgggcttcgtctgctgtttccgcctctactatggacatggcgtcagttttgaacatgttaccaggctcaccatctgctgctcaacattcgttcaccccaccaatatctccttctggaaatggtagtatgccccattcatcgatgggttggcctcagcagaacataccggcgttgaatcttcctggaagcaatatccagttgagtcgtctgagatcttctcttaacgctagagatattccttctgagcagcttagcatgctgcatgagtttgaaatgcaacgtcagcttgctggcgatatgcacagtccacgctttatgaatcattccgctcgtcctaagacactgaacccttcaaatctggaggaactcttctcagctgaggttgcatctcctcgtttctctgatcaacttgctgtttcatctgttctatcgccttcccacaagtccgcgcttcttaatcagctgcagaataataagcagagcatgctttctcctatcaagacaaatctaatgtcttctccaaagaatgtggagcaacattctcttctgcagcaagcctcgtcaccccgaggcggagagcctatttccccaatgaatgctcgaatgaaacagcagctacattcacgcagcctaagctcccgtgattttggatctagtctgccccgtgatttaatgccgactgattctggttcgccattaagtccatggtcaagttgggaccagacccatggaagcaaggtggattggtcagtccaatcagatgagttaggtcggttgagaaaatctcattccttggctaataacccaaacagggaagcagatgtttcatgggctcagcagatgttaaaagactcttcatcacctaggaacggaaaccgtgttgtgaacatgaatggtgcaaggccattgactcaaggtggttcgagtgtgaatcctcacaacagtgacactcgtgagagcgacattcttgatgcgtggcttgaacagctgcacctagatcgctgagcctcagctgcgagagagaggttcacatttctgtgaagctgtgaaactgatgattcgtttatttattattcaagaaagcaaacggaaacaaaagcaaactccgggtaagcttttttcgattctaataaccctaaaaggctcagttttttcaggcttctttctgaaatttctttactttcttatttttatcacctcattaaattaattattgtatcatctctgttgtaacaatggccaaagtgcgcctctattacttcccggatttctgatttacattttttgtatcctctcagtttgtcaattgtttctaatatctccttcatatttgtcaaagaacactgtatgagaaataataacatattgtttcagctaataagattcattcatttcctattgctttctctgctttcctgttttttccactaaactttaaccagcgattcatagactaatagacattaatctctcaactaacacgtttatggaagtcgagtaactatcaagtaaagtggtggtctcactttgaaacagtaaagttagaaatcaaacaaaattgacgcaagttaagattgcttacacttcaaaatgtgtgtgagtgagaataaaaattgcagaaaaactctgctcaatccttataaccctgatttcaatccttctcaaatctgaatctcaaagccgttctaagagattatatatataagtaaggaaaagaatgggaagattggtgtatggtggtcctcaccacaagccaatgaacttccaccaggcaccacctacaccaagccagatgagaatgttgactattgaaatcaggaatccatagccccaccatttagccagcggcacgtagttagctccgtagaagataggcgcagacccgataccataatgggtcaatcctcccatcaggttggaaaggaacgcaagaaccaaggctgcaaagtaaggtggagtgcctagagcggttgaaaccgataaaaaggcagtgaacatagcaccaatgtgggcagctccactagcaaagaagtagtgagtgtagaaatacaagaggacgaggattccaaaagatagctgccatgacaaacccaatcctcccacaaactgcaatcaaaacccaaacaatgtcaaaacatttcattagcatgctaagtcattaggcttattaagcattcatcaaatcatttaacaaaccttgactacggtctggctgaaccactcaatgagaccatatttgttaagataaccagccatcgcaatgagagcagcgaaccaggtgagtgtgtcccatgcgaccgactcagctaagcactctttccatgtcacaacacctgtcacaagaaggactgataatccaagaatggctgcagtcacagcatctacacccaacttagctccaaagatccagagaccaacctgtgtcaaggagaacacttttttagaaaaggaaaaccttctctgtaataaaacaccaaaaccacaaacattttcactcaaagcaaatgcattaaacagaagcaaagccctagcttaatctaaggagctacaatagctaaaatctctcaatgttcaatactgaagcacctttcaaatcaagctctcaccataagtaagaacagatccgatgaagcagaagcacacttaccgtgaggaataaagtggcagccataatcaattcgttcttagacataggtcccatcttgtcaagcttttcctgagccagcttaggagcatcaggactgctcttcaccgtaggaggatagatgagatacaaaagaaacggaacaacaatcaaagacacaagtcctggtacaatcgcagctttagcccaatcagtccatccaatcgtctgcttaatcgtgttaaacgccaaattagcactcaaaggattcgcagccatagccgtcaagaacatagaagaagagatcacagaagtctggaaacaagtaagcatcaaccacgagccaagacggtgctctgttccatccccaacgttactcccacaagcaacacagagagatttcaccaacgggagaaagattccaccggcacgagccgagacagaaggaatcgccggagctaaaagagcttcactgaagacgagactgtaaccgagaccaagggaggagctaccgaagagtctaacgaactggtaagctacacggttaccgagaccggttttgatgaaaccgcgagcgaagaagaaggcaagagcgatgagccacgggattggatctccgaaagcggagaacgcggcggcgaacgttagggttttggtgagaacggaagctcctaatcccattagagcaacagcaccgagaggaagcggctgagtgatgatcccgacgatggtggcgaggaagatcgcgagtaattgccacgcgttgcgagtgacaccttcggggactggaacgaaccatagaatcaaaccagtagcgatcgaagcgagaagaggcttaatggcagctccttgccatggaaccggagctggaaccaaaggaggagttggagaagaggaagctgaagcgacggtggaagaggctttaacgagagttgatgatctccggcgtaaagagacgggaagtggagatttgagtaaggagaagcgagaatcgagagatcggagaggtttcgtcaaattgagagaggaagaaggaggacgagggagagagagagatcgagatttgagagggaaagcgagagagcaggagccggagagagcgagagacgccatggttgtagcgtcgtcggcgagagagaggtgtgaagaggagagggaagtgaagaaggaaatgagtaagaagaggaaagagagagttggataaatgttgaccgttggattggaatcggacggtgagattaagaaaaggaatatacggacaagagtgagagagagtgatgatgagatgagatcgtgaggtgagaaatagagatctccgtctttggtgggtcagtcacctcatcctattggctgaaatatttacgaaaagccattttgggtttgggtttggtctttttagatcgacgaaacatacaaagcaaaatccttcactcaacaaattttctattgatttattagctttgttttttggttttgaaagatcttaaactatgcgtttactagtggatcgtccaatgaaagattaactggcaatagaatagtagctttcattacattgtccaagatgggccgagatggcttcgcttggaattaaatctagtgtaaacccttaagcggcctctcgtttttttttctttgagtgttatatggttcatagttttgatttgtttgtttagagtaaggtgtgacatcaaatattgaatacatgattcttttatgtaagaggatactttctaatgtgaatgtctaagaaagttaccaaatgttttaaagtacattcaataaaacaaaatgttcagttttatccaaagatataacatcagaaaaactttcatttaattagttcaatcttctccattgctacttgattacaaaattcttcaagtgtttgcccctgttatattaaagaatgtatgtgcttattatttcttttatttatttattataggatatatgttttacattgactaatcattacatggcacctcaaggctcaagccctagtacgaaaagattattcgaaatacaaaatactctctaacaatgtatatatatttgcatttatgtgtgtgtggctaagaatcttgagtataaaccgcaatagaaaaaagaataagatgacgtaaaaatattcatatgctttgtttgaagttgaagtaaaacgaaggaacctcagtgttcatcaactggtcaaggtcccaaaattcttccactggtctcataccctcaggtgcgtttccggatccattagtgttcaactcgtctaagtggttgtttatatttgcattgtaccaatcaccttcttcacattccaaaggtgggaagtagagttccccttgtacccctgcgtttactccatagataccatctacataaggggtaaaatcgtcattgcacgggtggctgatcatgtttcccgttggaaatggattgttggtttgtatgtgggtcaaggaagggttgacgaagccttgttcttgtaaggacatgaagcttcctataatgtctttaatatccaaagaagatgcggaattagaagaggaatcgcttgctgtgttgggtgatgaggatgagttgttgattaagttggaggtatcggacatcttctttagccttttctttattgttgagttccagaaattcttgatctcgttatcggtccgaccaggcaatcgtgctgcaatctgagaccacctatgaaatcgaagaataagagagtagaatagtttaatgagatgatgttatgtaaaatgtataccagtgcatggtttgcatgggaattagagagtgatccgttcttcatgttttttatgtttgagtacgtgaaaaagaggcaatatatcaacaattataaaattgcacaatcatattaagcaataaaatgacattatacacactgcgtgttttgaattgaatctatatatatatatatatatatatatatatatatatatatatatataaatagagaggaaacatgtcctgcgtaaaaaacactagaacgtatatttctggagaaagtgacaaaaaaaggaactaataaatatataattacaaagatgaaagttgaagtaaaaccctaaggaagagaagaaaaggtgtgtaaagtgacaaaagccgctttcactaaaataagtgtttgttgttagataagatcataagacgcactctaagtcttaaaacccacgatcaacgaactttgaccactcacataattacatgtgaatgtactcatacctattttggttttatgcgtctatttccattcttactactattattctaattcaactttcttttgggtcaattttcttcgtacacaatcattcttccctttgaatttaaacagttactaatcgtaccaatgaaaactcgaccaaactttatccttccacgtaagtttgattatacattttacgatgttaacgtatcttatatatatagtattactttttactgattaatgtaatagtataattgaaaactcgtccttaaaacaaacatagatattatacctctaaatagatagctctgcacttcttatttatttggtagaaaaaaaaaatcaaataaaatatggtgaaaacgttatcaagatctaatttgacaatttggtcgttttagggtggactttttttttaaaatcagttgactggcttttctatgctttaactttgtacccattaaccgaaaacaaattaagctacacaagtttaaaaacaagactcaccagacaaaagctagtttgccagaacatttatatttatcttccggccactagtttccatattttattctatctcttagttgttgttattatgtcaaaaccaaaatgatggtaaaaatgtaaacctgttgccgaggatggaatgaaagcgaatgatgagatcctcttcttgaggagagaaagcgccacgcttgaggtcaggacgaagatagttgatccaacgaagacggcagcttttgccacatctttgaagtcctgcgtttttcgcaacatcactccaacatccttgtccattgcttaacatgtattgcatcagctttgagtcttcctcaggagaccaaagtcccttcttcatcttctttacttggtgagtactagctgcaatggctacctctggcttcctcatatttttggttgagttaattgttattatttctcttcaatttgtttgtctttctcaaggatccattgatgtgaacgagtgaagtttgttttataatagagagagaaaagagagaagacttgatgaagggagaatgatgatgatgagaaagggatggttgtatggtttgcttacaattctgggaagaaaaaccatttgcacttcttcctttttaatctctattccttaattatatttttattgtatatattatatttataatatagtgttgctttgttttaaaacataaaagaaaaacatccgaaccctggctctttttcaaattaaacacattttttttgtcggcatatattgtgtaaggtaaataaaataaaatacaccaacaacaaatgtatgttttgtatataactaatttgacgaaatgaagaaacgttagttgatcggtcatggacgaaaacggttttgaaaaagacccgatatgcaaaacatcaaagaaaaaaaggagaagtgctcttcacttgttcttaattttattttcttcttttcttgttctttttgaatatataactcatttctattagtttcttcattcacaaggtatacattacagacatatctaattcgttaaccttacgtgtgtatatatatgatatataacattgatatatgatagtatataacattaatatatatattcatgagcatgtctatttctattcaaagatgtcttcattttcaaggtaagcaaatgttgtgttatttaattaattgtatacgtatgtaagcatatttcaattgtataaaataaatcgacgtgtgtcacagaaccctttttttgtgttatatgaggcttagcgagcaagaagttttgcttcggcttcacacaaccacctctcgcgcaccaacacgtatacttgaagaaatctaattattgtaatgaagaaaatgttatactccttttatccatatattttatattcgttttttctttaatatataaacgtgtgtcatgattttttaagttctcgatttacactcatatcatttttatttttttacagaacactcatattatatgatttataatattaatagcccacccatccgaaaaaacaaaactttttatacaatcataaacaagacatccatagataaagtacaaaagaagttagaatagtactgaatcttgaatcttgaacataattcctaatgtcgaattgaaggccaaagatatatcttaacctttaggggaaattgtttttggtgtaatctcttttgaagcttgcaaatgcaacctcttgtatatgcatgaaaaaagacgtcagctaaccaatttaagttgtaacttgaatgaacctagttatgtaaaactcgtggacaaagtttgaaaataacgaaatgcaagatttcatcaatcgaaaattcagaaccaaggtcatgcaagcacattaatccgctattccccatctcaaacaagtgtcacctctcactccaagctctcatctaaccatttggttcatgatatttcaatcatctcatgcatagccctagctctcagttattctcgcattttcctcacaatctatacatatctttacaattcacttttcgtaatatcgcccaaggaccaaaaaacactctgcaaatctgaactcttagccaaagaaacaatcattattaatttgtaaaattattattttttcttgtattactttttgcgattttttttaatctaattgtggatgaaagaatcacacaatcgctcaacaaattttataatataagtttgccaggaaaaaatagtttataatatatgaaaatctttagtaattttacaactaagcttttaatgaagtaatactactcttaaaatattaaaatttaactctatatatattcataaagacacgtcagctaaatctaacaagaaaccgttagtgtaactctaaagtctaaacacacaaaataatctcattaaaagtaagaatacagtagtgtgaggttaacaactgtagaagtgtagggtcatgtgtattgaactcgtttaagactggtaacggaagcctcaagtttatttatttgaatgattatgcaacatatcattttcttaaatgaagacaaagtggttactaattagtaaagcaattatcacccatgagaatagagcctccaaataaaggaaattaacaaactaccattgaatcaaagcattagcttaaacttgaatcttactttacagggtgatgtatcttaacctataattttatatatatatcttacatatcttttagaaaaaaaagaaaaaaaaaagaacaaagagataatttaagtatcacttcagggtctatctttttagtgacaaaatctaattggttaatcattatatatgcattacatgaaatttatggtggagaagttttggtcacacttgtttctgattagattgtctttgaagaaacacagagaaaatggacttcgtgctctttcaattatgtcacaacctgacagttgcatatctacattaccagcaattgtaattttttaacctaacccattccgttccgtgtcgtaatccaaaaaaacaagtttgaattggtaaatttttttgtcatcgaagtttctttctttaaaaaaacaaatggtgtagggatatttaatatcaccaagtatacgttgttgattagagtcacataaaaaaacaatttgtaattcagttcaacaaaatggcatagaagaagcgttaataattttgtacaattattagctgttaacagctaatactttacatttgttaaactattgtcttgttttatttgaccttttattgtatttgctttgaagtagtgttattcgattttatatactttctaagatatataataaaataaaagatgtcaaaatagaacaaaatttgccttctcatcatcaccaataatacctacagctaaaccgcgtcggacacgacggctataaatcaatacagttagtcaacgcaaaggaaaatgtcattgggtaataatgcatacttcttcaattttatgctgcaatttctttcaacaaaaaagtaccaaagctaaatttagtagggcaccactaagtctttttgttattttttatggagcaccactaagttcaatgaaattcattcatatttccaaacaacgatttataaaaaaaaaatcatataacagttagagatcccaatcaaagccaaaactaatccatataatattcttgtaaaaattggatatgttacattgttactacattaacgaaccataatttaaaccacgataggatgactcaacctccaatctaattccttaaagaatgtaattgtttccaaagtcattgtgtgttcactagccattagcttgatattgtctaggttaacaaaatcaagttttaaagtaatccatagaattaaaaaagatcctaaactcgaaaatttgatacaatttgtaaacctatttctaaaacattttttttgttggataagttatacattcataaacattgaacagatcttctaacgcaataacaaagttgtaacccaaaaatttagtcaaagaagagactagtaattaataactaccgcaacaattctgttaattatttcatcttacataactagaaaacaatcgatatctgcatacctttctcacggttgcttggaaaacagtccattaattttgaacgttacatcaaaatcaaaaagaaaaagaatagttaacatataaaaataaaactcagatcaattgacgtactgccctgtgttcatcgaacataagctgcagaatctgaatctgtgaccggaggcggcgagaaataacggtaaggagaataagttgttggaggagatggagctttgtacttgtaatgagggaacttatgttttgatgacgagacagaggaataaccataagctgcggcaatcatggtgatgacgacggtgagaaccataaggaggatgaggcgtgtaggccatgaacgtctcatcttcgaatcgcaaaagagagattgatgaagtttattttgtggagaagtttaataatttagaccaatagttcctcttgagggttagatatatagacggcttaattattatataggcaagagtttattttaacaagtcaaaggtttgggtgttattatcatatggaatctaacaacacggcaacttttttttttaattatctcctagtgctacttgtattggaagaagtttgacgaaattagttaaactcgattttaaaatatggtactaaggtaattatgaaagactaattcgcagatctagagtacaaaagcaagatacggtaaaatcccttttttgtctactctactagatggtaattaaattggataaagaaaagggattaacgtgtattctatcgaataatttattctggatatcgttttatttgactctgtatctttattataacagtttaggctacaattttgtaataattttccctgttaataagtttcttattatttagactataatcttgctgtgaaaactttttcggtacgattgagcgttttgacaagggtttagtgattattcattaggtttggagttggatttatctcaaattatgaaaagattagctcctctatcacaacaccagtgtggtataattaccggacatggttttattcatttcatcaatatgtgatttcaaataagacgtttacatataccatctactatctcaattctccactttcttgaccattgcttggtcaagaaactcttccaaaccaatgacggaggaacctttaactccatctaccattgctctcctcactaactccttcacctctctagccttcttcctaatctctttccctacttcagtctcctccatcaccagtttgatcttagaaacaatgtcatcacatttgatctcacatctcttcccacgcgccacctcaaccgataccccaatatgtttctccatcaatatggaattgaagaactgctcggctgccatgggccatccgagcagtggcacaccgtggctaagtgattcgagtatcgagttccatccgcaatgactcaaaaacacacatgttgccttgtgtgacaatatatcaacttgtggtgcccatttcttcacaagtaaccctctttccgatcttgttattctttcctcaaatccttccggtagataccctttcacatcaaactcactcttcacctccacacctatgggcggcctcaccacccatatgaagttcttctcgctactctctaatgccatagccaattctaacatatgcgtttgcaaaatcgagttcattgaaccgaaacatacgtacacaaccgaatggtccggttttgagtcaagccatgacttcactgcttcctctgtcgacctcgatcccaccttcttatccggagacttcaaaaccggcccaactggccaaaccggaacaccggttattctacggaagtaggataatcccatctgatcgatttcagcaaccgtgttgaacaagaatccatcgaagtcagaccatccaggtataatcttcttcatgaaaacagaccaatcatcggttccatcagcttctaacatgaaagaattcaactgagttttctcaatctcccctgcttcagggaaatcatctaagagaaactgatcttgtttggtttctttatgtggcaagtttaaccatatggatctataacaacctaaaccaaaagcaccagaagcactaaagatcactgaataaacaccaacctctttgcaaaccttaccgatccaacccaagaagaaatcaccgatcactataaccgagctctgcccttcttccttcaagatcttcgtcatgaagtctcgaaagggctcacgaagcgacctagaagcttcaagaaggctgatgacgagagagtaaggaagagaatcgaaattctcgccgtcgtgaggaaggccatgatcagagctgttgaaaggtaactctatgagacttatggaggattcaggtggaagattggagcgtattttggggatgttcgaaggagtattgatcatagagatggtggttttgttggctctgttcataatcataatcttctctaaacgaagggctaaagctacaaacgggatgatatggccttgtcccatgaaagggaacatcacgattctcagatttctgggtttagcttccgccattgccgaggaaaaaaaagatagatagagagagagatggatagatttggggttgtatttttgccgtatcgataacggttcagatttagacaagagaaaatgtgtgtttttggtctgacaataaagacttaaacagagtttcaagattgactacatttatttatcactttaaaagggaaggggctattggtaaaatcacttttcgtttcctctcattcgtcaattcttttttactttttccatgaaatattattattggtgtgtgaccttggcctttttttgttgctctctaattttttttcctcattcgtccatattgtgaaaaacgtgatgattttccacaaagttaggcatgtattcatgaatctacttataagagtatattcattgcatttgtatcaaatttatagtagaaacagcaaaatgtaaactctttaatatatatattattattattttctatcttgaaaaaaatagcaactcattgaactgagcttatataaacgccgaacagttcaagaacttatgtacataccattaccaatagctagatgcagctgcagctaaaatgcgtatgggacatcgtcctattactatagaagaaaagaggtcccctaatataaattctcttgggcctgacacacaatatatggaagcaacaaaaaaagtgaatgggcctatcttacaatctaatatttgttacggcccacatttaatatttgcgttcttattagcctatgtacatttttgattatctaaatcacaaatgtgctgccggcaaataaataaataaatcacaaatgtgcatattcaatacttttccatcaatacaaaaatgtaaaaatacaaaatctccttgacaagtagtatttgacaatatttaaaaacctataataattcttaacaaagtgtaaaaagaccagtaaaaaaaagcctaggtagaagaaacacaagagattaacaataagaaaagttaattaagaaccaatcaattttgattagactagagtgagtgtgactctcttcagttcagcccaatgacttgtacctgcaaagaaccttacatctcaaaaccctatctaaaacataaaacccaggcattaccataaccttaacccgtgccggtccacgggacaatgctgatctctgcctatctgcacccatatcttccataaaacttgattcaaactctctgttctcctcaactctcaatatccctaacgctggattgaacgagaaggcaagcaaatgaagcaaccatacacattttgcagccacaaagaatgcttgaagcatttgttctgaccaaggtcttgtccaattcaatgttgtaatgatcaaactcatcttctcatcgcagaatctactgaactcatcactgtagtattttgtaccctttttcaatacctcgttccagctcaagtttctcaaggaagcaaaggacgagaagttcgcttgtcgatcttgttccggatcaagcagtttcggcttaccgttcttctggaatacgcagttctcaaagtcttggtatactgattggcttatgattgcttctaagtggtactgaatgatcttggagtacttagaagtgaatgataagttgtgaggttgaaggagagtgttgatgttaccaattagagtcgagtcttcttcatcaatctctgaaactaatgttttcaagaactgctttatcgataatcttgcttctgatacaatctgcaagaacccttcaaccatcacttcttcactcactggcatctctgagttctttttccctgagcttcttccaccactattctcctgtgacactacttctgttgcttctctcaaagctttctttaaattgtcacagtaactttccaagtactgaagcttctcacttaactctcccaatgaagatttcatctctgagacttgtgttaacgcagcatccctacttctgtttgcttccatcaattctctcttcaacttctcaacaccagaaccagaatccttcaacacctcagaaacttcctctgacttctcagttatactaggtgaattaaagatcgaattactcttttgtttcttctttaacttagggaataaccaagacattactctacctccacggtttcttggctgagaagaaacaacagcagagtgcgaatccgtcaagggcacaacaagattagagctcttcaagctcttcgtgtcgaaacctttttgtttattgtagtcattgcaagaagagaccgatctaaagtcgaccgagccacagttgcttctaccggttgtataaaaatgtaacggtggagatctgagagcgtccgacatagtgtaaacatgatgatgagaatcttgatgaggcatcatcacagtctttcttgaagttgaggttttgtaagaatcagagagataagtatctccatctactaaaccaacaccatcttcatcccaagtctcagataaagtgagattcttgtgatgaaatgcagacacaggctcatcttcatagctctgttccaagacaccaacagacaaagttagcagagaaatgtgtgttgtaagttaaaaagcacagtaacttttgtccaaattcagaacagtggtctgctaaagacaaagtggttctaccgaattcaggtctttttctgtttgtcttaatacttttaacactcaacagtggttaaattattaaagggactaaccaaattattactatactataatgtatttttgacattcttttcgaattaatgaaccatttttgaagatccaaaacacacaactacatggtacaataaattaagaaacgtattatctaaattgaatactgcaatgacaataattaacgagcctgaaccgggtttaaccaaataaatctcgggtttggtgaaattataaaaaaaagttttaaaaactccaaaagcgtttgaacaaaacccaaattcccatacataatgtcgaaaaatcaatcaagtgagacacaagaaaaagagaacaaactcatggaaccaagaagaatgataagtgggaaaagagaaaagagagagagagagagagagagagagagagagagagagagagagagagagagagagagagagagagagagagagttacaggagtgaaaacagggtaatcatgagcagagaggttagggagaggacgagaagcaggtgaagcagcagaagaggaagaagggtttctgagactgtaattggaagatgggcttgacttcatctgcataagactcgcttgaagtgctctcaacttcactccatttgctatggcttcttctttttctcttgccttgttcattcttgtttcagaagaagccatggtagaacaagatagtacaagattagaacttagaagagaagagaaggatgtgacacaaaagagagagaagagatagtgaatgcgattgtgcaaaagaaaagggtgtgaagaggatgatgtctctgtgtgtgtgaagaagagagagagagagagagagagagagatagaaaatccaaagaatgttctgtctcccttctcttaaaaggactgatagaaagaacgcatgtgaagggcagagaccattttttatgtttacgataataccctccttttttgtttcttttcattttttttctcacttttctcattttgttttttggttaatatggtaacatatcagaattattgaacagtttacaaaagctaattccagtttttttacataattgttatcttatctactgctaaacacatttccactgttttatgatgttattaattgtaaatcaaaatgtttatctgagacatgattttctataagctttgttgtatctttcggataaatgggtaagacaattgttggatatagattactggatttttttccatccaaacatctattattaaaagaaaaacaagagtatgtggtttgttctagggaattctattactaaagagatatgtgttattcatttaaaagctctagaaaatcaaagattattatactaagaaaataggaaaaactaaaactagggataatatctatttatgataaatatatacaagtcagcattgatattattatgtaggaacacaaaaacaaagagaaatgctatcccgttatacattgtaaatttgtatattataaagattttcaaaatctgtatacttcaaagaatcatatactgtagtttgttgacaaaagaaaagtcatagtctaaaatgaattttatataaatgattaaaatgtctttcaatagtaacagtgtaacacacatgtcattggaaaatataacaaggatcaactcaactgtttcaaaatctatagcaaccacttagagacctcaagcaaaattaaatgattatggtgtatattcaagtcaacatcaatttgataatattagtaggtcatatatatcttagaagaatgggtaaattacaaaaagaaataggccataccttagttaaaaaaagctaggatgactttctgacaaaatgaattttgtttagtagaagatagaattccgtgtgggactgaccatgtcttaagagttgttttacaataatgttgtaaagtcgagttgtttacatcagcaagagaagaagaagtcaagaaactaagaaaaaaggattacactgttttatttatttaatgatgagaaaatcattgttaagtaattgtgcttaactttcaaaaccaaacccaccaaacccatatataaagtacaaatagcctaaacctaataaagcgttttgaaaaaaaacttccacatgcgttaaagtatgtaatgccttatagcctttttgccttttcttgcgaatgaaccgggcatttgttttttactacacttctttgttaccatttctataaggttgatcgtttttaaacatatttctttcaacagtctcaaaatgtaatcagttgggttttgacttcttatccatagtattctagattcttatagatgatgttacaagtacaaaaatttataagaattgatatagctactatatttccaacacataattgggttgtttcaggtgttaagcacgtttaaaccaaaataattttttaaatatacgattactgaaaaagatttgtataatctctacttaagaatcacctgtttcacttccattgagatccagcactagtatagacctattatactatgggcttttacatcattgttctatctaccgggccatacatgctattaaagatctattgaagcattatagtttcgaggataggttttttcaaaacctagatatatagaaactttttcttttggacaaaagatagaaactttattggtaagtatttatgaatgcttattggtgcaaactgacgatgggttagttttagtaattctatcaaagtagtttgcattttgattggtagttatagtcttacagagcccgtcttgagggcaagcaaataaagcatgtgtttgcctctgtagtataagtaagttctcggtccatttttcacaaaatatcctttaggtaagatagtgtacataattgtatacgtgaaagtactctagtgttggaatctcacatttacctcatttcttacttttgtcttttagtcgattttttttttttttttttaacgtctgaatttttaattagttgattatttcataggcccaatatgttttatttattgtagcccatatattttcaaggtcagttgacacagtcgcaacggaaaaaaagatctcaagcgttgattttgagactaatcgacggttgttttagttttgaaaggtgaaagcaaatcaatgatctatatttatcgagcgttggtgctcaaacttatagacggttatcttagttttgaaagatgacagcaaacctatggtctatatatagttgttaaatcattattcatgcggataagaaaatcttaaaattccttttaatcatagtttcttcctaattttcatttagattctccacaaataaataaatgtctccacccacaaactctcaatacatatctttcaccatcaaaacttttttacatatcaaagttgatttgctcactatggctcgttcgaaccagacagctcgtaaggcaacaggaggtaaggctccacacttcgccatgagagtatggcaacactcaactccgccgcttaagaaaccatatagatacaagccaggaacagtggcactcagggagatcaggaagtaccagaagaccacagacttagttataagaaaactccctttccaaagactggtgaaagagatagctcagagtctcaaggcagatctaaggttccagaccggtgctgtttccgctcttcaagaagccgctgaagcttttatggttggaatgtttgaggacaccaatttgtgtgccatgcatgccaaaagatcaactatcatgcctaaggatatccagctcgctaaaaggcttcgaggcgatagggtttgagatcataataatgtgttttttaaaacttcggaattaatattccgattgaaatgtacttctaagcttgttagaaagaaataaaatgttctgagattattgaataaatttgaattccatcctgttcgctctgagcttaagaaataattgttgcatgtttacattttgtagttttgagtcgcactgtttatggaaacgaatttagcaaaataagtatgatatacaacaagaaagagcattttcaatgttgtgatgagtatactctttttggaacatccatttaagcaaaacttatatattcatacataatctcgtggctgatttctatgttacaaacctacgccgagtccagctagtagatgctacaattcaccttctgcagtttctgatgaagatgagcaatgcatctgagcgatcaacagcaaagacgaattctgcagaatcaccatttccattcaaatagtgacttatcactattgacactttgtctttaccagatataatgcacaatgccaattacactattctattactactactaccagacaacaagcccatttgtttcactggtttgttttgttagccgagaactactaaaactaatataaaaacctaaaatagattaagataatttaagcaaacttgaatacctgagttccagctacgatcatgccgttgagaggatgcgcagcacaacctgtgacagtttcagacaatgagacaaacttgtttctgtgattacacttgtctctcttctcatttctctgtgtatcctcactgcaaaaatatattagcaatatcaggaatgtggccatgaagtttagaggacataggatatatatcgggagttttcatttttcaagaaatccttactcgtagtcaacatgacaaggagacctggagcttggatgaaaatcaagaacatgaatccctttctcgctcatggacccaaccacataaatctgcgatatgaatcatataagttatagaataagccaaaataagatcagaaatttttcacttatgaacgttaatggtagtacaaagtgtagggcttacagatgatgttggcagccatgatggcttccgcaagattaaatcagctgaactgttggaaccatccctagtgaaccaaaatccattacacttaaagcttcttttttaccttttatcaatttaataagcttgaagttcctaagtttgcttataaacttacaaccatgctggaggagggcaatgtacatgagtaacttcagatttatatatgtcaagaacaccggacctgcactagagatatccaccaaaggaaaatgataaatgatataaaatcaacaaaacaaaacatgaaagtaatattttctttagtcgttttcccaaaatgaaatgacctgttatgaaagaatgacttaccaaccatcgtcaaggtgaaatgcaagttgatgaggagaggatgggtttacatcaatggaatggatttccttgggaacgatttctgactgtgcctgaaaagtattcatggaaacttattctcatgctgccaaaatttcagtgtgatcaactgctggaagtttcgggggtaacatgattcccacattacaaatttttatttaaaaaaaaaaaaaccaaagaagcagaaaaaggttgctgaacgatgaaacaagtgaaatggaaaacaaaagacagaacttaccttaagagatgcaattttctgcagcttcggtgcaagatgtagagatgctaaaggcaattggctcatctgaacgttaccaatatcataacgtgatcagagccagagaacacaagaatgaaggtaaattcatgtagatattacagatgaaatatactgccatagccaattccagctcgccccttgtaagacttacatctttgcggctctgaaaagcagaagagtttcttcctccacgaaggtcccagatatgaatgattccttctttaccagctccaaaaatagtctaaatggtagatgaaagaaacgcagtctaaaattttgggtccttactaaatttgaaatcaaagtcttactgcaatttcaatgatcagaagaactttactgggcttggggatattttactctatgattacctgattatccacatatatttgaatactcttgatcgaatcatatctgtctgttgaaagttcaatgcatggagacactcctgctcttcgatcccacacatgaaccataccaagtgtatctggagaaaatattctgctaaaaacaaatgcagaaaagtcgctgaagaaagtaggtaaaatgaagctataaatgttttttcatcacaaggaagaatacaaacctcgaatcctcatcacttgtaatggcaacatcagataaacctctagaaattttgcggccaataatcgatagcttctgtctagtttgcaatacctgaatcacaaatagaaaaataattgaaatgtgggtgaaaggttatgaatatttagcagggctagcctaagtagagcagactaaaactaatgataaattgataagtcttaccatggccgtgtcaattcaattaataattgactgccattcttctaatcgtgatgggaacaataaatacactcttcggaaaccatgttggaacgggaattttgcaattgcctaagatagaaatacggcgatacatctgtgtttcttgtttctaatatataaaatataaattgagctaacaagaagaaaacctacgtaagtcatgatgatgcagtcacacgagttgtaaccagaaacaatttcatttgacaaacaaccatataactgatatccatgtgatctcaaagtcagaaatcatacctcagttggtttgggagacatgtaactgatatcgaagataagcacttgatcatgtttccttgatgtacaggctacctataggaactataagtactcaatagaaatgtttttaactgaggttttaataaaaagaagatgtcaagatgggcattgtattgactattaagcatatacctcattctggtttgaaggattccatctagcaacatcaaattctctaccgggagggtaagagaaatgcacaacatgcttactttcatcttccgcagaacctaagattgatgactcagtaaattactcaggattcaaaactgtaatgaataaaggtacaaaaacttgtataagaagcacacagtgagcagacagactataaacgtataatccagaaacaccaccatcattgatatttaaaaatattatataccttactcatatagactctagttaagtaatatcattgacaactggtgttcaaaaaatgggaactttgttctcagttacaagacacttgagtatttaagactgaaggttgtttagccttgccaaaaattgaaaccttcacaaaataatgaggagctgcgcactataccaacgtaaatacaaagctcaggcaaatattgctgccacatttgcgtgagatttgagtgaaatgaatgcttaactaaagacaaaagaaaagctttttgaaaaaagagacacgtagaaaatgagcatagatcaaagcttcacctgggccaagcttactctggcaatatagagattcaaagtcatgcaccatcaagcatcctgatcttgtgacagacactaagaatataccctggaaacaaatacctttatctaagaaatggtaacaagaaaatcgaaggagtagaaactgaaggcaaaaataacacaaggacttgatgagaactatctctcagacatagatcagaaatgatgaaataacattgaacatgtacggaaacaagaccaaaagtattgatgagagaacgaacccggttatcaaaatcaagccctgcaacacctcgcctggaaaccatagaaaaaaggtccaaagggaatcaaataacaatctatcagacttattaccaattcatcttcaaattctacatactcaaaaacgagatataatggtcagaacaaaatgaaacaattgaaaccactagaaagtgtactgacattgtcgggcattgatataggctttggatctgcatcatctgaaatacaaattcttagctctcgacaagaatatttgaaaacggagaaactttacaataaatcagatgaaaaattcttacatgggttatacatgggttctcgttcaagtgataaaaatgtgaaaatttcccaatcttcgcaacaaggaacacccaaaacaaaatcccaatatgtcaacaactttaaaggataattagtctcaggaaaaagtaagattgaaaacgaagggagcgtaaaacctccgagtaggaatgagcaactcgagaatagagttcgtgtcggtacgctgaatccaatcgtccattcacttcgattaaagatcgcttccatggtcgccttcaaggggaaacaatcgccaatcaacgaacagagaagatgagagaaatagaaacttagtagattgaattacctgaccgtagttctagattttgccggcgatggttccggcgaaactaagtatttctccattgatttttgacctcgactgataatttggggattcttaagttaattttcccgccattcacttctgggtttaagtccataactagtccaaataaagtcgaatttataagcccaattaataaaggcccattttaaaactaaatgggccattcacagtttatttcttctgtacacagtatcttcgcttccttgacttccaagctttagatctcgaactcttctcaagctttgaaactaaatgagctgttttgctcacatcaaggacgaagatattccactacttcaacaccattcaacgaccaagaacctactaacaaaactgcagcctcctatgcctccactggtatctcagcttgctcttcttgatcaagtccatcctcactttatggccagtttccaccgctttcaacggggatgatacaacctggtaagatctaacttttagcaagcaatacccaagttaagtggaaaagccggacactgacacattacaacgtgggagcaggagtgtctttgtgagaacgcatggaactggttttcaatctcttttacctcttttttatgcttaaacatgactaaattgacttaagttttcttatactcatgatgtcatgtttaagcgcttttagtttacttaaatcaggaacaaatcttttaagcattacatgaactcttgcattgagagtgtcaaccatattgagatagaaagacaggtttgtgtttgccttgtggtcctttcttctgtcggcttttaattacctcggaaacattattattagtttattacattagcataaaagaaacactcagtttagtgagagctattgatatgatgaagtcaacacaaataactttttttattatattatactctttagctacaatatataactcgagattcaccaacttcacatctggcagctggttctgcacttcagacatatattaaacaggtccagtcataacttactcaaacaattttaaatttgaacttaacaaactaactatggatctcttgtctaaacttttaagtacaattcaatggtaatttttgtttttttctcagagcttgaacttatcagcagaccaatacttattaaacccatctcttatgtgaaccagaggaatctcttgggatggtctgaattggccttctaggtttctttgaatcacctgtagaggaaccccgtctcacccttgaagaagaagaaactgaaacaggcttccgagtagtcgatggactaactactgaaggcggctttacagatttcacaagtgacgtcgaggatttagctggcgctgatttattggtttgtcccaaagttgcgggttcctcctttacggaatcaactggagcctccagcacagctcgctggggtgtgtttacagtagcttctgaatcagaggatgaagaagctgtaagaacatccatatcataaagaagattatccattctcattgggaactcatgggtatttgagactgcaggtgaataggaggacctccggagcctagtgagctgtgtgacctgcacatttgacaacgaatggatggtatcacatacaacgatttttagtactgaagttgttaccaagaaaaatcgaaagtaaggctctggaacttgtaaaggttggttaagtttatcaccttgtcttctaacaccaatacgtctctcttgagcttcttaattatcgtttttttcctgctaataatctcttcaagctctgtttctcgctgttaaagagagaagaaacatatgtttgtgtaagtcatatggaaaaaagtttaatggcgtttgaaaaagtctaggaatccacaattacttttgaaccagctttgttggtcagctgaagaaatgaagttaagtcctttattgttgcatctttctcttgacactcctttctgagggaaagcatgtcttggtcgagtgaaagactatcaaactgcaataaatatttaaaccaagtgagtattcatttgcaacaagatccaccacaaagattgtttcagcaaatttcacatattcttaacatacatgggtttctgcagcagaagtgacactagaacaccaatctgacatgtaagacatacgcctttcctctggctctgcatcaagcaccagatttgtgggagctttatcctaaacagtataatcagtgaaaacatgttcaatataagatcatatacagatgctcagtgattgccatggaaaagcaaagagcacacacacaaacacacctgtacagcaggtgacgagtgatgatgttgatcacatagccagcagccacaatctacgaaattaatcctctcagatccaaacttttctttaagagctgactgtggataatcatgatctgagacctttgatacagctccagactgatccttggcaagatttagctcatgacacaaatcatcaagcttttgttgcatgcttgaaagaagctgatcctgaaaaaatcaacacttgcagttaaagaacacaccaatttcacagtaagaacatctcttaaaaattcaaatacaaaatggatgcaaaaggtccaagacttcatcagtgaaatcattgttaagtcaacacatagaacacttaaaaacatagagatctagagagacaacacacaaaaattgtatgaattaaacactaatgtatgaaattcaaaaacaagtaacggaaattgaagcataattgaacaagatcacgaactaaagcaaagtactttaaatttccgagaaaaacgctaatttttttaatctgtcaaagtaacgaaaaatgtctcaaatccctagcagatactcaccctaagatcaactgatttctggagctgacgaatgacaccattcttcttcgactgagcggcggcgacaccaatgaccgccacaagcaggaatctttggtaaggcgtgaagagctcccacgcaagggattcctctctgctcaatccgccgccgattgatcgcgctgagctggcttcatcggaattgacgagtaaaccctggagagagatgtaagctagcgggggagacgattgtagaggctggcaacgacgggtaaagtgagtagagaggcgacgagtatacggagagaagaaaggggcgagatggactgaagcatgcggaattgggtaagacccgggatccggatccgaaccgggttcattcatggacgagccgaagaggaatggaggaatcaacgaggttcgttcgtcttcaaagagagatttcaattcttcaaagagagattttttcaattttcaatattcaatattcaattttgggttctttggagttttctgtaatttcaaaatgtgagatttcccccgtaaggaaggtgatgcgacgttcatcgtctgggtctacattgaagccacgtattcatttttttgcctttttggttcattttctttttactgtctctcttgtacttttcttcacagccacatttttctggtgttttgatttccaaggttattgttttgaaaaaacaaacatatatgttttctgcttattcgtctttttgttaagattaatcgagtagtcctatatagaaaaatcatacttttatttgtctttttttggaacttaataaatagttatagacacattctttgaaaaacattagtccaaaactcacttggtctctctctttatttgtcttgggttctacctttctggctctcctaaaatatatctcaccttcaccttgtgaattatctcagccagtagagctccagttcaccgttacgctttgcatggtgcgtcaatacttaacctttattcgctggtctatctctcatgtcagtcatgtgcttgctcatgcattatttacgggaaccacatttttgtattagttctcataacccttaattgggtatttgattgaaccacattttgcaagcattaatacacgattacacgtgacgtctaacggtctaagtgatatatcctccagtgatatagacacgtgctatgccctagtccttgggaaatcgacctttctttttgtttttcttcgttttctgaattatgaaaagtcgtctgttgttgactcccctgcatactacctacatttttgtaagtgttattctatgcaatcaatcccacaaatttctcatctttttgcactcaaaacacagtttactaatttagtttgtcacgtcaacaaaaaaatagccgacaaaagttatgttttgtggatgatcatttcataaaacttaattgtataatgattgttgtcatcataatccatgttaatatatttcaatcgaccgatgatttatatgaatcagtttttaaagttctaatacacggcaaacgaacgtcaagcacatgcgcgggcacatgagttgtcttttgaataatcaaagccattaatgtcacccttctgacttgacacttccttctaaatctcttgatacaattataacaactactaaatctccgaatcacgtttactctagctgctgtctccaaacctgtcctgtttttagggccgaccatgaattttaagatatatctcaagggaaataactaaatacgctaaactacgttgttgaattaagaagttgattttcaacgtctacaaacataatttcactaaaggttgaatctattagcgtttctgtttgacgaaaacaaacgaacagtttaatcttccgctggtctatggacgataaaatgaacaagacaaaataaaaccttacatatttgagtcgttgttctttatcaaaaaaaaataaaaaatttgagtcgttgctcgtcagattttatgtcactagacagcaacgaaaacaagcacataataatcaaaaccgtagcagaaaatgccaatcaaaggtaaattatggttcatggaggcaatttgcaaacaatgattaggattgtgtcatactgtagaaaaaattaacaaaacaatttttttattattcattgactcgaaggttgaacaagaaggtcgaaaaaataaacatctttacatgggggttcatattatttatgtacaaattgctaccaaggacaaagatcacatgctcatctacaacgataagatcaatgaatttgacagtatattaataaatcatgcatctatacataaataaaaactagtaggaactagtctagtcaaaaagtacagtattatggacaagatatgaaactagctaggataatactaattgctgtagcttaagccacttgaatgttgtccctcattattatgtccaaaaaattcaatgtagacaagaaaaaagaactaatactaatatatgtcttgccacgattgttactttaatctcatttttcaaatattatggtctcatatagccaaatctgtaattcttatattccagtacgtatggagagactcgggagagtcgaaccaagaacatgctcaggccttctgagttgtgacatagatagtacaaccaggcgaccgagacaaacaaaaccatgttatttgtaatgaatcataatgatccaatcttgaccacacacaaagaaaagtctgataataatgaaacaaatgagcatgcaaagtatgtgacgacgtggcaaaaaatgagaaggttcaacgaagcaacaaaaagaagtatttcgtcgtctttactcccatcaatatgtgactataaataaaaccatatagttaagtcacacttccatgtcaacgtgcttcaacctatgtaaagctaaaaaaaaaacacatcacacaaaagattctctacactatggatactaagaaatcgttagtgatcctattgactaacgtcgtcgtcttcttgcttctctccacgactgtccattcttgcttaccgtccgaccgagcggcgcttctagagttccgagcaaagctcaacgagccctacattggagttttcaacacatggaaaggtctagactgttgcaaaggctggtatggtgtgagctgcgatcccaacacccgtcgagtcgccggcattacactccgaggtgaatccgaagacccgcttttccaaaaggcgaaacggagcggactaatgaccggctccatttcgccctctatatgtaagctcactcgtctctccggtatcatcatcgctgattggaagggaatctccggtgtgattcctagttgcattgagaatctccctttcttgagacatttagatctcgtcggaaataaattctccggcgtgattccggcgaatatcgggaagttactgaggcttaaagtgttgaatctagctgataatcacttatacggtgtgattcctccgtcgatcacgagattagtgagtttatcgcatttggatctcaggaataacaatatctcgggagtcataccgcgagatattggtcgtttaaagatggtgagtcgtgtccttttaagcggtaacaaaatctcgggtcaaatacccgattctctgacccggatataccggctcgcggatcttgagctctcgatgaaccgactcaccggtccgattccggcttcgttcggtaaaatgtcggtgctcgcgactctcaatctcgatgggaacttgatctccggtatgattccggggagtctattggcatcatcgatctcgaatttgaatctgagcgggaatcttataaccggaagtatacctaacacgtttggaccgagatcgtacttcacggtgctggatcttgcgaacaatcgtcttcagggaccgattccggcgagtatcacggcggcgtcgtttattggtcaccttgacgtgagccataaccatttgtgtgggaagattccgatgggatctccgtttgatcatcttgacgcgacgtcgtttgcttacaatgcttgtctttgtggaaagcctcttgggaattgtaagaaataattaattaaattattgtttaaagatttgagggaatcattatatagtttgattatgaatattattactataattttcacgttatcaatgtaactataagcaatatttttatctggtgtttaagtcttcttgtttatctgtcttgattgattctcaaactatcatcaatgagacacctcgaaccaaatgaaatgagctaataggataaacttttcaaatacgagtttagaaatgtggaccgaccacgcttgtgagatcagtaaagcccgggatacattcaaccatttgttctgactagactttacaaatatggactatggtatgcatattaaattcgtctccttacatacaattcaaaacagtttggttagaagtgtaagtgtgtaacacttttaagatacgtttttttcttgtatctcttgttttggtgtgtttcacttagagattggtttcattcaaatttcagttagtacatttttctgttgtaatgttaaaccagaatttgtgtctatgtccattttctttgtgacgccaggtctatatgtccaattaggtggtctacttaacaaaacatatttaagtggaccgtataggccaaattggtttggtgggcttgtatccaatgtcggtggtgcaccatgcataagtagtcgtcttttggaagaacggaagatataaatattgccataactccacaagtttttcaactgagttttaattagtcgtaaatcaatattgacgtaaaaatatctcacacctttaagcaattctgtgatgaccgcgttgctgatcatagcctccaaaggatgtgcaatgaactataaattttgcgatggaattagtcaaactacattttctttgtgatgatctctttgatccgttattgaacacacatttcatatttcaaagataaagtaagaatattgacaaagtttctgatagattactctatagcacaaaacacaatagtcactactagctagattacataaatttattcattaatggtatattgatctagattctgttataagtaataatggctagcttgcccggtaaagatcatcacaactatatagtagacatagtttttttagaagaacaacaagatacgacacaaagaacacgtgaataccgtgcgggagagaattgcacaacaagtatgtgatgcttctaagtcacttttattattaacaggaataccgtacatgagagaattccataacaagtttgtgtgcaaagtatgctttgaagcatcctattagttaaaaatattaatggtccatgctgattgtaaaatttctagtaataattgtttcaacgtaactggttttagacaaacgtattgacatatgcttacaaaagcctgtttcttaagtgttgaggaagactttctctcaaagtattcttgtatgagctttctatgttctacaataatttcataaaactcatcgattaactattaagtattccaattattgtagggtaaatgtatttaactaccatatcgttgaaaagataaaaaatatatatatatatggtcttacaattagagacttgctcggtcttggtcttactaactaatcccccttccactatatatgtgcaataagtttcttagcaagattagtctcaccaactcgaagcattggaatggataaagatatacttttgacatacttttgaactattagtatgagtttaaataaaatcaattcttcgacaccaactagagttgagttatatacatatgcattgacacacaaaaccttagtcctatacagtatattctacatagcttatcaactgaacaaggttactgcctttgtagcaatccaataaggcacaacaacatagtatttacgttttctcactacaacgttgctaaaatgttttttttttttatataggtattcagtaggtttattttttataatatcattcattttttatttctcccacagataccagatctttttaggaacattgtatttatggtacatgtatttttaaaacggatctaagatcggatccaaatatcttagttttaaaattaaggtatccgtatctaaatccataaagtctaaagacattaaattctagatgggttttcagatcttagatatttgattcacctctaatttctagaaggagtatatggcagtgtacaagtggtaagaaaagtaactcgtgtatcctttgcactatactcgaaaaagagacatttggtggttaagattgacgtgtacatgatgctcctttcttgaagcaacaaactaaactcgtcatcctaaatattcatttccttaaacttttttgaaccactgatttcccaaccaaaaaaaataaaaatctttagagagaattgatctaataattgacggcagcaaatatcttagccacctatgaaaataactaaattgtcggaatgtcgaaaagacttcatcttaaaattgacaaatgacgaatacatctaactaaccatccatcactcttcataaatacacaactactctttcagtgtatatcctcttattcaatattttggttaaatcttttattcttttatttacttttacactcataataattgcacatcagggaatatcgatattgatagtgttttgaggattatttagtaagtaaaaacctaattttagtttagtaaacagtaaaatatactaagagtgttaatagtttttctaaaaagtccataatatagatcgtcgaactataaatgtaatttgtacaaagagaatctcccttgaaaaagagaagacagaaacctcagaaggaatatatgacagtacaaacagtaaatgaatctcttacccactttagatatataattggggttgaaatagtcttcatttgtcgtaatatgtacatatgttctccaatctccatataccaaatagacatgagagaagagtgaagactatttcagcccagttcaacaaattgagttatagaatcatgtattgttatgctttgtaaaatgcatatgtataatatagttttagttttgcttagtaagacaagtttatcattcataataatacttttgtttgcatgctattttacaaaagagtttctctgatagatttgtcttcatttacatgtcatccttttcactatctctctttatgtcttcttcaagcatcgaagatatcaagcactaaaaaaagaaaagaagaaagaaatcaagcattgcagtcacatcgttctcacacaccaaatgatctaccagatgccattttattattaattacaaaactattaactactcatattaaatatttttgaataatgataatgcttttttatagtgcaaaattagaaaactagaattacatgtcatcctgttccagttagttgtgttccaaattccaatcattcaagcatatatatatttttcaaataggataaaatgaaataagtttctagtttaaaaataatgttaaaaacagttaaggttacaactttagtttataaacaaacagttaaggttacaaatttagtttataaaaaaacagttaagaatttaacacaccaaaagcacataaattagtgtatttatttagacggcatgcaaattaaaataattcttttagtttattataatttgtatgaatctccttcaaccttttttccccaaaactcctctcttcttctctgcaacgaaaaacctcttcttcttcttctctctctctatccattttcactaattagcgattaaaaaggattctttttgtgtgtattaattatcgcttaaatcttaaataattctcctaatcgtctctgcacgttggtgatggtgtttagttgtcaattctacatctcgaggaaatccagaaacagctcactgatctatcgaaacagttttttttctttttacagagtcaatagaacaaaaccagataacagagatagtgacaaaccatccgtgacctcctctgtttttatcctaatctctctgctttctctttcacgtgattgaattctttttctttgttagacattgcttaaatcttcacaactcttttgctttatatatgtctcttctcacattatcctcttcttcatattcaaatctcctctccctaactgttttatggtctcttggattctgaatttgggatcttggggtttcgggttttgaaccatctctttagactttagttacacttttttcattcttttttaagacaaaagagatacgatgaagtctggtctcatcataaccattgctctgttactatacacaagcagctttgttcttgtttctgtagcgaaagagtgtaccaacactcctacgcagctctcatcccatactttccgcagcgagcttctgcaatcaaagaacgaaactttgaagacagagttgttctctcattaccatttaactccagctgatgactctgcttggtctagtttattgccaaggaagatgttgaaagaagaggcagatgaatttgcttggactatgttgtataggaagttcaaggactctaattcctctggtaactttcttaaagatgtctctttgcacgacgttaggctcgacccagactcctttcattggagggctcagcagacaaaccttgagtatctattgatgttggatgttgatggtttggcctggagcttccgtaaagaagctggtcttgatgcacctggagattactatggaggatgggagagaccagatagtgaactccgtggccattttgtcggtataaacctctgcctttttcctcagttcaatatactttctatatccatgttgttgatagtaatgcaagaaaaggttttgagatttgatgtttggtatatagattgcatagacccttaaaaggattatacactttagattgcataggcccttaaaggaattaccttttactagatggctcataaagtctgtctatttgtttttgaaggtcactatttgagtgcaacagcttatatgtgggctagtactcataatgatactctcaaggagaaaatgtcagctcttgtctcagctctatcggaatgccaacagaagtctggcacaggatatctctctgcttttccttccagttttttcgaccgctttgaagctataacacctgtttgggctccttactacaccattcacaaggtgaaaataagttagactctttaactgtgatgtagtttgatatgcttatgtttgcaaaagaggttcaactttgtcttaatttttgacagattttagctggtctggttgatcaatacaagttggctgggaacagtcaagctttaaagatggcaaccgggatggctgattatttctatggccgtgttcgtaatgtgataaggaagtacagtgttgaacgacattggcaatcactaaacgaagagactggtggcatgaatgatgttctttatcagctatacagcatcactgtgggttaaaatctaatcagactcaaaaaggcaaccttagatttctatgtagctctgtgtcattttttagtttattggactctgcagggagattccaagtatttgctgctcgcacatctctttgacaagccttgctttctcggagtcctcgcaattcaggtagtttacttgatgattagcttgaagccttgaagagatgtgaatggtaaggtcacataacttgacatgtttgtttgcaggccgatgatattagtggattccacgctaatacacatattcccatcgtcgttggatcccaacaacggtatgaaatcactggtgatctactccataaggtatcgaagagtaaccaagaaaagtatgacatttttatcaaagaagatattggttctcttgattctgaaatctgcatttccaggaaatctcgatgttctttatggacatttttaatgcttctcacagctatgcaacaggaggaacatcagtcagtgagttctggtactaccattacctgactttagtctttggttcattgtaacatgactttttgttttaagttctaaccatgatttgggaatggtaatattaggcaagatcccaagagaatggcgactgcactgcaaactgaaaacgaggaatcatgtactacttataacatgctcaaggtaggattttaaacttttccccctctttctatttgctcaaggtaacatactaacatatcaacacttgtacaatttcaggtctctaggaatctgttcagatggacaaaagaggttagctatgcagactattacgagcgcgccttgaccaacggcgtgttgggaattcaaagaggaacccagcctggactgatgatctacatgctcccattaggtaaaggtgtttctaaggctgtgacttatcacggttggggaacaccttatgattccttctggtgttgctatggcactggtaaactcttaaccacaattcatctggttttctacatttttgtaagatacaaaagtaagataaattttgagggtctttttttgtttctgtccacaggaattgaatccttctcaaaactgggagattccatatattttcaagaagatggtgcaactccagctctttatgtcacccaatatatatcaagctcacttgattggaaatctgctggtctttcaatatctcagaaagttaatcctgttgtgtcgtgggatccgtacatgcgtgtgacattcactctttcttcttccaaagtggtaaaacttttgcacaacttgatgcaacatgttacattgaagaaagagtctgatggatccaattttgttgcagggagtggcgaaggagtcgactttgaatctaagaattcctgtttggactaactctataggtgccaaagtatctttgaatgggcgacccttaaacgtaccaacttcaggtgatttgagcattaggttctaaaaagcagaactcgcttgactgttacagtctctagtttgtgaaatgagaatcatattgtacctgtctttttctttgcaggtaatttcctatcaatcaaacagaaatggaaatctggtgatcaagtaaccatggagctaccaatgagtatcagaaccgaagctataaaaggtataaacacacagttttgcttttgtagactggtacccttactccggcaatctataactagcagtatatgtataaattgtatgcaactctgttttgacattattttgtgagtatttcagatgatcggccagagtacgcatctcttcaagccatactctatggcccctacttgttagccggacacacgagcagggactggagcatcacaactcaggctaaacctggaaaatggataacccctatacctgaaactcaaaacagttaccttgtcacactctcacaacaatctggaaacgtatcttacgtgttttcaaatagcaaccaaaccatcacaatgagagtatcacccgagccagggacacaagatgccgttgcagcgactttcaggctcgtgactgataattctaaaccacggatttcgggtccagaaggactaattggaaggctggtcatgcttgagccgtttgatttccctggcatgattgtaaagcaagcaactgatagctccctcacagttcaagcttcttctcctagtgacaaaggagcttctagctttcggttagtatctggacttgacgggaagctaggaagcgtttcgttaagactagagagcaaaaaaggttgttttgtgtacagcgatcaaaccctaaagcaagggacaaaactaaggctagaatgtggttcggatgcgactgatgagaagtttaaagaggcagcaagctttagtttaaagacaggaatgcatcaatacaatccaatgagtttcgtgatgagcggaacacagaggaactttgtgttatcgccattgtttagcttaagagatgaaacatacaatgtgtacttcagtgtgcaaacttgaagaaagaaacccttattgggtgaaaatataagaaagaaaagtctcatttgaaatatagacatgtgtttagatgtttagcctcttaggtttgtttgtgattttgtgttctgcaatgtcatctaaaaatgtatgttgctgttacaataaatataaacaaatgtgtttttataaattgtgctaacgatgaatccatgtctttctttatattctaaatatagagtggagaatagtgtgttgccttgagctttcatgaaataatattctcatatgtgatctgttgcagaaattagaataccatagttattgtatcaaaatatccaacacatgaaaagtaaaatatccaacaaaatcacacgcataaacattacttacgaatacgatagttattgtgtttatgcgtgtgattttcactttggtggagataacttctatagaagaggggagaatattatacagtattttggaaatatgttataattttggagaaatcacaaatcaaagtttataattacattcagggagattttacaagattatagaaaaactttataagattttggaaaaactaatcatagaaattatacaaaattctctagtaatcatttaaaatctttgacatatctactttctatattttttaaaagtcattaaaattctttcaaaatcacaaaccaataacacccccttaatctttttttacaacaaatcctcctctgtttttatccaaatcctctctgtttttatccaaatcctcctctgtttttctctttcacttgattgaattctttttttagcagacattgcttcaatcgttagaaaatctatttttggcacacattttctttagaaatcttttgctttataaacatctcttctcattattttcttcttccatttcaaatcccctctccctaacagttttgagtctcttggattctgaacgtgggatctggggatttgaatagttacacttttttgtttatgaaaaaacatacgatgaagtctggtgtgatcataaccattgctctgttattatacacaagctttcttcttgtttgtctggcgaaagagtgtacagacattcctacgaagctctcatcgcatactctccgcagcgagcttctgcaatcacagaacgcaaatttgaagtcagaggagttctctcattaccatttaactccaactgatgactctgcttggtctactttgttgccaaggaagatgttgaaagaagagactgatgattttgcttggactatgttgtatagaaagttcaaggactctaattcctctggtaactttctcaaggatgtctctttgcacgacgttaggctggacccgagctctttccattggagggctcagcagacaaaccttgagtatctattgatgttggatgttgatggtttggcctataacttccgtaaagaagctggtcttaatgctcctggagttccctatggaggatgggagaaaccagatagtgaactccgtggccattttgtcggtataaacctctgcctttttccccaattcaatacactttcttgattcatgctgttgatagtatgcaggaaaaggttttgagatttgatgtttggtatagattgcataggcccttataggaatcaccttttgacatttcatagacacttgaaaggattttaactcttacattgcatagaaccttaaaggaatgaccttttagttgatggctcaaaaatctgtctgtttgttttgaaggtcactatttgagtgcaacagcttatatgtgggcaagtactcataacgaaactctcaaggcgaaaatgacagctcttgtctcagctctagcggaatgccagcagaaatatggcacaggatatctctcagctttcccttccagttttttcgaccggtttgaagctataacacatgtttgggctccttactataccattcacaaggtgaatagtcagaccctttgactgagttgaagattgatatgcttatgttttgcaagagagtaacatctctgtcttaattttgacagattttggccggcctggtggatcaatacaagttggctgggaatactcaagctttaaagatggcaacagggatggctgattacttttatggccgtgttcaaaatgtgataaagaagtacagtgttgaacgacattggctatcactaaacgaagagactggtggcatgaatgatgttctttatcagctatacagcatcactgtgagttaaaatcttatcagactctaaactccaaccttagatttctatctagctttgtgttatatcatagtgttttggactctgcagagagattccaagtatttgtttctcgcacatctctttgacaagccttgctttctcggagtcctcgcaattcaggtaatttacttgatgattagcttgaagccttgaagagatgtgaatggtaaggtcacataacttgacatgtttgtttgcaggccgatgatattagtggattccacgctaatacacatattcccatcgtcgttggatcccaacaacggtatgaaatcactggtgatctactccataaggtatcgaagagtaaccaagaaaagtgtgacatttttatcaaagaagatattggttctcttgattctgaaatctgcatttccaggaaatcccgatgttctttatggacatagttaatgcttcacacagctatgcaactggaggaacatcagtcaaagagttctggtactaccattacttgactttagagtttggttctttgtaacatgactttttgttttaagtcttaaccatgatttgggaatatttaacattaggcaagatccaaagagaatggcgactacgttgcaaactgaaaacgaggaatcatgtactacttataacatgctcaaggtaggatttcaaacttccccacacccccacccccctcttttcatttgctcaacgtaacatattgacacttgtacaatttcaggtctctaggaatctgttcagatggacaaaagaggttagctatgcagactattacgagcgcgctttgaccaacggtgtgctcggaattcaaagaggaaccgatcccggacggatgatctacatgctcccattgggtaaaggtgtttctaaggctgtgacttatcacggttggggaacaccttatgattccttttggtgttgctatggcactggtaaacttttaaccacaatcatctggttttctacatttttcttgtttcaagacagattaattttgaggtaatggtagtaattgaatctttctgtccacaggaattgaatccttctcaaaactgggagattccatatattttcaagaagatggtgcaactccagctctttatgtcacccaatatatatcaagctcacttgattggaaatctgctggtctttcaatatctcagaaagttaatcctgttgtgtcgtgggatccgtacatgcgtgtgacattcactctttcttcttccaaagtggtaaaacttttgcacaacttgatgcaacatgttacattgaagaaagagtctgatggatccaattttgttgcagggagtggcgaaggagtcgactttgaatctaagaattcctgtttggactaactctataggtgccaaagtatctttgaatgggcgacccttaaacgtaccaacttcaggtgatttgagcattaggttctaaaaagcagaactcgcttgactgttacagtctctagtttgtgaaatgagaatcatattgtacctgtctttttctttgcaggtaatttcctatcaatcaaacagaaatggaaatctggtgatcaagtaaccatggagctaccaatgagtatcagaaccgaagctataaaaggtataaaacacaattacgctgtgtagagttggttcttgattattgtgtataaattgtatgcaactctgtagtgtcaaagcaataacaacagaactgattttacattatgtcagatgatcggccggagtacgcatctcttcaagccatactctatggcccttacttgttagccggacacacgagcatggactggagcatcacaactcaggctaaagctggaaactggataacccctatacctgaaactcttaacagtcaccttgtcacactctcacaacaatctggaaacatatcttacgtgttgtcaaacagcaaccaaaccatcataatgaaagtatcacccgagccagggacacaagacgctgtttcggcgactttcaggctcgtgactgatgattctaaacatccgatttcgagtccagagggactaattggaagccttgtcatgcttgagccgtttgatttccctggcatgatcgtaaagcaagcaactgatagctccctcacggttcaagcttcttctcctagtgacaaaggatcttctagctttcggttagtatctggacttgacgggaagccaggaagcgtgtcgttaagcctagagagcaaaaagggttgttttgtgtacagcgatcaaacattaaagcaagggacgaaactaaggcttgaatgtggttcggctgcgactgatgagaagtttaaacaggcagcaagctttagtttaaagacaggaatgaatcaatacaatccaatgagtttcgtgatgagcggaacacagaggaactttgtgctatcgccattgtttagcctaagagatgaaacatacaatgtgtacttcagtgtgcaagcttgaagaaataaacccttttaaaactcctttggaatatagacatgtgttcagatgttcagcctcttaggtggtttgtgactctgtgtttaatttgcaatatcatctaaatatgtatgttgatgttacaataaatataaacaaatgtgtttttataagttatgctaacgatgaatccatgtctttctgaaatcagaatcatagtttgtgcattcatgaaatattctcatggtgtagaaataaaatgttgagaacataataatgtttgcagacagaaagtatattcggctgtgcaatgaaacaaagcagtagacaaaaaaacaaacaagtcctacaaacattgatttctttcaatcaatacactcaaccttaaatgcattactaaaaactaaactattacgagtaagtgaagaaatgataaactaataaaagttggtagagaaagagagtgaaattggaagtggctaatagaaaagtaagaaaaagatgaataaaatatgaaagaagaggtcaaaagtgtaggtccactaaaaagcagcagatcttagcacacccacatgtccccatatattctatttctactgtacactctcttcttcttcacttcactaaaagctcactactcttcttcgcaatctcatttttaacattttcactttcttctaaactttgcattacaaaaaacaatgtatttccaagttgttctctctattcttcattagatcccttgaggtacattaccatgtcctaatttttctattggttttgtatttgttgatatttatattatgtgtagttgttgttttgatcagtagctcaagtaacagcgacagtgaagaattaaagatattaaaacaaaacatttcttgtttactcttcttgttttaactgtctctcaagtagatcatcttgtttactcttcttttattgtattttgtttaaagtaaaatgatgttttttttttctctctttctaaaatgttcactttcgagttttgtttggatcagcctagaagaaagctaagagaggttgctctaatttttttgaagaaaaagttatatacattttcttggggaatctctttattttaaggaaaatgtttgtctttggtagattggtagctgcttgtttggtgagaaaactccaacaagagtcctaaataacatttaaaagtttaccatttccacttttataaacattttcacagtgcttatattattattcagtagagtgtagatctcaaactccttgattcattcgatttttattcgagagatgtctatgttactaatatgttgtagccattgtaggtaaactgttaaaatctctctgatccatttgctgctgtgttttgtttctttttaccagaagggttgtcttagataacagaaccaagcagcttcccctgaaactgcttcttcttacaagttcttggatctttgccatataattgcaagaagttttcaagattcagacaagatgcagaaaccagggcaaaatatagattttgcactgaaggaaacttcaccaaagattggtgcaggttctgtgacaggtgataaactctgcagcacttatgatttggttgagcagatgcattacctctacgtacgggtcgttaaggcgaaggagttaccggggaaagatgtgaccggtagttgtgatccatatgtggaagtgaagctcggaaactacagagggatgactaagcatttcgagaagaggtcgaatccggagtggaagcaagtgtttgcgttttcaaaggagaggatccaagcatcaatcttggaggttgtcgttaaagacaaagatgtggtgttagatgatttgattggtagaatcatgtttgatctcaatgagattcctaaacgggtaccgcctgatagtccattggctcctcagtggtataggttggaggatcgacatgggcgtaaggttaaaggagagcttatgttagctgtttggatggggacacaagcagatgaagctttttctgatgcttggcattcagatgcagccacggtcggacctgagggtgtgacacatatccgttcaaaggtttatctttcgccaaagctttggtatgtcagggtcaatgtaattgaggctcaagatttgatacctcatgataaaaccaagttccctgaggtttacgtgaaagcaatgctcggaaaccagactctgagaacacgtatttctcagaccaaaacattgaatccgatgtggaatgaagatctgatgtttgttgttgctgagccttttgaggaagctttgattctcgcggtggaagatagggttgcaccgaataaagatgaaacgttaggccggtgtgcaatcccgttgcagaacgtccaaagaaggttagaccataggccgcttaactcgaggtggttcaacctggagaaacatattatggtggaaggagagcaaaaagagatcaaattcgcaagcagaattcatctaagaatctttcttgaaggtgggtaccatgttcttgatgaatcaactcactacagcagcgacctaaggccaaccgcaaaacagctatggaaaccgagtatcggactgcttgaagtagggatcataagtgcacacgggctgatgccaatgaagtcaaaagacgggaaggggacaacagatgcatattgcgtggctaagtatgggcagaaatggattagaacaagaacaatcgtggatagttttacgcctaaatggaatgagcagtacacatgggaagtgtttgacacctgcactgtcataacttttggagcattcgacaacggacacattccaggcggaagcggaaaagacttgagaatcgggaaagtgagaatccggctctctacccttgaagctgaccgtatctacactcattcatatccgctactcgtctttcatccttctgggatcaagaagacaggtgaaatacagttagctgtgcggttcacttgcctatctctcatcaacatgcttcatatgtattctcagccattactacccaaaatgcattacatccatccgttatcggttctccagctggacagcctgagacaccaggcgatgaacattgtctcggcaaggctgaaccgcgcagagccgcctcttcgcaaagagattgtggagtacatgctcgatgttgactcccatatgtggagcatgaggaggagtaaagctaacttcttcagaatcatgaatgttctgagtggtctcattgctgttggaaaatggtttgatcagatctgcaactggagaaacccaataaccacaattctcattcatgttcttttcattatcttagttctttacccggaattaatcctcccaacggttttcttgtaccttttcttgattgggatctggaatttccggtggagaccaaggcacccgccacacatggacacacggttgtcccatgcagacgctgttcaccccgacgagcttgatgaagagtttgatactttcccgacttcccgatcctctgagattgtgcggatgcgatatgaccggctcagaagcataggaggacgggttcagaccgtgataggcgatctagcaacacagggagagcggtttttatcgctgctgagctggagagacccgagggcaaccacattgtttgtgcttttctgtctcatagctgctatcgtgttgtatgttacgccgtttcaggttgttgcacttcttgctgggatctatgtgctgaggcatccaaggttcaggcacaagctaccctctgtgccgctcaatctcttcaggaggctacctgcaagatctgacagtctattatagataaatttatctgcatcagcttttgtaaaacgtttgttggatttaaaaaaactttgggtttaatgcttaattcggtcttttcaatggaattttagttatattgattgcaacatcataagacggtcaagaaatccaaatacatatatccatcaaactcaaaatctttggttgggtttctgtttctcatctgtaattctgtttccaactaactttttttgtccaatgaataacagtttctgcccagactataagggttcgatttaattcacaaacatatgagccaacccttgaggtgctctcccgccaacgttaacgttgtggagcagttgctgcagccattgcattgcaggtgggtcatcctgccaaattaagtgagacgattagctaaaaacagtcaagtctcaagtatcaaaagaattgagtcgtgataacaataaactgatagataacaatttggtatcagaatcactaataattggttatgatgctatcaagagatatgacacttacatagagacaaccactgaaagtagcatccctcagaagatctggaaggcaacttccaagtgcatcgcatgctctgaatgtcatcagtaactgtattgtgtaagcacgagtgtataatatggttttcaaatgaaggaaaatggataattattgcacctggggttatctgtcaagcgaagatagcagcgtatgatgtgctttagtagcctagcggacggtccttctgcaagtgaagtaaccatatttcccaaaacccgacccagagcaaagaatctctccgctgtcgtgcacatgtactcaagcccaacatcgtccagcaaaactttctgaacaatgaaagtagcaacctgacataaccgttcaaataaatcaatcagatgaactgtacatgaccaaaaccaatcagaaacatcaattgcagaagaaaacttatacaagttctttgtatgaagcaaagatttcagatatttgcaactggctgtataaatgataggaaacttgatatacatttttcaagcatgtgaatctaaagagaagcatctgaagatagacaaacttacagtctttgataactcgctgccattctccattgtccggaggcacaatgggacaatctcagtttgaagaaggaatctgatcacttcagtatcatcaacctaccaaaccaaatgaacgatgttgcaagaccaatatcactaatgatgtcttaacaggatctactcaaaggtcttagcatgctaaaatcgttgtttctcaaatcaccaaaatatttatttacagccaaacagttgttagcatgtaaaagaagtgttcctgcctttttggcataaacatactaaataactagacgaggaaacaaaactcaaatatcaatacataccttaacaagtgcaccaataacccccaagctagtcagccgcaggtactcaaacggtcttgatttgcttgatgtattcaagaaagcatacaggtacaatggcagatgggctgtattttgaaaagcaacagactttaaactttaagcatattatagccaaacacacatctaataaatgagatcaatcagaaagagaccaacaaggtggctcttaaaactagttttggtagacgggttgggtattcaactaatgcaatctatctctataactttagtcacagagcaaacaccgaaattatttgaatgagaactaaggaagaattgttcgggcacaggactgtaccttttaggaacaacattctcgtatcagtatgagaagcaacacactggatgtacgaaaaaagagtcgaatcaataaaaaatagagtcttccaaattgaacatacatatataaacgtttgtaagtctccctaaaaaagaaagaggaaactgacaatattttatgcacctgaagaagagcaagtgcattgcacaccctgttagattgagcaggagtcatggttggaggagatagggcagggtaaactgcgataatctcctgaaaagaggaaagaaagaaaatgactagatcttaaccaatacaatgtacatcaaatctcaaaagttaaaatgctaaaactataacagtatatagagaagccagaaatcaataaataaattcccctgaagaataaaggaacaagtgccatataataacatggaggagagggtacctgtagaagagcaggaatggtaccaacagaatgccataaaagcggagccaaatcttgaaagatctctctcttctgaaataatgaaacacgggattagacatgaatttcagtgagaagaacttcttaatgtatgaaatcaaaagcaatgagtacagtaaacatcaaaaccatttgattttttaattgtccagacgtttaacttcagtgaagaatcctcataccaacttaaattgctcaccaatcgagatcaacgccttaatcagtgttgaactatttcgattatttaatttcatcccctattcatgcaggtttacaatctcaacaataatcgtacaaattccctcaaaatttgcggcaaggaagaattaggagtcggtaatctaaaagcatgtctacgattcaccggactaaacaaccaaatacattcgaaattccattcaatagaacgcagaaaacgaaaacccaaacgatcaaaaattcgcgagtaagagaattcggtgagagagagatgaccttagacaactcgtgaagtgcattttctctgagttcgggattgctgagatcgagaattaactgctccgccgatgatagcttccgatcgttgttggaggaagaagaaggagaagaagctcctgagagggcgacagatttcatggagagcggaggaggaagattagccattagagccccgtcaccgtttacacgcgccgcagagagaatcgctacttgtgacagtgaaaggaggagatgtatttataggacctaaggggggcgtgtatgtcacgtgcctcgcttgctccgttacgggatttgttcaaatctaaatctcacgtgacttgtgaaaaaaaaaaaaaaactctcacgtgactctcccgtgcctcacacaacttaagattctgaaagatagattataagatttacatgattcacattatgacttagctaatgtagaagacaataaaaaaacataggtattttgatatcaacaagccaaaaaaacacacactatatctactttgtttgtggcgccaaaataaactgatttaatatctttatttattgcggtacaataaatagtttaaccgtatatccttttatttttgtttaacatgaatttgtcgtgtcactcggtgtaacatgcaaggggaatatgtggctccaaaactcaacaagtagtggtcgattggctaccgaaactaattaaggtcaatgcaataattttattgacaaacaatctagcatcaacaaatctatatacagtcacaaaattagaactagatacaccatattgtccttataaagaaaatatatcttaccgttttaaaactaaaatcagacaaaattctagtacaaaaccttagacaaccaatctaccacttcacatccaaaagatcggttttcccaagtttcttctagaaacaaatgtcacagaataattaattgtgatttgataccaacttaaaacactctaaacccaaaatttatatatacaattgatgtcacgaatgcttccgacttcatcttgagaactaactcatcacaaaaattgaattggaagttgttacgctttggcatctttccaaagcatccacaaaatcttggctgaagtaattgaaatactctatagtaaataacgaagttaatcattttcaacctgaaatagaaatttaacattcggataaacaaaactcaaaactagaatgtgaaaagcattacaaactaatatgtcaacaatgggaaacagaagatacagaaaaaagatataaggaatgaatctatggagtaaaaggaatgtgtttatgatgaagagggtcggatccagttggaacttgtctttcttcaacttcattagctgttcctccatcaatcttcttctcctgttttcagtaccaaaacaaaaaattaatcatctttgcatcaaaatcatatagaaaaatacaaacgaatatcaaatgcaaagagctagctagaaaacaaaaagtttcatactttttattgtaaaaataagaaacgaattgttcatttccttcaaaacagtcgcgttgtgtttctaggaagagattttcttacctttttcatggctttcgtatcttgtgtttctcctaaccaaaagaaggctagaaacaaaaagaacaaagaggattgattcatcatgttttgaacccaaacgatgaataaagatgagaatattattaaacatatcacatgacacttacattttgtagaagaagagtgagcaagtagtgaggacgaaagaagaaggatgactaatatgataaaaacgcttcctttgtatttcatcgccgccatttcaaaaacctctttgtggtaagagtctcgacaagagtgacgagaggtgtgtcgtcgtctaataaggtgaaagttccgggttttaacctcgttttacagctttgttggggccaaatccgtcattttggttgttctttttgggatgagatttaagctgtacggacacagattaccgtttacaggctggctcgaaccaagacaaattatcattctcgtacaaatgtcgtggtgccacgtatcgccgccacgtctccgcttatttgtcgaaccaaacattgtcacaacttcccgccattttttaagttgtctttcaacgaagcagaggaaactagggctaatccttcttagaagatcgtgggctttccttatcggcccattaatgaacccagttggtaactagggaatttttgaaagctttgttgtcgctgtatcttataggccaagcaaaagttgttagtaagttccttatcttcctcgacatggaccaatggaggtcttcaactaaataattaaacagtcattaaatgatagataacgtctaatttatagatgaatactacaatgtttttacctaagcgatatattgaaaactaaattacattaaccctaatcatccatgaagataaaaaagggataaattaagatcccttccctgtcattacaatgaagagatgaatcattccttgtttcgagaagagcgatccttacgatgacctccaaggatacgagagatctgaagacctctactgaaagcttgattaaagagcatacgcgtttggaactctgacacaaatggaaaccatgccaagaacgccactggcgtgaacagcaacagtcccattactatctcgtatccacgagctagggtcctcactgatccccagaatcctgctctatgaaccaccggcttacacgcttgcgcaatctgcaaacacacaccaagtgttagtcttgtttttatccacacacgcacaacatttccattttaataggactccagtgaaaagcttttttttttacttaccaagagcatcccccaacctgtgggcataaaggcaaggatacacacaattatgtcttgtatcgtcatgtgagccagtgtgatcaatatcacaataattgcgataaacgtcatgaatatcagcccctttatcaaccggaacatcagctgaaaactcgcgctgaatctccgccttccaaccgaaacagtctgagacaaacaaacaacaaaaaacttggttattgaccatgacgttctggggaattaaaaagagattgatgtatcaagtaaacccaccttcatcacaaacaatatcaagaaaatcaccagccatgatactccataaacctgagttgacaagggattttagatttagtgattggataagaaaataccaacatcaagagctaatagaaatgttacataccagaaagtttttagtcttctctgttatagtgagatgataaacaagcccatattgatagataaagaaccgcagtgctagcaaaatctcaacaactataccacgttttccggaataccggagatgttcttgctcttcctcccaccacgattcccaacttttttctgccggaacaccaatacccccgatgttgtttatccatttattccaatcagtccaatcatcaacaatcttctgccattcaaaaccagaaggattgaagaggaagggagcaaaaagccaggtcccgaccatgaaccacatagatatggtgatcaaaagatatgcaaggacgcctctgtaagcactaccaaatatttgatacacaacgagtagcagcatcatttcaagtcccttcacaaaatggctccgggaatacagtctgtaattatcagcaaatttggcatgaaagacgacaaatcctcttcctgtggacctgtacttggcaccgccatgaagtaacgtcctcccatagtagtgagtctttgtcccaagagagaacgtaaagaacactggcgccaactgaagctgcatcagcacaaattcactcaaggcagtcctaaaacccctctctaatccaatttccataagcataggtaaagccatcaggaaaccaatctggacaaaagactgtgaagccagagctatttgcaaaggtgtattgtctcggatgcctttctgcgtacttaaaccttgttcgagcccactcaaaacaagatagagacgtccataaaggaagatgtagacagtgagaacagtaatctgtgaaaacagtagaaaatgaatcagatccgaaatagctgtgtggtacttacttggcttaacaaaaaaggaacgaaataataccagggtgctgaaataaaagccaacagtggtgaagtaacatgacatcattcggaaaaagtcaaaacggtgtccaagcctgtaaatatcccgacttaatgtctgctctccattgccgttagcaatcttggcctcaaacatagagatctgatttagaccaacatctcttcctttaccaacttgtatgtattcatgatgggtaacatttccttcacgaagtgtagaattgaatcctgctcaatacaaaacattggcaatccatcagcgaggacatcagttagagtctatgaaagaaacagatactactcagtaagagtagaatatacctgcaaatatatcttcactgaggttgattaccttggatgctttgctaacaccacctcttgttagatgaaacagtctatcaaaaacatctggatggccataatggaaacgcaccctatattggagaaagagagaattctgatttgggaatgataacaaacaaaatcatgtgcaatcatcactacagatgatctcagaaaacacacttacctcaatggatttgccaataatctctgaccaatggtaacaaaactagtctcttgatttgacatgaaccaagcaagggatgaaactctgcgaagggcccaacaccaaatgttcttagagatgatcaaatttcattgagcaaaagagaaaataactaaaatagacggaaatgctataacactcacgatccagtaaatatatgttccctaagtccaagaatggatggatgtctaacaccatcatgttttgtaagaaattcttgaagcaaattcctcatctttaacgcttcctccatgtaattatcctgaataaaaatggcattataagaaacttaatatcaacttgaagtatcgaaataactagaaggctgagcaaaaagaacaagtgcatacctgattcatatcgattgtctgtaaaccttctccacgggaaaaaatgatagcatgattttggttttctggctttccttctccaagaatagcaggtccaggaagcctaatcctgtagataacctagaaggcatgtagattttaatatagacatccatgtaagaatcaaaacaaaggagtaaaactaccatgagagagcatatataacagtaaagtaaatataaaactaatgcggcaaaaagacgtatgtttcccagatgcagaacaatttatgaattaacacaggtgtatgacattaggttgccatttaactaatccttataagatatattattcagcattcactaagaaaatgacagtaagaaattcagcattggcaccaccttctggacgggtttactttacacaaacacattcaacgacataataaattgcagcaactacagctagagacaagtgttagattgttttgcattacctggtccagattttgtgctagggtagaatgatcagttgacttaggcacctttaccaacacagaataatacactttctggttccctttctttgacttgtctttcactggttcttcgacctcatcaatatatgcaacacggagtgaagggtatctgccaattgtaagcaacggcataagtttcaaacaagttaaaacaaacagcaaaatattattattctacacaccttgtcataagcctcaatatatcctgcgcacgaggatcaccggatcgtttatggataccatattgttgacatgatacaacatatgtaaacttcatgtcagcaacagcttggcactgtgcccagagtgatctttcacctcttgaattgttctctgaatttagttctacagccttgtaaccttccatcaaatctggagaagcaaattgcaagaatgagtcagcatcaccgattagttgtgtgaactgatttatgcccctttgctgtttaatataactagagaaaaacaccttcatgcatagccatgtcaaggaatgcctgaagctccaaggcttttcgatagtacatcattcctcttactgcaaaaatatcaaagattaacaacatatctccattgtatccatctaatctttttactgaaagaaaattaaccaaaaaagcataccagttctagtcaaagtttgccctctatatgaagcccataaacgaagttcctcctctaattcatcagactccttaagttcctcttcacttaagcacttcacccgctcaagaaaattgttccattcatctggagataaaaggtcaggttcaagacgtgattcaagaatataggctacgttaacagcatatgaacaaaaatcacctggaaaaatcttttgtaggtagaagaggattgaaacaccatcttcatttggtgtttccaggtcccgcaaggagaagaggacctcttcagtgtaataaggagtcaaaacactacaatgagaatagcaaagagaaaaccccaccagttaagtaacgaaaacttcaataaaagcaaaacattataatgacaaactaacccagccagttcagttacgaaaaactacattgcaattcatacttcattataattataaacaagtagcaattgcatgatacaacagttctaaatcttagttttgtcatcataaaagaagaatttgaggaaattatcaactggaattttagaagaaccaataatcttccaacaatatgtgactatataagtagtggattctaattaaaatgaccagaaattgcttacgaaaatgatagcatgttgcgaactttaggtgccataggcatgtccatgaacaacgaatttgagaagaatgagatccgccttcttgcttccaagttagaggggacatccatagcagactctttagtagtcaacaaaagatatatccgtttgatctacacatacatgcattaaagttttgagaacaaatcatatgaagactgcgcgaatagaacttaaatataaccctatctggcataaccttctctttccaagcttctgttactggttcaataggaaatctaatggcacctgaggatgcaaacagctgatattgttgttcgagagggatcattcccccatgccaagtgccaccatgacttgaatctaccaagctacagagacactagatatataagattttgatgttcatacgacaagccattgcggtgcggtagaaagtcgccaacctcgatatattgtaatcctccatcataatgtctcttgttacaacttccagcatgtcttggaagagaattacaacgtgatctctatcttcctccttattgtcaagctacattggataagaaaacgaagatattggaccaattgacaaataagtttttagatactaaaactacaaaagaaacagtaccacaggaagaacatttaccaaatatttgatcaacttgacaaagtgatcatagaggctaggaagagcactcatcttgtattcttgaatcaaatcccctgtatctatatgtttgtcaacctctgcaaatatgatctctatcaccctgagacacgaagatataaattggccataatatagtgtggtacgttgcaaacttgcaattatcaaaatcagaagtagatatgtaagaaacaaaagcaagttcaaacactatggttccaaaaacttaacccaacttactctttttcacggtttccctgaaccacaaattttatgatattcttgaatgaagcatagcattcacggacagcacatttcatgtaagtgtcactctcaatcctcttcttgagctctctgtccttcccattactgtcttttgccatatctaatgctattggaatctacagccaaatatagaaaaaattagaataaccaaaagattaaattctaatgtgtttctgtgagagcaaaccttgctagccaataagaagggaggccactgtatgagatccaaatcacggtcagcccaataaggaacaagcaacagatccatctccctatgaatagtccaaatgcaaaaagatagctcaaattttttgagttccagatagtttctttcagctagatatgtggcatagaaaattaataaaattacctatcacttataagatcttcctctctaaaactactaattattgtgttccacaactgtgcaaatcttgcagcttctttctctttgttcacaggtacctgaagtaaattttcagtacaagcaatcaatgagaagaattgtacgtgatagcagttcactcgttcaacaaaccttatcctccgtaaagttatgagataacgttgcccttattcccttcttcttttgctggttctttccatctggaattaagcggtcattaaaagctccaggcagtgattcaaaccgtgatctgagcattcccagtgtccgaatctgtaacaagtgaaaaacgcaaggatttagagaacatcaataacaattacaagggaaacctcaagttcaacaaataactcagcttcaatcagattatcttaaaaatgcatacctctccaaggcggcggaatgcaccgtagatacctccaaataatgtggaaaatatagcataccaaatctgactatccataaaatatacctgcagcaagatgtagccgagatcaaattagcaacagcacaaagcaggggaggacgtgcagacatgttcgacttgaccatgcttaccagaataatgggggcccagagggcgataacgacaccaatattgtttttggctgcacaaatcaagtagagatggtgtgagaataaatgataaattttcattccagcaatcatgtagtgtatgtgaaagtgcattaccacgaggaaagaactcatgccactgaaaatttgtcacacgggccttcataatggcttgtgttggggcaactaaaggcctgatctgtgagcaatgccaatttatcagacttcagttgtggcaatcatggaaaaatcagtcaattcaatcccataattattgtttccatgtctcatcacgaatcttactcttctcacagcatggttaataattaccagaactagatacaagaaacacatacctcaatgtagtaactgaatgccagctttgttgcaataagcaacacccagaacatggtatatctacgcaagaaaaaggtagagagacatgagtgaacagaggactcaggcttgcaccagtaactaaaatccaatgatgtttatgtcacaaacagaacccttacttgaagagggaaaatgcgctctcgtgcattcctctgccaacgtagagtctgggctgcaaggtgttaattatagtcacatcagttaaacaacacaacagaaggttttcgttagtttcttatgcaagaacacaaactgagtgaatagatgaaaacctgagaccaccacatcattagcattacaattctgtagttggacctctcaagaaaccgtcgtagcagagggaaaagaaacattacacccgcgagcatgttaggtgacaaataggaaacgactgctattataaatagagaaggtgagtgcatagcactcccaaaccaactcttgatagttctggcaaatgctggaggatctttccagctgtaggcgtaagtaacaggcagaataataacccaggcagcagcagagaacactttcagaatgtatcttagtttaacatgtagtgtcatgctttgatgagctttgaaattaaggatcacatcaagaacagctgcagaaatagttctagtagatgagctttcgtcactcaagtaaacttatgaaagtattgaacaattacattaaccaaccttgtccaagtttcattattgcagctgtgataaacacgctcagaactttcttgaatacatcagctccaaagactgaacttggttgtccgccatcccaggccataataatcatggccttccaaaattcatcatcgaaatcatattttatgagaatgtgcatttctttaatacatcagctccagagagaggcagagacatatagaagatagtaatacctggaggcacagaatatagaagctccacattcgatcgaaacttctgaagacatgccagaaagaacgaatctcaacaaaattaactttaccaacccatctatctctggcgacaataggcttgctgttatcctgtgatatatgataaaaaaaattcagtagcaaaagattagagttcctagtataaaaaaaaccacaccacctagaaactagagcagtgtagcagattcccgaaacccaaaaaaaatatatagacaagaacagagaagatgtgtagttatagtgtaccccgtccttttctgtattgggtacagcaacaggcagacaaaagaaatcagcatcagctcgcattggccaacctaaccgaaaacaatcaactgacctgcaatgaagaaaccatacttgattaatcgtagaaaccacttatgaagacctttacgactgtgtgaaagcaggtagatagatatatcaccaaaagtattcattcaaatcatcgtagttcctccactgagagtgcttagacttcccttttttgcttctttgagcctcctgtgaatggcacaattagtgagtaagaatattaacaagcaaaaaactgctgaaagcacaaggaaaagctcgaaatttaaggcctaccatctgaatcacttcataaataggagtcacaactttcctcaagaatgcatcttcctcgcctccataagctggcttcacattttccccagtcataggactaacattcccagccagcataccatagagttcaaatgccatctgcgaaagcatgaaatagagtaggaagtataagaatatcacatctaggaacgcatactagcaaaaaatctgtgtatttatcaaaagaaagcatggtaccctgagcacaattgacatttaaccaacattctaatttctaaggggaataatatcaattgacattttctcatcagaaatacgtcaacctgagcacatatacacatgttttgcctcaaaacaagactcagatgacaattttattactgtgcgtgcaagttatagctccttagcagaaatataaacaacaaaagatataactttcaaggattaagaatgacagtaaagcataagattatcattggcggacaagcataaaaatacaagaatcacgcacaaactacggaagaccttacaaactgaaacttacatgatgataaatgtagcagagacactctggcatgaatctcaagttcgctgcttcaccccaaattagaagatacagggccatatacaatagtttgcgctgctgcatttcctgctgtatagttggcaacctacaagaagatcatactttaaaacagattctccacaccagagtttgcataaacatttagacacacacacgaaatctaattcctgtacatgaacagcatacagaaactctctgttgctacaattcccttaccaaagactactctttcgaccaaggtatttgcaccatttcttatagttcttgaaaagcttcttcatcacttctgtcaatgcttgatcatctaactgtgagggcacaatgagaacaaacgaaaggataaactgaaagtacattcattaaatattatgctcatagtaggatgcagttacatatatattccatggaaaaaaaatgtactgcgcagaaatgtcctacatgcatggacacacgaaacctatataaaagtggtctttcaacaatggtaaaattaaggtataaacctttggctgctgatcaggcttaggaaattgtcttatatgcacattagcaagtaataagatcagatgctccctttgattagccacattgtctttctgcagaaccatagcataaacaagaaaaattgcatgttagcaagtaataagattaagtgctcctaagattagctgcattgtctttccgccaaaccattaaagaatttatagattactctcaacaaaagcttaatgacaattggcaagcatcacgaactagaaaaattacctgaaatccaaacatttcttgaagccaatcaagcatgtcttcatctttctttttcttgtgaccttctggccaaggaagacctctagtattgcggagagcaagaacagcagcttggatctgcagtaaggattacatcacccgctgataacatattacaaataataacaatgcccaacaagaagaggactaacctcaggatatctcataatcgcttgattggcactatcaggatcgagaggtaggatattataggggacatacaactgtgtcttttctgcaaccttatcttgagcttccagaatctggaaccattcaacttcattgtaaagttgcacaagagatggaaaaaaaaaagagacaggactagaaggtcacaatgccttacctcccggtcaacctcaatggactgtgtcagattaacagccttcaacacctcaaacaaaacattggcagtttggtatgcctttgtcagctgggcactgaaaattaacagcacttcaaagtatcattaagagaatttagtgctctcaaacactggcaaaacacaaattagcatcttaaaaagacaatttaagtaagttagacataccggtcagccttatcagcagcattgtgcaaagcttgaatatacttcttatagtagtgttgataaaagctttgcatttcacgggcatcacttttcttaaccctgcccatcagtgttggatcatgttcctgcaaaaaaatcaaagcaacagtagaccacatttgtcaaagaaaagtactaaaaccaagattccttctaatagctatccaaatctgccacatgcaagaatcaagcagagtataaagaatgctcactctttcaagacgctgtagaagtgcagtcttaaactgccgaacacctcttccactggaggtaggatccaatctatgtgctttctcaaatgcataaaaccgacctaagggagaaagcagaaccaaaaaccagataaacaaccaaatgacagagaaccaaattaagaaataagttttagaagaacttacagagatacgcaaccctaggattactagattcaacttcattagcaacccgaagaatgggggcaatctcaacaagagatgatggaacaacttcactatcgaatgactctccaagattaccagcagtctgagttcgtataatccgccgctgctgaggctgagacggcccttgatcaggacctcctctcgtagcagacattttgtctaccctataacctccaggttttaaatcgttttaaggtttcctcagcctccctgaaaacaaacaaaagtcattagacgaagatggttaaaaatcaacagtgacgaacagagatgcaacattgagaagaacatacagagaaacggagatccagaaaccctaacaatggcggagcaaaggagccacaactttttaagctacttagctgctaagtacgcaaagtgaaagggagagagagagagcagtctgaaatgaatgtttttttgtatttatcttccttttttaagcaccgctttaatagacacaaaaataaaaagaaattttaaaaaggacactttcgaaggtcgtgtccagaaaaaggctctaccttccatttaattacagtaacaccaccaagtttaaactgtggcaatgtcggttttgtcttggagcaagcaaaaaaaggtacctccaatctattcactgagacaaataacgtaatacttatgaaccgaaagggtatttttgtaaggggatttggaatttcaaaaaagtcgaagattccaataaaaaaagtgttagcggttttttaaaaacttgaatggcttctttgacctcatatgactcgtcattacttttttcaatatttttttaccgttttgtttgacgttgtttttaccgttgcgtttgtccaacaagattagaggatttggcgcagtgtttaaagtaattagataactaataacctttgattgttttataaccaataagttttcgttagatcttattccaaattatatgtttcaagtgtttaatttgatgtaagtttttatcctaaacatgggctttaaacatgtaatttatgagtcaggataccaaagatgttattcaagctttgatgcaagtgcaagcatggcctgctggccaaccatttatcaaagatataccagtcctagtcctgaacaacaacaacaactccgatagcatcactttcactttcactttcactcaagtcatgttgctgtcgataagtagcagcctcatacataggccggtcatactctttatcaataaagttatgttgagcccaaacaaaaaagcatacgtcggcgtaaaaaacataacaatgcgttaatgctaaaaggcccatatgtaaaataaatcggcccatatgtaaaactttttttctgattcaaaacttataaaaaataatcccacgcacatactgaatcgcgttaaagcgtgtgtaacctaaccggcggtgatcctttgttccgatcgtgttgctaactttctcagcttccagatatctctctctctgaggagatatcaaaggttgatccaaagaaggtgtttcacgttgttgaaattggataattcagaaaaaagcacctggaatcaatcactcaagaggagttgaaggaaccaaagccctaataaactagggaaagtaatctatcctcgccggagtcgttgtctcgccgataaggaacgaaggacgaagctgtcttcgatttccgggattgaagattcggttttgagctcaaatcgtcgactgagtaatgggggtaagttccgatttgctgattttgccaaattttcggattttttaagttgttttgcgcttgaggaacttgattatgtgtacaagcaataattgtattgtttatgatataggttgatccattcaaaactacggaaacgttagaagccgacaaggaaaccaatggtggtgtccctgtgaaggataaattgacttttaaagctcctgagagaaagtcccgtttaggtatgagttgggatttgtgagcttttgcattttgattacttgttttggaaccgtattgaacccatggggataatacatttgtaggtttggatgcaagggcaattgagaaaaaggataatgccaagactgagggcgagtttaaggttccgaagaagtcagcaatatctgttacatcatcgttggatgaagaagataaatctgatgtatcaggattagattttggaacagaaaacactcgacctgtccattccagcaggcgatatagagagaagtcttcaagatctcagtctgcacaaggtatttttttctcatcaatatgtagttttcagccctagactttgatccttctttgtgagcataagtacgatgttgaaataccaccttcattcgtttttctgaactcctgtgcttatgacttatgacatttgtgatttatttatttttttgtattgcagaaagtaccgtgactacagagaatgctggaacttcagatgtaagtcaattccatcctaataatgaaatcattattttgccctgggttatctatcttttctacttacttaactgatttttaagagtacatgcaacttgacttttagtattctgacatatttttcacctgttggaatgaagatctccataactccaaggactttatcttgcacatctagttatgaaagaggtggtagcaataggcatcgagaagaacataggcgtgacagaagtgaaactccgcggtcaagacagagaaacacttatgatgagatggatcactaccgacggagggaatcttatcgccaatctgaccgagactatcacggagaaaagcgtaggagatacaatagcgattggaggactccaggtatgctaaagattgttgaagctcataaagctatcaatttatgagcttattgacataaatgtcactacatttatctctatacaattttgtctattttcaattttttgttcccataagtgtgatgagtgttgcaaacacaacacttatttggcctttttgatggagtgtaggtaggtcagactgggatgatggacaggacgaatgggaacgtagtcctcacggagacagaggctctagttacagcaggcgacctcaaccttctccatcacccatgttagctgcagcttcacctgatgctcgtttagcctccccgtggctggatacaccacgttcaactagtatgttgtgttttaattttaatatttgtaatttggttctattaattgcaaccccgggaaaagattaacaacgggatttatcaccatacccttcttcacatgcagtgtcttctgcttctccatgggatatgggtgcaccttctcctattccaattcgggcttctggatcatctatcagatcctcaagctctaggtatggtggaagatccaatcagcttgcatattctagggaaggtgatctgacaaatgaggtatgcacccatgatcatgccacttcttattagacagaactgaatttccaatttgtttcccatgttttaagaatccatgtcgagcttgcttgataaatgtttatgtggattatagctctcttgcattaggattttttttgtttgttttaatacctatgccacatgttgttatgtcttatataggggcattcagatgaggatagatcgcaaggagctgaagaatttaaacatgagatcacagaaacaatgcgtgtggaaatggaatatcagtcagatcgtgcatggtaagtattactttcctttagaggcaggaaaagattggtgaatcaataatgttttatgaactgagagcatagtctcactcttcacgttcattgttgaaccatttatagattttataaagcctgtatgaatagttgttgttgcaatttcccaggtatgatacagacgaagggaactcactgtttgatgcggacagtgcatccttttttcttggagatgatgcttctctacagaagaaggaaactgaactggcaaagagactggtatttatctataccaattacgcactctttctttacaagtttttatatgacactgcttatatctgatctattatctatggctaggcttttccgttttgcataaatcatctaatttaatttgattctgactgaagcattaatctcttatctctttttactactcttgattaagtatacttagctaaattatgttgttttgatatgtaagttcagattattataagtgtaggttagaagagacatttgtaagttcaaattatgttctcgattgaatgctttgtaatatttgtaatgcaggttagaagagacggtagcaaaatgtcactcgctcagagtaaaaaatattctcagctcaatgcggataatgctcaatgggaagaccgccagcttctcagatctggagctgttagaggcacagaagtgcagactgagtttgatagcgaagaagaacggaaagcaattcttcttgtacatggtatatagactactagaatagctcaaagttaaccaataaatgtcaaggttaaatgagtagtatttgtaacatgccaggtaatattctattttttgggtaattgcagatacgaagcctcctttccttgatggaagagtcgtttacacaaagcaagcagagccagtaatgcctgtaaaggatcccacatcagacatggctataatttcacgaaaaggctcaggtcttgtcaaagaaattcgggagaaacaaagtgcgaataagtcacgacagcgattctgggagcttgcaggttctaatcttggtaatatccttggtattgaaaaatcagccgagcaggtaactacctaattggttgttggttctctatcgatattgtggttgttggacatagtgtgacttggtaatgatcatcttgcagattgatgccgatactgctgtagttggtgacgacggtgaagtagattttaaaggtgaggctaaatttgcacaacatatgaagaagggagaagctgtgagtgaatttgccatgtcaaagaccatggcagagcaacggcagtatcttcccatattttctgttagagatgaactattgcaggttggtggtctttcctttttatggccttgatagttgaattttaatatgcattattattaggggttacactttttttttattttaatttcatccttgccttaatcatctgctttttaatgtattctctaggtaataagagaaaaccaggtgatagtggtggttggcgaaactggttcgggaaagaccactcaacttacacaggtaattatggcttactatggcttttcagggaattcatttactaatacgtagttataaaacaattcaaacattgcacttatattctgttcctttttgttagtatcttcatgaggatggttacactataaatggtatagttggttgcacccaaccaaggcgtgtagcagccatgagtgttgcaaagagagttagtgaagagatggaaacagagttgggcgataaaattggttatgcaattcgttttgaagatgtaactggtccaaacactgttatcaaggtaaggtgttctcaagtaatgaactgatttttccttatcttttatgtttctggtttagttggcctcagaaagcttggcttatcatgcttttagcatctgcacttcaataaaacacgtagatttcttctgcaacttcattttttcctttgaaattacagtacatgaccgatggagtactactgagagagaccctcaaagattctgacctggataagtatcggtatgtatgctttaaccttacctctgatagatcatgctttgaactagataaatatcgttgctaactccttttttggactctgtatagtgtggtggtgatggatgaagcgcatgaaaggtcactcaacacagacgtcctttttggaatactgaaaaaagttgtggctcggcgtcgtgatttcaagctgatagtcacgtcagcaacccttaatgctcaaaagttttccaatttctttgggaggtaggttatcatcatccttcacataagaccaatttagaatctgaagaaggattttatatgacagtgtttttgctttggtaatgcagtgttcctatcttcaacattcctggaaggactttccctgtcaatattctctactctaaaactccttgtgaagactatgttgaagctgctgttaaacaggcaatgacgattcacataacaagcccacctggggacattctcatttttatgaccgggcaagatgagattgaggcagcgtgcttttcactaaaggagagaatggaacagctcgtatcatcttccagtagagaaataacgaacctactcattctcccaatatactctcagttacctgctgacttgcaagcaaagatattccagaaaccagaagatggagcccgtaaatgcattgttgccaccaatattgctgaaacatcattgacagtcgatggaatatattatgtgattgacactgggtatggaaagatgaaggttttcaatcctagaatgggtatggatgctcttcaagttttccccataagtcgtgcagcctctgatcagcgtgctggaagagctggaaggacagggccaggaacatgttacaggttgtatactgagagtgcttatttgaatgagatgttgccaagtcctgtgccagagattcagcggacgaatctgggtaatgttgtgttgttgttgaagtcattgaaaatagacaacttgctagattttgatttcatggatccacctccgcaagagaacatccttaactctatgtaccagctttgggtgttgggtgctctcaacaatgttggaggattaaccgacctggggtggaagatggtggagttcccattggatcctcctcttgcaaagatgcttttaatgggtgaacggcttgattgcatagatgaggttctgacgatcgtgtcaatgctttcagtaccttcagtgttcttcagacctaaagaaagagcagaagagagcgacgctgcaagggagaagttttttgtgccggaatcggatcatctgacgctgctgaacgtatatcagcagtggaaagagcatgactatagaggagactggtgcaatgaccattacctacaagtgaaaggtttgagaaaagctagagaggtaagatcccagcttctggatatcctcaagcaactgaaaattgaactcaggtcgtgtggaccggattgggatattgtgagaaaagccatctgttcagcgtatttccacaactcagctagattaaaaggtgttggggagtatgtgaactgcagaaccgggatgccttgccatttgcaccctagcagtgcactgtacggtctgggatacacaccggactatgtggtgtaccatgaactgatcttgaccacaaaggagtacatgcagtgtgcgacatcggttgagccgcattggctggctgagttagggcctatgttcttctcggtcaaggactcggatacatcgatgttggagcataaaaaaaagcagaaggaagagaaatcaggaatggaggaagagatggagaaactgagaagagatcaggtggagtcagagctgagaagcaaagagagagagagaaaaaaaagggcaaagcagcagcaacagatttcaggccctggcttgaaaaagggcaccactttcctcaggcctaagaagcttggactgtgacattgtaatgtaataaaaaacataccgaaaacgtcacccaaacaaaaaaaacggaaaaaacacagccaaaatggagcaaactgtaatcaccatgtatcgttgttcagatatttcttgatgtgaacaatattaaattgttccacgcttgtattgattctttataactaattagttagagatcctctacgtctctagtatagtaaagttacggtccaatttgtgttctctacaactctataataagcaaattactaatcaacagaaatagtcacaatccaaaatggtgtgtttccaccattgatgatttcagctgtttctcttcatagagcatctagattctcagaagatgggttccctcgagagttgatggcatgagtcgcgtctagtaatacacttttgagtctgctttgattgtgatgcagtgactaaaataccttgggagttcttatcaacttcaatacgagattttatttttctatcaaaaattaggaatactacaagatatcaatacttttgacttggttaatgtttttttttcttcttagaactgagatctccggatacttcgaacaaaagggttgatcttttcattaatgtttctaatagtttacattagtaatccttcatagtcgctgctacatctcatccttctagagagctgagttttgcccatcatcttgtcgtctctgaaacattctacatttatatcaagtcttatggattttacaatgcttaagaaccctaatttccaaatccagtttttggagttatgtggtacacaaatgtcatcaaatccccctcctaaacaaaatacattttgccatccatacaagtttccaaatctccctcatcaattcacattttgccaccaccatctacaacacctttttgcaactctaatgctccggctccatcatctgtgtttaagccaaaaatcaaagccacattataacttcaattcaacacacgcattgaacccaaagagcagaaggaagatgtggtgaacctgaggagatttagaaagcccctatcaaatattaccgctttctccatctgatatttcttcaagctttgcgatggcatccataagagctagttcatgatcctaccatttccaagtaaaactatatagtcagcatctcttttcatgatattttggagtaaacaactagattcaacaacacatgtatatagttcttactctcagcactctctttgccttctctacctctgctgggttggggttaactgacccaaaaactttttccacctgttacaaatattcataagattaacaactgtaaaacatttattcccatatcaaaaaaacttgaatgattacctcttttaacaatgtctcagtgtggagaatttcgatttcgcctaaagctttctttccgatgccattctgtgtcttaggttgctgcatcctcatgcttcccctacctctaccacccgcattgcttgcaggaccaccacgagccatggtttttgttccacggccttgcccaggatgtcctcctttacgagaaatcccaggatcttcaccttcccatctgatatctcccggagatatctatgatatatatatatataaagaacattcagaatcatatgtaaccaagtatccaagaatgagatgagctcttaaaacatacttttgagatgatatatatatatatatataaagaacattcagaattatatataatgtagaggatcgagcactaatcatacacttttgtcctctgccccttacagatggcaatcaagaaactgaaccattagatgagaaactaatggatgggtgagggcaactaacaattgtttttaacatcattcatgatccaacttgggtggcagcgaacaagtaaaactaatctctcacttctagtgtgcagaatcgaaatgaattgcagttggtataaaaactgacaagcctctcattgacgtgcaaggaatgtcgaatataaaccatcgagatcataaccaaatagaagaagacaaacaacacatggtctctccaaattttacgacatagcatcatcttctgtacaaatgtgaaagatatattagacaagtagaaaaactgaaatcataattacctctttaagatttacccattcccaggtttcattcgcagagttaatatcatacactaaagcatgacgcccctaatcaatgttgaaaaaaggaaataaatgatatcagaaaacggagatttggcactaaaacactaatatatagcaatgaaagataagatacctcaacagggttgtagtcagttataacagcttcgtagtattggttgtcatcaggccacttcgtccataccttccttccaaccaacgggtcatatgatcccgattcacctggttcatttgttaaagcgccagcctggggccttccagcaatgcctgtagatgggtactgcatcgacttcatcgagcacaaagaatgaaatattcttataccttagtcaatgaagaatataagaacaagattgacggtaccaacaattagaatcaagcagcatcatgacttactgtctttggcttcttggtctttggacctggtggaggacctccccttcttagtgcagatgacgatggttgcattgaagggtgcaaagaaggagatggtgggcccatcgctaatgaggcgattgattgtgatgtcttttgcttcttacgtgatcctgatacagccggactcggagcatcatgaaccagctgaggaacactagactgaaggctgtttgcctttctccattccctgacatgatttaaattaaccttgttggcttacttttgattgattgcagagatttatcagtgatcaattacatatacaacagaccttattcgcctgatcatttcatcagcgttaacccttgataacagctctctgtgttcctcatcagacactcgaagttcttttctgagttcagtgatcaaactttctttctcctgaatattttttttccagccgaaggaacaagaataaaaaaaggacaaaaggtaagcttgtgaagttacataaacatgtactaaactaatgaagaagacaagcaaaatagtacccaggtaatagcatcggactgggctttaaatgcgcggagtatcgagctataagcttcttgctcaatgagatgaatttgagtttccatttcattgtgcacccgtgataaaggagcagaattgagaactgaaggccttccattcccggtaggtctggcgtttctttgatatctaccttgatgagatggaggcaggtcatcatctgtacctgagttcccgcataaaaaaacatatcacaaaacacacggaaacaaatacggaagtaaaataaacttagagaaggaacgaatgcttctaactgaaaaagcacataagactcaccactactatcagaaggtcggtaatccatctgtgtactctcctgattattctttacagtgaacctaagaaatcaaaacgtgggatgtggcctgtctagttgcaccaaagcacgagctgcaagaccaagaaaacaacttcaaaggaggaaaaagccaaagcattcactcacatgcagagcatacgaagacgaaaagcaagaactttgaactttaaaccttgacacagaaaattaaactatccaaaacactggtcaaagttcttaaactcaagctaaacagacaaacatgttgccttctgcagattaaacaacagaaattgaatttctactaaacttgtgaaaaaattatttccaattaaagaacaacactttcctaaaccctaaaattcccgacgaaacctagcacatcaatgctagctttcaagatgaacaaaacttaaattgcgcagaaagaatgtaagatcgaaaagcaaaataccttctttggatctattctcgaaaaattcgaacagccatcgagaaaattactccctaaagatcatatagatttgagcgagaaagcagacaacacaaatctataaattagaagatccgaacaaaggacgattcttataggcaatctctcggctccaatccgaattcaccaacgttagatctccaggaagcagaaagaacgccgtggaattgaagaattacagaacaaatcgtgatgaattttccgagggatctatgagtcgcggacgtgaaacccacattattttgtgccctaattttttctcagttgataggttggtttgagttacacgaacgacggcaagttttgtcgtttcactctcatctttctatctcttttggttctgtcttaaacccgaacttcggtacactttcataccaacacttctgtttttgttttttttttgtttttaacatcatattttctgtgtaataattaatctcaaaaaagcatgttataattcagttttatttaccaacaagaatcgatttggctgcaaataaaaaagacaaaataataaataaaccgacattgtgaaaatgttctgaaccggaaaagtcaaagaatgtcggttcggtccaaaatcgaaaattaaacaagttccaatagaaaaatgtgaacaaagggaaaaaggaagaagaaatgttgttgcgtgtgtgttgtccgtcgtctttcttctacctccgaccgcttcatctcttcagttcaactgcgaaagttcctttttgtccctctcttcccagacaatttcgattaagcccttctcgatcttcttcctttcgtcggatggaatcttctccggcttcttcttcgtctccgacgccggtaaccgattcatctgctgattctttagcgaaagatctgcagaatcaaagtctgggagctgttgatgaaggtgttaagattaaaaagaagctcgaagattttaactgggaccattcctttgttaaggaattgcctggtgatcctagaaccgatgttatctcgcgtgaggtatcaatttttgtttcgatcttcaacggagataataggagcaatcttaattttgtttttttccttctctgtcaatactttgtttgtttttgtggtttattctcgaagcatgaagtagatatttatacttgttggtagagtggattatactcaggctaaagttttatttttggtacttattgctcattttaagactacaaaattgaaagccttatgtgtgaatttgtcatgtctctgtgtgctcattattgtcctctcattaagctatttaacttgagcatccggattttgatagtttattgtactgtgtaggtattacatgcttgctattcaaaagtttccccatcagtagaagtggatgatcctcagcttgtagcatggtctgtctctgttgcagagctattagatttggatcctaaagagtgagtttgattctctatggtcagactaaagtcttaagtgtttggtgcagaagataattgggttttcacggtcttagacagatatagcaagtattcgttataattgataccgttgtttccaattcaccttcatggttacattcttatgtttctcaaaagaagttgtttcatttctgtctttataatattgtgaaactcaagttttaagagtgttttatctttatatctgctgccatttcgaaactcttttttgtctttctgcttttgacttatggcaaaaattcttttttaactttcagatttgaaaggccagatttccctctcatgttgtccggcgctaaacctttaccaggagcgtatgtgttccttacccaagtcaaattttagtctcaaccttcttaaatccaaagtttctaatcgcagttattgatacttttttctacagaatgtcttatgctcaatgctatggaggacaccagtttggcatgtgggctggacaactaggggatggacgtgccattactctgggagaagttttgaactccaaaggtgaaagatgggaacttcagcttaaaggtgcgggtagaactccatatagccgttttgctgatggccttgcagtgctccgtagtagcatcagggagttcctttgcagtgaaactatgcattgtcttgggatccctaccacgcgtgccctttgtcttctcaccacaggtcaaaatgtcactcgcgacatgttttatgagtatgtccaaaacattccaaaccttgtctaattttttcctttattatgttcttcctctgtgtaaaaagttcatgtccccgccaaatataaagaaaattaggtttcataggattaggaactgcacatgcgcatgatctacatggaagtttttaatctactgaactaagcctctagtagagaaatttttgtctataaaattaggcttctaggtggttgactactcctattgtttggcattgtgcgtttgcagtggcaatccgaaggaagaacccggcgcaatcgtttgcagggtttctcagtcatttctacgctttgggtcataccaaatacatgcctctagaggaaaagaggatcttgatattgttcgtaagttggcagactatgccattaaacatcatttcccacatatagagagcatggatagaagcgatagcctatctttcaaaaccggtgatgaagatgattcggttgtggatctaacttccaacaagtatgcaggtaattccctaatgaagtatttgtcaaaatgctgcatgaaacgccactattttcatttgtatcacctattatacttttgttattgccagttgttacattaatggccaatattcgaactaactcttttgcttttttaattatattagcatggatcgttgaaattgctgagcgtacagctaccttagttgcaagatggcaaggtgtaggtttcacccatggtgtgctcaacactgacaatatgagcattttgggtcaaaccattgactatggcccatttggtttcttggatgcttttgatccaagttacaccccaaacacgacagatctcccaggaagaagatactgttttgcaaatcagcctgacatcggcttgtggaatattgctcaattttctaagactctggcggttgctcaactgataaatcaaaaggaggcgaattacgccatggagaggtaactttgtttgtccctattgatttggagcactattcttaattatattttaggaactaccaagtagttgagggactcgtgaatcgtgattcaggtacggtgataaattcatggatgagtatcaagccataatgtctaagaagcttggtcttaccaagtataacaaggaggtcattagcaaacttttgaacaatatgtctgttgataaagttgattacaccaacttcttccggcttcttgcaaatgtaaaagcaaatcccaacacacccgaaaatgagttattgaaacccttgaaagctgtgctcttggacatcggaaaggagagaaaagaagcatggatcaaatggatgagaagctatatacaagaggtatccaattcttttcttacatttttcccaaagtacccatcttcagttcttcttaaactatgattttactttccacaaagttcaattacactgtttatccctgtatctttctggttgatgcaactcctagctgtgtgtggatttgaatttgcaggtgggtggtagtgaggtatcagatgaagaaagaaaagcaagaatggattcagtgaacccaaagtacattctgaggaactatctgtgccaaagtgcaatagatgcagctgaacaaggcgatttctcagaagtcaacaatttgatccgtctaatgaaacgtccttatgaggaacagccggggatggagaaatatgctcggttgcctcctgcctgggcttacaggccaggcgtctgcatgctttcttgttcctcctagttcttctccttcctgcttttgttttgccatttatagaaaggaagagaaaaaagtaatactctcttatatgtgtattggctgtaatgctttaaagagacaagaaaaactttgctgttttcaggattttgtttttacattgaataaagatttgagtacatatagatttccatgagaagctcaacaaaagaacccaagagccaatatcattttatgcgattaaaaagattgttattacccgacaaaacttgatatggaataaacaggtgagagaccattggactaatcttctttcatattttatcatacaagactcaaatcgagtttagtaaaaaaactgaagtgagtggcaactacagaagctgatactaaattagcaacttccagaatgtagccttcaagcgccgaccttcggattatctgagggtcagctccaaacacaagctcctgagctcacatgctaagaacagagagaatcacacaacatagtcagctataaataacagatctaagagacagctaaaaacattttgtggcgtacctctcggtagcacgaggggtgatgggaaccacaccagaaggtgtcacaagggcatcgatcagaacatcattaggtgttacaggaatacttccatcctcaagaatttgaggcgagtatgacaatgcaactgcagtagggaaaagagaacagtgcttagattatattttctattgaaaacgttctgtagaattaatttgattgtggtctatacccataagtggatatctccaacccttctcctttgcacggtcctgatatctcttcaagaaagtgtcgtagtagcttttacccatatgagttatccatataaacaagtagaaaggagttagattagagcatgaaaacagcaatgggaattgctagtatgaaactacattctttggggatggcaagatttctgtgttatgacagaaggtaagagaagaagtgagactaagattgtgtaatcgctttacaaagtagtacaaccgcagaaactgcttaacaaaagcttcatattattaggtcagaccatgatggaaagaaaacttaaggtcaatggaaacttacccacctccacgacctaaacgtcgcccacatctgtcaaacgcaagacctgaccacaaagatttgaaaattaaagttgattagataaagagataaagtaaagttttggaaatgaatcagtttctccatacctggcaagatgaacaaatcgatcggttcatctgcttgcaacactgtcaatatagaaaaatggtttaaatttcaagaaggagagtttgaactcattacgtgaagcttataatggtagcaacatagaaaaaaagaacactaccatcttcacggtcattcccttgggcatcaacaggagctggttccaaaatgttcattgagtttgcaacaaggtcttccatatgagatatgtgcaacatgcgcatgttactgttcttatcctccacccaagggacatatagctttttctgagtatttgaatctaaacaagaacaaaattgcagagaaaactcatcagaaaacaaatgcaggacatatagctttttcatccatatgctacaataagtttctttagtttggttagttattggtttctcttggttccaaaacttatcagatccttctgtgatagagacacgagcaatttgcattgatcataatgagggatatgctattaaaccaagtgatcagtgagtacaatgtaaagctt
